(19) United States
(12) Patent Application Publication
(10) Pub. No.: US 2016/0017349 A1
(43) Pub. Date: Jan. 21, 2016

(54) MAIZE MICRORNA SEQUENCES AND TARGETS THEREOF FOR AGRONOMIC TRAITS

(71) Applicant: PIONEER HI-BRED INTERNATIONAL, INC., Johnston, IA (US)

(72) Inventors: Mule Ayele, JOHNSTON, IA (US); KEVIN HAYES, URBANDALE, IA (US); CARL SIMMONS, DES MOINES, IA (US); SOBHANA SIVASANKAR, ADEL, IA (US); JOHN VAN HEMERT, Johnston, IA (US); BING-BING WANG, JOHNSTON, IA (US)

(21) Appl. No.: 14/772,816

(22) PCT Filed: Mar. 13, 2014
(86) PCT No.: PCT/US14/26380

§ 371 Date: Sep. 4, 2015

Related U.S. Application Data
(60) Provisional application No. 61/786,368, filed on Mar. 15, 2013.

(51) Int. Cl. C12N 15/82

(52) U.S. Cl. CPC C12N 15/8218; C12N 15/8261; C12N 15/8273

(57) ABSTRACT

Methods and compositions for maize target gene suppression and improving an agronomic trait through microRNAs or target gene modulation are disclosed. Polynucleotide constructs useful for gene silencing, or upregulation or modulation as well as cells, plants and seeds comprising the polynucleotides and methods for using microRNAs to silence a target gene are also described.

### FIELD

[0001] The field relates generally to plant molecular biology in relation to methods of suppressing gene expression.

### BACKGROUND

[0002] MicroRNAs (miRNAs) were first identified only a few years ago, but already it is clear that they play an important role in regulating gene activity. These short nucleotide noncoding RNAs have the ability to hybridize via base-pairing with specific target mRNAs and down-regulate the expression of these transcripts, by mediating either RNA cleavage or translational repression. Recent studies have indicated that miRNAs have important functions during development. In plants, they have been shown to control a variety of developmental processes including flowering time, leaf morphology, organ polarity, floral morphology, and root development. Given the established regulatory role of miRNAs, it is likely that they are also involved in the control of some of the major crop traits such drought tolerance and disease resistance.

[0003] Improving crop plants for water use efficiency or nitrogen use efficiency and yield, among others, are needed to improve crop productivity necessary to feed a growing population. MicroRNAs are key regulators of plant processes, and thus effort to develop the use of microRNAs to improving crop plants is of high interest and potential value. They are believed to regulate diverse processes in plants from development to environmental adaptations.

### BRIEF DESCRIPTION OF THE TABLES

[0004] Table 1 lists the SEQ ID NOS of the microRNA core sequences (Column A), the microRNA precursor genes (Column B) and the corresponding microRNA target genes (Column C) for the microRNA sequences of Column A. In column C, the transcript SEQ ID NO and any corresponding peptide SEQ ID NO for each target gene are listed separated by a comma (,). Every target gene transcript and its associated peptide SEQ ID NOs are separated by a semi-colon (;) in Column C from another transcript-peptide pair. If a particular transcript does not have an associated peptide sequence, then the designation “No_Pept” was used (see e.g., for microRNA SEQ ID NO: 32). The sequences for the SEQ ID NOs listed in Columns A-C are provided in the accompanying sequence listing, incorporated herein by reference in its entirety. As shows in Table 1, a particular core microRNA may have more than precursor gene and more than one target gene.

[0005] Table 2 lists the relative trait values for drought (Column D), nitrogen use efficiency (nitrogen; Column E), and yield (Column F) with respect to each target gene (Column A) and the translated peptide sequence (Column B) for the target gene. The relevant traits are indicated as such (Column C). For example, some target genes have high relative trait values for all the three referenced traits. Some target genes are represented under only of the traits (e.g., drought or nitrogen or yield).

### BRIEF DESCRIPTION OF THE SEQUENCE LISTING

[0006] A sequence listing is provided herewith in electronic medium. The contents of the sequence listing are hereby incorporated by reference in compliance with 37 CFR 1.52(e).

[0007] SEQ ID NOS: 1-197 are core microRNA sequences. SEQ ID NOS: 198-1126 are microRNA precursor genes. SEQ ID NOS: 1127-2495 are microRNA target gene nucleotide sequences (transcripts). SEQ ID NOS: 2496-3804 are microRNA target gene translated amino acid sequences (peptides).

### SUMMARY

[0008] A method of improving an agronomic trait of a maize plant, the method includes providing a transgenic maize plant comprising in its genome a recombinant DNA having at least one DNA element for modulating the expression of at least one target gene, wherein the at least one DNA element is selected from the group consisting of nucleotide sequences that are at least 90% identical to SEQ ID NOS: 1-197. In an embodiment, the agronomic trait is drought tolerance. In an embodiment, the agronomic trait is nitrogen use efficiency. In an embodiment, the agronomic trait is yield increase.

[0009] In an embodiment, the DNA elements whose sequences are disclosed herein, for example in Table 1 and in the accompanying Sequence Listing, modulate the expression of a target gene sequence selected from the group consisting of SEQ ID NOS: 1128, 1130, 1136, 1138, 1145, 1147, 1157, 1161, 1167, 1173, 1254, 1265, 1308, 1342, 1390, 1471, 1472, 1533, 1537, 1540, 1588, 1592, 1600, 1605, 1621, and 1703. In an embodiment, the DNA element modulates the expression of a gene sequence encoding a target peptide sequence selected from the group consisting of SEQ ID NOS: 2497, 2499, 2505, 2507, 2514, 2516, 2526, 2530, 2536, 2542, 2623, 2634, 2676, 2753, 2831, 2832, 2888, 2892, 2895, 2943, 2947, 2955, 2975, and 3054.

[0010] A method of improving an agronomic trait of a maize plant, the method includes providing a transgenic maize plant comprising in its genome a recombinant DNA for modulating the expression of at least one target gene, wherein the target gene sequence is selected from the group consisting of SEQ ID NOS: 1127-2495. In an embodiment, the target gene sequence is selected from the group consisting of SEQ ID NOS: 1128, 1130, 1136, 1138, 1145, 1147, 1157, 1161, 1167, 1173, 1254, 1265, 1308, 1342, 1390, 1471, 1472, 1533, 1537, 1540, 1588, 1592, 1600, 1605, 1621, and 1703 and wherein the agronomic trait is one of drought tolerance, nitrogen use efficiency or yield. In an embodiment, the target gene sequence is selected from the group consisting of SEQ ID NOS: 1168, 1178, 1179, 1185, 1194, 1220, 1710, 1716, 1733, 1738, 1771, 1784, 1795, 1807, 1823, 1872, 1892, 1926, 1936, 1937, 1938, 1942, 1970, 2001, 2003, 2006, 2026, 2074, 2105, 2109, 2110, 2130, 2145, 2152, 2174, 2175, 2189, 2192, 2199, 2200, 2202, 2240, 2245, 2246, 2291, 2299, 2310, 2313, 2340, 2341, 2371, 2412, 2413, 2414, 2417, 2429, 2430, 2431, 2443, 2468 and wherein the agronomic trait is one of nitrogen use efficiency or yield.

[0011] In an embodiment, the target gene sequence for modulation by a DNA element encoding an interfering RNA is selected from the group consisting of SEQ ID NOS: 1135, 1137, 1141, 1142, 1143, 1146, 1153, 1154, 1160, 1164, 1166, 1169, 1183, 1190, 1192, 1195, 1208, 1231, 1255, 1256, 1258, 1267, 1275, 1278, 1279, 1283, 1290, 1299, 1307, 1322, 1336, 1339, 1342, 1347, 1353, 1355, 1361, 1362, 1363, 1373, 1378, 1409, 1415, 1430, 1431, 1432, 1437, 1448, 1449, 1452, 1453, 1468, 1487, 1498, 1505, 1552, 1562, 1575, 1615, 1643, 1655, 1662, 1664, 1680, 1684 and wherein the agronomic trait is one of drought tolerance or yield.

[0012] A method of improving an agronomic trait of a maize plant, the method includes providing a transgenic maize plant comprising in its genome a recombinant DNA for modulating the expression of at least one target gene, wherein the target gene sequence encodes a target polypeptide sequence selected from the group consisting of SEQ ID NOS: 2496-3804. In an embodiment, the target polypeptide sequence is selected from the group consisting of SEQ ID NOS: 2497, 2499, 2505, 2507, 2514, 2516, 2526, 2530, 2536, 2542, 2623, 2634, 2676, 2753, 2831, 2832, 2888, 2892, 2895, 2943, 2947, 2955, 2975, and 3054 and wherein the agronomic trait is one of drought tolerance, nitrogen use efficiency or yield. In an embodiment, the target polypeptide sequence is selected from the group consisting of SEQ ID NOS: 2498, 2501, 2503, 2524, 2568, 2602, 2606, 2613, 2618, 2629, 2632, 2640, 2652, 2660, 2664, 2685, 2695, 2720, 2742, 2752, 2757, 2759, 2770, 2780, 2790, 2795, 2796, 2797, 2799, 2802, 2811, 2814, 2818, 2819, 2820, 2822, 2833, 2834, 2835, 2836, 2837, 2842, 2847, 2849, 2857, 2884, 2918, 2936, 2939, 2942, 2948, 2954, 2956, 2957, 2958, 2959, 2965, 2966, 2967, 2983, 2995, 2996, 3035, 3037, 3055, 3058 and wherein the agronomic trait is one of drought tolerance or nitrogen use efficiency.

[0013] In an embodiment, the target gene sequence that is modulated by a nucleic acid encodes a target peptide sequence selected from the group consisting of SEQ ID NOS: 2537, 2547, 2548, 2554, 2563, 2589, 3061, 3067, 3084, 3089, 3121, 3134, 3145, 3156, 3172, 3220, 3239, 3271, 3281, 3282, 3283, 3287, 3311, 3287, 3341, 3344, 3364, 3409, 3438, 3461, 3476, 3482, 3503, 3504, 3518, 3521, 3528, 3529, 3531, 3568, 3573, 3574, 3618, 3625, 3636, 3639, 3666, 3667, 3696, 3731, 3732, 3733, 3734, 3743, 3744, 3756, 3780, and wherein the agronomic trait is one of nitrogen use efficiency or yield.

[0014] An isolated polynucleotide includes a microRNA selected from the group consisting of SEQ ID NOS: 1-197, wherein the microRNA modulates the expression of a target gene in maize involved in an agronomic trait, the target gene selected from the group consisting of SEQ ID NOS: 1128, 1130, 1136, 1138, 1145, 1147, 1157, 1161, 1167, 1173, 1254, 1265, 1308, 1342, 1390, 1471, 1472, 1533, 1537, 1540, 1588, 1592, 1600, 1605, 1621, and 1703.

[0015] A recombinant DNA construct includes the polynucleotides disclosed herein, for example, the polynucleotides encoding the miRNAs of Table 1, wherein the DNA construct includes a plant expressible regulatory element.

[0016] An isolated polynucleotide comprising a microRNA selected from the group consisting of SEQ ID NOS: 1-197, wherein the microRNA modulates the expression of a target gene in maize involved in an agronomic trait, the target gene selected from the group consisting of SEQ ID NOS: 1168, 1178, 1179, 1185, 1194, 1220, 1710, 1716, 1733, 1738, 1771, 1784, 1795, 1807, 1823, 1872, 1892, 1926, 1936, 1937, 1938, 1942, 1970, 2001, 2003, 2006, 2026, 2074, 2105, 2109, 2110, 2130, 2145, 2152, 2174, 2175, 2189, 2192, 2199, 2200, 2202, 2240, 2245, 2246, 2291, 2299, 2310, 2313, 2340, 2341, 2371, 2412, 2413, 2414, 2417, 2429, 2430, 2431, 2443, 2468 and wherein the agronomic trait is one of nitrogen use efficiency or yield.

[0017] In an embodiment, the transgenic maize plant includes the DNA constructs disclosed herein. In an embodiment, the transgenic seed includes the DNA constructs disclosed herein.

[0018] A transgenic maize plant, wherein the expression of a target gene is reduced compared to a control plant, the target gene sequence is selected from the group consisting of SEQ ID NOS: 1127-2495, and wherein the transgenic maize plant exhibits drought tolerance, nitrogen use efficiency, or increased yield or a combination thereof.

[0019] A transgenic maize plant, wherein the expression of a target gene is reduced compared to a control plant, the target gene sequence is 90% identical to a polynucleotide sequence selected from the group consisting of SEQ ID NOS: 1127-2495, and wherein the transgenic maize plant exhibits drought tolerance, nitrogen use efficiency, or increased yield or a combination thereof.

[0020] A recombinant DNA construct includes a microRNA precursor gene selected from the group consisting of SEQ ID NOS: 198-1126 or a fragment thereof to modulate the expression of a target gene. In an embodiment, the DNA constructs disclosed herein modulate the expression of a target gene selected from the group consisting of SEQ ID NOS: 1127-2495, and wherein the target gene modulates drought tolerance, nitrogen use efficiency, or increased yield or a combination thereof.

[0021] A method of developing a maize plant, the method includes selecting a maize plant using marker assisted selection from a plurality of maize plants by detecting a molecular marker, wherein the molecular marker is derived from a polynucleotide sequence selected from the group consisting of (i) SEQ ID NOS: 198-1126 or a complement thereof or (ii) SEQ ID NOS: 1127-2495 or a complement thereof. In an embodiment, a maize plant produced by the method of marker assisted selection is disclosed herein. In an embodiment, a maize plant cell produced by the method of marker assisted selection is disclosed herein. In an embodiment, the maize seed produced by the method of marker assisted selection is disclosed herein.

[0022] An artificial or a synthetic nucleic acid molecule encoding a single stranded or double stranded RNA molecule is disclosed, wherein the nucleic acid molecule is designed based on the complementarity to one of (i) the miRNA sequences of SEQ ID NOS: 1-197; (ii) the miRNA precursor genes of SEQ ID NOS: 198-1126; or (iii) the target genes of SEQ ID NOS: 1127-2495.

### DETAILED DESCRIPTION

[0023] Regulatory activity of microRNAs (miRNA) is specific towards certain sets of genes depending on the sequence similarity of the target genes. The site of action for these miRNAs within the target gene can vary, and can affect for example, promoter function, mRNA stability or translation, thus affecting the overall expression and activity of the target genes. Often the miRNAs have negative regulatory function upon the target gene. The target genes are often regulators of a pathway or a network hub or a node, and depending upon whether they have intrinsic negative or positive regulations of the neighboring or downstream genes in their respective networks, the net effect upon the pathway-network system of the microRNA regulation can be either positive or negative.

[0024] Based on a comprehensive survey of maize microRNAs, their source genes, and the likely target genes they regulate, methods and compositions are disclosed herein that modulate gene functions and improve crop productivity through water use efficiency, or nitrogen use efficiency or yield.

[0025] Relative trait values were assigned to the various target genes depending on the likelihood of their role in association with relevant agronomic traits, such as water use efficiency (WUE, drought), nitrogen use efficiency (NUE, Nitrogen), and yield. The miRNA sequences and the corresponding target gene sequences establish relationships among the miRNAs and their target genes for trait efficacy. These miRNAs and/or their target genes can be used, for example by recombinant technology to induce gene suppression or as tools to enable marker-assisted selection for breeding purposes towards crop improvement.

[0026] In an embodiment, modulating the expression of the miRNA or the interaction of the miRNA with the target gene, results in improving one or more agronomic traits in the crop plants. Depending on the anti-correlated nature of the microRNAs relative to the target genes, for example, a down-regulation of a microRNA would equate to an upregulation of the target gene. Therefore, it is possible to upregulate the expression of a target gene transgenically without expressing a recombinant nucleic acid of the target encoding the target peptide. In an embodiment, for example, by changing the expression of an endogenous miRNA either through transgenic suppression methods or by engineering a site-specific change in the precursor gene for the endogenous miRNA, expression and/or activity of the corresponding target gene(s) can be modulated.

[0027] In an embodiment, to modulate the expression of one or more genes involved in a pathway or those genes that share sequence similarity, one or a few miRNAs can be expressed to affect the expression of multiple genes. For example, one microRNA (SEQ ID NO: 46) can affect the expression of a number of genes involved in drought or nitrogen or yield (see Table 1; target gene SEQ ID NOS: 1128, 1147, 1289, 1311, 1314, 1316, 1338, and others).

[0028] Methods and compositions useful for suppressing targeted sequences are disclosed. The compositions can be employed in any type of plant cell, and in other cells which comprise the appropriate processing components (e.g., RNA interference components), including invertebrate and vertebrate animal cells. The compositions and methods are based on an endogenous miRNA silencing process discovered in Arabidopsis, a similar strategy can be used to extend the number of compositions and the organisms in which the methods are used. The methods can be adapted to work in any eukaryotic cell system. Additionally, the compositions and methods described herein can be used in individual cells, cells or tissue in culture, or in vivo in organisms, or in organs or other portions of organisms.

[0029] The compositions selectively suppress the target gene by encoding a miRNA having substantial complementarity to a region of the target gene. The miRNA is provided in a nucleic acid construct which, when transcribed into RNA, is predicted to form a hairpin structure which is processed by the cell to generate the miRNA, which then suppresses expression of the target gene.

[0030] Nucleic acid sequences are disclosed that encode miRNAs from maize. Backbone hairpins containing the individual miRNA sequences are also disclosed. Constructs are described for transgenic expression of miRNAs and their backbones. Alternatively, constructs are described wherein backbone sequences and miRNA sequences are exchanged thereby altering the expression pattern of the miRNA, and its subsequent specific target gene in the transgenic host. Any miRNA can be exchanged with any other backbone to create a new miRNA/backbone hybrid.

[0031] A method for suppressing a target gene is provided. The method employs any of the constructs above, in which a miRNA is designed to identify a region of the target sequence, and inserted into the construct. Upon introduction into a cell, the miRNA produced suppresses expression of the targeted sequence. The target sequence can be an endogenous plant sequence, or a heterologous transgene in the plant.

[0032] There can also be mentioned as the target gene, for example, a gene from a plant pathogen, such as a pathogenic virus, nematode, insect, or mold or fungus.

[0033] Another aspect concerns a plant, cell, and seed comprising the construct and/or the miRNA. Typically, the cell will be a cell from a plant, but other prokaryotic or eukaryotic cells are also contemplated, including but not limited to viral, bacterial, yeast, insect, nematode, or animal cells. Plant cells include cells from monocots and dicots. The disclosure also provides plants and seeds comprising the construct and/or the miRNA.

[0034] “Plant” includes reference to whole plants, plant organs, plant tissues, seeds and plant cells and progeny of same. Plant cells include, without limitation, cells from seeds, suspension cultures, embryos, meristematic regions, callus tissue, leaves, roots, shoots, gametophytes, sporophytes, pollen, and microspores.

[0035] The term “plant parts” includes differentiated and undifferentiated tissues including, but not limited to the following: roots, stems, shoots, leaves, pollen, seeds, tumor tissue and various forms of cells and culture (e.g., single cells, protoplasts, embryos and callus tissue). The plant tissue may be in plant or in a plant organ, tissue or cell culture.

[0036] The term “plant organ” refers to plant tissue or group of tissues that constitute a morphologically and functionally distinct part of a plant.

[0037] The term “genome” refers to the following: (1) the entire complement of genetic material (genes and non-coding sequences) present in each cell of an organism, or virus or organelle; (2) a complete set of chromosomes inherited as a (haploid) unit from one parent.

[0038] “Progeny” comprises any subsequent generation of a plant. Progeny will inherit, and stably segregate, genes and transgenes from its parent plant(s).

[0039] Units, prefixes, and symbols may be denoted in their SI accepted form. Unless otherwise indicated, nucleic acids are written left to right in 5′ to 3′ orientation; amino acid sequences are written left to right in amino to carboxyl orientation, respectively. Numeric ranges recited within the specification are inclusive of the numbers defining the range and include each integer within the defined range. Amino acids may be referred to herein by either commonly known three letter symbols or by the one-letter symbols recommended by the IUPAC-IUB Biochemical Nomenclature Commission. Nucleotides, likewise, may be referred to by their commonly accepted single-letter codes. Unless otherwise provided for, software, electrical, and electronics terms as used herein are as defined in The New IEEE Standard Dictionary of Electrical and Electronics Terms (5^{th} edition, 1993). The terms defined below are more fully defined by reference to the specification as a whole.

[0040] The terms “recombinant construct”, “expression construct”, “chimeric construct”, “construct”, and “recombinant DNA construct” are used interchangeably herein. A recombinant construct comprises an artificial combination of nucleic acid fragments, e.g., regulatory and coding sequences that are not found together in nature. For example, a chimeric construct may comprise regulatory sequences and coding sequences that are derived from different sources, or regulatory sequences and coding sequences derived from the same source, but arranged in a manner different than that found in nature. Such a construct may be used by itself or may be used in conjunction with a vector. If a vector is used, then the choice of vector is dependent upon the method that will be used to transform host cells as is well known to those skilled in the art. For example, a plasmid vector can be used. Screening may be accomplished by Southern analysis of DNA, Northern analysis of mRNA expression, immunoblotting analysis of protein expression, or phenotypic analysis, among others.

[0041] This construct may comprise any combination of deoxyribonucleotides, ribonucleotides, and/or modified nucleotides. The construct may be transcribed to form an RNA, wherein the RNA may be capable of forming a double-stranded RNA and/or hairpin structure. This construct may be expressed in the cell, or isolated or synthetically produced. The construct may further comprise a promoter, or other sequences which facilitate manipulation or expression of the construct.

[0042] As used here “suppression” or “silencing” or “inhibition” are used interchangeably to denote the down-regulation of the expression of a product of a target sequence relative to its normal expression level in a wild type organism. Suppression includes expression that is decreased by about 10%, 15%, 20%, 25%, 30%, 35%, 40%, 45%, 50%, 55%, 60%, 65%, 70%, 75%, 80%, 85%, 90%, 95%, or 100% relative to the wild type expression level.

[0043] As used herein, “encodes” or “encoding” refers to a DNA sequence which can be processed to generate an RNA and/or polypeptide.

[0044] As used herein, “expression” or “expressing” refers to production of a functional product, such as, the generation of an RNA transcript from an introduced construct, an endogenous DNA sequence, or a stably incorporated heterologous DNA sequence. The term may also refer to a polypeptide produced from an mRNA generated from any of the above DNA precursors. Thus, expression of a nucleic acid fragment may refer to transcription of the nucleic acid fragment (e.g., transcription resulting in mRNA or other functional RNA) and/or translation of RNA into a precursor or mature protein (polypeptide).

[0045] As used herein, “heterologous” with respect to a sequence means a sequence that originates from a foreign species, or, if from the same species, is substantially modified from its native form in composition and/or genomic locus by deliberate human intervention. For example, with respect to a nucleic acid, it can be a nucleic acid that originates from a foreign species, or is synthetically designed, or, if from the same species, is substantially modified from its native form in composition and/or genomic locus by deliberate human intervention. A heterologous protein may originate from a foreign species or, if from the same species, is substantially modified from its original form by deliberate human intervention.

[0046] The term “host cell” refers to a cell which contains or into which is introduced a nucleic acid construct and supports the replication and/or expression of the construct. Host cells may be prokaryotic cells such as E. coli, or eukaryotic cells such as fungi, yeast, insect, amphibian, nematode, or mammalian cells. Alternatively, the host cells are monocotyledonous or dicotyledonous plant cells. An example of a monocotyledonous host cell is a maize host cell.

[0047] The term “introduced” means providing a nucleic acid (e.g., expression construct) or protein into a cell. Introduced includes reference to the incorporation of a nucleic acid into a eukaryotic or prokaryotic cell where the nucleic acid may be incorporated into the genome of the cell, and includes reference to the transient provision of a nucleic acid or protein to the cell. Introduced includes reference to stable or transient transformation methods, as well as sexually crossing. Thus, “introduced” in the context of inserting a nucleic acid fragment (e.g., a recombinant DNA construct/expression construct) into ac ell, means “transfection” or “transformation” or “transduction” and includes reference to the incorporation of a nucleic acid fragment into a eukaryotic or prokaryotic cell where the nucleic acid fragment may be incorporated into the genome of the cell (e.g., chromosome, plasmid, plastid or mitochondrial DNA), converted into an autonomous replicon, or transiently expressed (e.g., transfected mRNA).

[0048] The term “genome” as it applies to a plant cells encompasses not only chromosomal DNA found within the nucleus, but organelle DNA found within subcellular components (e.g., mitochondrial, plastid) of the cell.

[0049] The term “isolated” refers to material, such as a nucleic acid or a protein, which is: (1) substantially or essentially free from components which normally accompany or interact with the material as found in its naturally occurring environment or (2) if the material is in its natural environment, the material has been altered by deliberate human intervention to a composition and/or placed at a locus in the cell other than the locus native to the material.

[0050] As used herein, microRNA or “miRNA” refers to an oligoribonucleic acid, which regulates expression of a polynucleotide comprising the target gene. A “mature miRNA” refers to the miRNA generated from the processing of a miRNA precursor. A “miRNA template” is an oligonucleotide region, or regions, in a nucleic acid construct which encodes the miRNA. A portion of a polynucleotide construct is substantially complementary to the miRNA template and is predicted to base pair with the miRNA template. The miRNA template and a portion of the construct may form a double-stranded polynucleotide, including a hairpin structure.

[0051] As used herein, “domain” or “functional domain” refer to nucleic acid sequence(s) that are capable of eliciting a biological response in plants. A domain could refer to a portion within either individual miRNA or groups of miRNAs. Also, miRNA sequences associated with their backbone sequences could be considered domains useful for processing the miRNA into its active form. As used herein, “subdomains” or “functional subdomains” refer to subsequences of domains that are capable of eliciting a biological response in plants. A miRNA could be considered a subdomain of a backbone sequence. “Contiguous” sequences or domains refer to sequences that are sequentially linked without added nucleotides intervening between the domains.

[0052] The phrases “target sequence”, “target gene”, “target gene sequence” and “sequence of interest” may be used interchangeably. Target sequence is used to mean the nucleic acid sequence that is selected for alteration (e.g., suppression) of expression, and is not limited to polynucleotides encoding polypeptides. The target sequence comprises a sequence that is substantially or fully complementary to the miRNA. The target sequence includes, but is not limited to, RNA, DNA, or a polynucleotide comprising the target sequence. As discussed in Bartel and Bartel (2003) Plant Phys. 132:709-719, most microRNA sequences are 20-22 nucleotides with anywhere from 0-3 mismatches when compared to their target sequences.

[0053] It is understood that microRNA sequences include for example, 21 nucleotide sequences, or shorter (e.g., 18, 19, 20 mer) or longer (22, 23, 24-mer) sequences. In addition, some nucleotide substitutions, particularly at the last two nucleotides of the 3′ end of the microRNA sequence, may be useful in retaining at least some microRNA function.

[0054] As used herein, “nucleic acid” means a polynucleotide and includes single or double-stranded polymer of deoxyribonucleotide or ribonucleotide bases. Nucleic acids may also include fragments and modified nucleotides. Thus, the terms “polynucleotide”, “nucleic acid sequence”, “nucleotide sequence” or “nucleic acid fragment” are used interchangeably and is a polymer of RNA or DNA that is single- or double-stranded, optionally containing synthetic, non-natural or altered nucleotide bases. Nucleotides (usually found in their 5′-monophosphate form) are referred to by their single letter designation as follows: “A” for adenylate or deoxyadenylate (for RNA or DNA, respectively), “C” for cytidylate or deosycytidylate, “G” for guanylate or deoxyguanylate, “U” for uridlate, “T” for deosythymidylate, “R” for purines (A or G), “Y” for pyrimidiens (Cor T), “K” for G or T, “H” for A or C or T, “I” for inosine, and “N” for any nucleotide.

[0055] By “nucleic acid library” is meant a collection of isolated DNA or RNA molecules which comprise and substantially represent the entire transcribed fraction of a genome of a specified organism or of a tissue from that organism. Construction of exemplary nucleic acid libraries, such as genomic and cDNA libraries, is taught in standard molecular biology references such as Berger and Kimmel, Guide to Molecular Cloning Techniques, Methods in Enzymology, Vol. 152, Academic Press, Inc., San Diego, Calif. (Berger); Sambrook et al., Molecular Cloning—A Laboratory Manual, 2nd ed., Vol. 1-3 (1989); and Current Protocols in Molecular Biology, F. M. Ausubel et al., Eds., Current Protocols, a joint venture between Greene Publishing Associates, Inc. and John Wiley & Sons, Inc. (1994).

[0056] As used herein “operably linked” includes reference to a functional linkage of at least two sequences. Operably linked includes linkage between a promoter and a second sequence, wherein the promoter sequence initiates and mediates transcription of the DNA sequence corresponding to the second sequence.

[0057] As used herein, “plant” includes plants and plant parts including but not limited to plant cells, plant tissue such as leaves, stems, roots, flowers, and seeds.

[0058] As used herein, “polypeptide” means proteins, protein fragments, modified proteins, amino acid sequences and synthetic amino acid sequences. The polypeptide can be glycosylated or not.

[0059] As used herein, “promoter” refers to a nucleic acid fragment, e.g., a region of DNA, that is involved in recognition and binding of an RNA polymerase and other proteins to initiate transcription. In other words, this nucleic acid fragment is capable of controlling transcription of another nucleic acid fragment.

[0060] The term “selectively hybridizes” includes reference to hybridization, under stringent hybridization conditions, of a nucleic acid sequence to a specified nucleic acid target sequence to a detectably greater degree (e.g., at least 2-fold over background) than its hybridization to non-target nucleic acid sequences and to the substantial exclusion of non-target nucleic acids. Selectively hybridizing sequences typically have about at least 80% sequence identity, or 90% sequence identity, up to and including 100% sequence identity (i.e., fully complementary) with each other.

[0061] The term “stringent conditions” or “stringent hybridization conditions” includes reference to conditions under which a probe will selectively hybridize to its target sequence. Stringent conditions are sequence-dependent and will be different in different circumstances. By controlling the stringency of the hybridization and/or washing conditions, target sequences can be identified which are 100% complementary to the probe (homologous probing). Alternatively, stringency conditions can be adjusted to allow some mismatching in sequences so that lower degrees of similarity are detected (heterologous probing). Generally, a probe is less than about 1000 nucleotides in length, optionally less than 500 nucleotides in length.

[0062] Typically, stringent conditions will be those in which the salt concentration is less than about 1.5 M Na ion, typically about 0.01 to 1.0 M Na ion concentration (or other salts) at pH 7.0 to 8.3 and the temperature is at least about 30° C. for short probes (e.g., 10 to 50 nucleotides) and at least about 60° C. for long probes (e.g., greater than 50 nucleotides). Stringent conditions may also be achieved with the addition of destabilizing agents such as formamide. Exemplary low stringency conditions include hybridization with a buffer solution of 30 to 35% formamide, 1 M NaCl, 1% SDS (sodium dodecyl sulphate) at 37° C., and a wash in 1× to 2×SSC (20×SSC=3.0 M NaCl/0.3 M trisodium citrate) at 50 to 55° C. Exemplary moderate stringency conditions include hybridization in 40 to 45% formamide, 1 M NaCl, 1% SDS at 37° C., and a wash in 0.5× to 1×SSC at 55 to 60° C. Exemplary high stringency conditions include hybridization in 50% formamide, 1 M NaCl, 1% SDS at 37° C., and a wash in 0.1×SSC at 60 to 65° C.

[0063] Specificity is typically the function of post-hybridization washes, the relevant factors being the ionic strength and temperature of the final wash solution. For DNA-DNA hybrids, the Tₘ can be approximated from the equation of Meinkoth and Wahl, Anal. Biochem., 138:267-284 (1984): Tₘ=81.5° C.+16.6 (log M)+0.41 (% GC)−0.61 (% form)−500/L; where M is the molarity of monovalent cations, % GC is the percentage of guanosine and cytosine nucleotides in the DNA, % form is the percentage of formamide in the hybridization solution, and L is the length of the hybrid in base pairs. The Tₘ is the temperature (under defined ionic strength and pH) at which 50% of a complementary target sequence hybridizes to a perfectly matched probe. Tₘ is reduced by about 1° C. for each 1% of mismatching; thus, Tₘ, hybridization and/or wash conditions can be adjusted to hybridize to sequences of the desired identity. For example, if sequences with ≧90% identity are sought, the Tₘ can be decreased 10° C. Generally, stringent conditions are selected to be about 5° C. lower than the thermal melting point (Tₘ) for the specific sequence and its complement at a defined ionic strength and pH. However, severely stringent conditions can utilize a hybridization and/or wash at 1, 2, 3, or 4° C. lower than the thermal melting point (Tₘ); moderately stringent conditions can utilize a hybridization and/or wash at 6, 7, 8, 9, or 10° C. lower than the thermal melting point (Tₘ); low stringency conditions can utilize a hybridization and/or wash at 11, 12, 13, 14, 15, or 20° C. lower than the thermal melting point (Tₘ). Using the equation, hybridization and wash compositions, and desired Tₘ, those of ordinary skill will understand that variations in the stringency of hybridization and/or wash solutions are inherently described. If the desired degree of mismatching results in a Tₘ of less than 45° C. (aqueous solution) or 32° C. (formamide solution) it is preferred to increase the SSC concentration so that a higher temperature can be used. An extensive guide to the hybridization of nucleic acids is found in Tijssen, Laboratory Techniques in Biochemistry and Molecular Biology—Hybridization with Nucleic Acid Probes, Part I, Chapter 2 “Overview of principles of hybridization and the strategy of nucleic acid probe assays”, Elsevier, New York (1993); and Current Protocols in Molecular Biology, Chapter 2, Ausubel et al., Eds., Greene Publishing and Wiley-Interscience, New York (1995). Hybridization and/or wash conditions can be applied for at least 10, 30, 60, 90, 120, or 240 minutes.

[0064] The terms “reliable detection” and “reliably detected” are defined herein to mean the reproducible detection of measurable, sequence-specific signal intensity above background noise.

[0065] As used herein, “transgenic” refers to a plant or a cell which comprises within its genome a heterologous polynucleotide. Preferably, the heterologous polynucleotide is stably integrated within the genome such that the polynucleotide is passed on, or heritable, to successive generations. The heterologous polynucleotide may be integrated into the genome alone or as part of an expression construct. Transgenic is used herein to include any cell, cell line, callus, tissue, plant part or plant, the genotype of which has been altered by the presence of heterologous nucleic acid including those transgenics initially so altered as well as those created by sexual crosses or asexual propagation from the initial transgenic. The term “transgenic” as used herein does not encompass the alteration of the genome (chromosomal or extra-chromosomal) by conventional plant breeding methods or by naturally occurring events such as random cross-fertilization, non-recombinant viral infection, non-recombinant bacterial transformation, non-recombinant transposition, or spontaneous mutation.

[0066] As used herein, “vector” refers to a small nucleic acid molecule (plasmid, virus, bacteriophage, artificial or cut DNA molecule) that can be used to deliver a polynucleotide into a host cell. Vectors are capable of being replicated and contain cloning sites for introduction of a foreign polynucleotide. Thus, expression vectors permit transcription of a nucleic acid inserted therein.

[0067] Polynucleotide sequences may have substantial identity, substantial homology, or substantial complementarity to the selected region of the target gene. As used herein “substantial identity” and “substantial homology” indicate sequences that have sequence identity or homology to each other. Generally, sequences that are substantially identical or substantially homologous will have about 75%, 80%, 85%, 90%, 95%, or 100% sequence identity wherein the percent sequence identity is based on the entire sequence and is determined by GAP alignment using default parameters (GCG, GAP version 10, Accelrys, San Diego, Calif.). GAP uses the algorithm of Needleman and Wunsch (J. Mol. Biol. 48:443-453, 1970) to find the alignment of two complete sequences that maximizes the number of matches and minimizes the number of sequence gaps. Sequences which have 100% identity are identical. “Substantial complementarity” refers to sequences that are complementary to each other, and are able to base pair with each other. In describing complementary sequences, if all the nucleotides in the first sequence will base pair to the second sequence, these sequences are fully or completely complementary.

[0068] Computational identification of miRNAs was accomplished from size selected small RNA libraries from leaf, drought-stressed leaf, seed, and various other tissues.

[0069] In some embodiments, the miRNA template, (i.e. the polynucleotide encoding the miRNA), and thereby the miRNA, may comprise some mismatches relative to the target sequence. In some embodiments the miRNA template has ≧1 nucleotide mismatch as compared to the target sequence, for example, the miRNA template can have 1, 2, 3, 4, 5, or more mismatches as compared to the target sequence. This degree of mismatch may also be described by determining the percent identity of the miRNA template to the complement of the target sequence. For example, the miRNA template may have a percent identity including about at least 70%, 75%, 77%, 78%, 79%, 80%, 81%, 82%, 83%, 84%, 85%, 86%, 87%, 88%, 89%, 90%, 91%, 92%, 93%, 94%, 95%, 96%, 97%, 98%, 99%, or 100% as compared to the complement of the target sequence.

[0070] In some embodiments, the miRNA template, (i.e. the polynucleotide encoding the miRNA) and thereby the miRNA, may comprise some mismatches relative to the miRNA containing construct. In some embodiments the miRNA template has ≧1 nucleotide mismatch as compared to the miRNA construct, for example, the miRNA template can have 1, 2, 3, 4, 5, or more mismatches as compared to the miRNA construct. This degree of mismatch may also be described by determining the percent identity of the miRNA template to the complement of the miRNA construct. For example, the miRNA template may have a percent identity including about at least 70%, 75%, 77%, 78%, 79%, 80%, 81%, 82%, 83%, 84%, 85%, 86%, 87%, 88%, 89%, 90%, 91%, 92%, 93%, 94%, 95%, 96%, 97%, 98%, 99%, or 100% as compared to the complement of the miRNA construct.

[0071] In some embodiments, the target sequence is selected from a plant pathogen. Plants or cells comprising a miRNA directed to the target sequence of the pathogen are expected to have decreased sensitivity and/or increased resistance to the pathogen. In some embodiments, the miRNA is encoded by a nucleic acid construct further comprising an operably linked promoter. In some embodiments, the promoter is a pathogen-inducible promoter.

[0072] In another embodiment, there is provided a nucleic acid construct for suppressing a target sequence. The nucleic acid construct encodes a miRNA substantially complementary to the target. In some embodiments, the nucleic acid construct further comprises a promoter operably linked to the polynucleotide encoding the miRNA. In some embodiments, the nucleic acid construct lacking a promoter is designed and introduced in such a way that it becomes operably linked to a promoter upon integration in the host genome. In some embodiments, the nucleic acid construct is integrated using recombination, including site-specific recombination. See, for example, WO 99/25821, herein incorporated by reference. In some embodiments, the nucleic acid construct is an RNA. In some embodiments, the nucleic acid construct comprises at least one recombination site, including site-specific recombination sites. In some embodiments the nucleic acid construct comprises at least one recombination site in order to facilitate integration, modification, or cloning of the construct. In some embodiments the nucleic acid construct comprises two site-specific recombination sites flanking the miRNA precursor. In some embodiments the site-specific recombination sites include FRT sites, lox sites, or att sites, including attB, attL, attP or attR sites. See, for example, WO 99/25821, and U.S. Pat. Nos. 5,888,732, 6,143,557, 6,171,861, 6,270,969, and 6,277,608, herein incorporated by reference.

[0073] In an embodiment, a DNA expression construct includes any of the isolated polynucleotides discussed herein operably linked to at least one regulatory sequence.

[0074] In an embodiment, the a plant includes in its genome the DNA expression constructs discussed herein. Such plants can be selected from the group consisting of corn, rice, sorghum, sunflower, millet, soybean, canola, wheat, barley, oat, beans, and nuts.

[0075] In an embodiment, transgenic seeds obtained from a plant includes in its genome the DNA expression constructs discussed herein. Also within the scope are transformed plant tissue or a plant cell comprising in its genome the DNA expression constructs discussed herein. In an embodiment, by-products and progeny plants obtained from such transgenic seeds.

[0076] In an embodiment, the nucleic acid construct comprises an isolated polynucleotide comprising a polynucleotide which encodes a modified plant miRNA precursor, the modified precursor comprising a first and a second oligonucleotide, wherein at least one of the first or the second oligonucleotides is heterologous to the precursor, wherein the first oligonucleotide is substantially complementary to the second oligonucleotide, and the second oligonucleotide comprises a miRNA substantially complementary to the target sequence, wherein the precursor is capable of forming a hairpin.

[0077] In some embodiments there are provided cells, plants, and seeds comprising the introduced polynucleotides, and/or produced by the methods disclosed herein. The cells include prokaryotic and eukaryotic cells, including but not limited to bacteria, yeast, fungi, viral, invertebrate, vertebrate, and plant cells. Plants, plant cells, and seeds include gynosperms, monocots and dicots, including but not limited to, for example, rice, wheat, oats, barley, millet, sorghum, soy, sunflower, safflower, canola, alfalfa, cotton, Arabidopsis, and tobacco.

[0078] As used herein, “by-products” refer to any product, fraction, or material produced from the processing of the seed. Corn kernels (seeds) are subjected to both wet and dry milling. The goal of both processes is to separate the germ, the endosperm, and the pericarp (hull). Wet milling separates the chemical constituents of corn into starch, protein, oil, and fiber fractions.

[0079] Methods and compositions useful in suppression of a target sequence and/or validation of function are disclosed. The disclosure also relates to a method for using microRNA (miRNA) mediated RNA interference (RNAi) to silence or suppress a target sequence to evaluate function, or to validate a target sequence for phenotypic effect and/or trait development. Constructs comprising small nucleic acid molecules, miRNAs, capable of inducing silencing, and methods of using these miRNAs to selectively silence target sequences are disclosed.

[0080] RNA interference refers to the process of sequence-specific post-transcriptional gene silencing in animals mediated by short interfering RNAs (siRNAs) (Fire et al., Nature 391:806 1998). The corresponding process in plants is commonly referred to as post-transcriptional gene silencing (PTGS) or RNA silencing and is also referred to as quelling in fungi. The process of post-transcriptional gene silencing is thought to be an evolutionarily-conserved cellular defense mechanism used to prevent the expression of foreign genes and is commonly shared by diverse flora and phyla (Fire et al., Trends Genet. 15:358 1999). Such protection from foreign gene expression may have evolved in response to the production of double-stranded RNAs (dsRNAs) derived from viral infection or from the random integration of transposon elements into a host genome via a cellular response that specifically destroys homologous single-stranded RNA of viral genomic RNA. The presence of dsRNA in cells triggers the RNAi response through a mechanism that has yet to be fully characterized.

[0081] The presence of long dsRNAs in cells stimulates the activity of a ribonuclease III enzyme referred to as “dicer”. Dicer is involved in the processing of the dsRNA into short pieces of dsRNA known as short interfering RNAs (siRNAs) (Berstein et al., Nature 409:363 2001) and/or pre miRNAs into miRNAs. Short interfering RNAs derived from dicer activity are typically about 21 to about 23 nucleotides in length and comprise about 19 base pair duplexes (Elbashir et al., Genes Dev. 15:188 2001). Dicer has also been implicated in the excision of 21- and 22-nucleotide small temporal RNAs (stRNAs) from precursor RNA of conserved structure that are implicated in translational control (Hutvagner et al., 2001, Science 293:834). The RNAi response also features an endonuclease complex, commonly referred to as an RNA-induced silencing complex (RISC), which mediates cleavage of single-stranded RNA having sequence complementarity to the antisense strand of the siRNA duplex. Cleavage of the target RNA takes place in the middle of the region complementary to the antisense strand of the siRNA duplex (Elbashir et al., Genes Dev. 15:188 2001). In addition, RNA interference can also involve small RNA (e.g., microRNA, or miRNA) mediated gene silencing, presumably through cellular mechanisms that regulate chromatin structure and thereby prevent transcription of target gene sequences (see, e.g., Allshire, Science 297:1818-1819 2002; Volpe et al., Science 297:1833-1837 2002; Jenuwein, Science 297:2215-2218 2002; and Hall et al., Science 297:2232-2237 2002). As such, miRNA molecules are used to mediate gene silencing via interaction with RNA transcripts or alternately by interaction with particular gene sequences, wherein such interaction results in gene silencing either at the transcriptional or post-transcriptional level.

[0082] RNAi has been studied in a variety of systems. Fire et al. (Nature 391:806 1998) were the first to observe RNAi in C. elegans. Wianny and Goetz (Nature Cell Biol. 2:70 1999) describe RNAi mediated by dsRNA in mouse embryos. Hammond et al. (Nature 404:293 2000) describe RNAi in Drosophila cells transfected with dsRNA. Elbashir et al., (Nature 411:494 2001) describe RNAi induced by introduction of duplexes of synthetic 21-nucleotide RNAs in cultured mammalian cells including human embryonic kidney and HeLa cells.

[0083] Small RNAs play an important role in controlling gene expression. Regulation of many developmental processes, including flowering, is controlled by small RNAs. It is now possible to engineer changes in gene expression of plant genes by using transgenic constructs which produce small RNAs in the plant.

[0084] Small RNAs appear to function by base-pairing to complementary RNA or DNA target sequences. When bound to RNA, small RNAs trigger either RNA cleavage or translational inhibition of the target sequence. When bound to DNA target sequences, it is thought that small RNAs can mediate DNA methylation of the target sequence. The consequence of these events, regardless of the specific mechanism, is that gene expression is inhibited.

[0085] MicroRNAs (miRNAs) are noncoding RNAs of about 18 to about 24 nucleotides (nt) in length that have been identified in both animals and plants (Lagos-Quintana et al., Science 294:853-858 2001, Lagos-Quintana et al., Curr. Biol. 12:735-739 2002; Lau et al., Science 294:858-862 2001; Lee and Ambros, Science 294:862-864 2001; Llave et al., Plant Cell 14:1605-1619 2002; Mourelatos et al., Genes. Dev. 16:720-728 2002; Park et al., Curr. Biol. 12:1484-1495 2002; Reinhart et al., Genes. Dev. 16:1616-1626 2002). They are processed from longer precursor transcripts that range in size from approximately 70 to 200 nt, and these precursor transcripts have the ability to form stable hairpin structures.

[0086] The methods provided can be practiced in any organism in which a method of transformation is available, and for which there is at least some sequence information for the target sequence, or for a region flanking the target sequence of interest. It is also understood that two or more sequences could be targeted by sequential transformation, co-transformation with more than one targeting vector, or the construction of a DNA construct comprising more than one miRNA sequence. The methods are also implemented by a combinatorial nucleic acid library construction in order to generate a library of miRNAs directed to random target sequences. The library of miRNAs could be used for high-throughput screening for gene function validation.

[0087] General categories of sequences of interest include, for example, those genes involved in regulation or information, such as zinc fingers, transcription factors, homeotic genes, or cell cycle and cell death modulators, those involved in communication, such as kinases, and those involved in housekeeping, such as heat shock proteins.

[0088] Target sequences further include coding regions and non-coding regions such as promoters, enhancers, terminators, introns and the like, which may be modified in order to alter the expression of a gene of interest. For example, an intron sequence can be added to the 5′ region to increase the amount of mature message that accumulates (see for example Buchman and Berg, Mol. Cell Biol. 8:4395-4405 (1988); and Callis et al., Genes Dev. 1:1183-1200 (1987)).

[0089] The target sequence may be an endogenous sequence, or may be an introduced heterologous sequence, or transgene. For example, the methods may be used to alter the regulation or expression of a transgene, or to remove a transgene or other introduced sequence such as an introduced site-specific recombination site. The target sequence may also be a sequence from a pathogen, for example, the target sequence may be from a plant pathogen such as a virus, a mold or fungus, an insect, or a nematode. A miRNA could be expressed in a plant which, upon infection or infestation, would target the pathogen and confer some degree of resistance to the plant.

[0090] In plants, other categories of target sequences include genes affecting agronomic traits, insect resistance, disease resistance, herbicide resistance, sterility, grain characteristics, and commercial products. Genes of interest also included those involved in oil, starch, carbohydrate, or nutrient metabolism as well as those affecting, for example, kernel size, sucrose loading, and the like. The quality of grain is reflected in traits such as levels and types of oils, saturated and unsaturated, quality and quantity of essential amino acids, and levels of cellulose. Any target sequence could be suppressed in order to evaluate or confirm its role in a particular trait or phenotype, or to dissect a molecular, regulatory, biochemical, or proteomic pathway or network.

[0091] A number of promoters can be used, these promoters can be selected based on the desired outcome. It is recognized that different applications will be enhanced by the use of different promoters in plant expression cassettes to modulate the timing, location and/or level of expression of the miRNA. Such plant expression cassettes may also contain, if desired, a promoter regulatory region (e.g., one conferring inducible, constitutive, environmentally- or developmentally-regulated, or cell- or tissue-specific/selective expression), a transcription initiation start site, a ribosome binding site, an RNA processing signal, a transcription termination site, and/or a polyadenylation signal.

[0092] Constitutive, tissue-preferred or inducible promoters can be employed. Examples of constitutive promoters include the cauliflower mosaic virus (CaMV) 35S transcription initiation region, the 1′- or 2′-promoter derived from T-DNA of Agrobacterium tumefaciens, the ubiquitin 1 promoter, the Smas promoter, the cinnamyl alcohol dehydrogenase promoter (U.S. Pat. No. 5,683,439), the Nos promoter, the pEmu promoter, the rubisco promoter, the GRP1-8 promoter and other transcription initiation regions from various plant genes known to those of skill. If low level expression is desired, weak promoter(s) may be used. Weak constitutive promoters include, for example, the core promoter of the Rsyn7 promoter (WO 99/43838 and U.S. Pat. No. 6,072,050), the core 35S CaMV promoter, and the like. Other constitutive promoters include, for example, U.S. Pat. Nos. 5,608,149; 5,608,144; 5,604,121; 5,569,597; 5,466,785; 5,399,680; 5,268,463; and 5,608,142. See also, U.S. Pat. No. 6,177,611, herein incorporated by reference.

[0093] Examples of inducible promoters are the Adh1 promoter which is inducible by hypoxia or cold stress, the Hsp70 promoter which is inducible by heat stress, the PPDK promoter and the pepcarboxylase promoter which are both inducible by light. Also useful are promoters which are chemically inducible, such as the In2-2 promoter which is safener induced (U.S. Pat. No. 5,364,780), the ERE promoter which is estrogen induced, and the Axig1 promoter which is auxin induced and tapetum specific but also active in callus (PCT US01/22169).

[0094] Examples of promoters under developmental control include promoters that initiate transcription preferentially in certain tissues, such as leaves, roots, fruit, seeds, or flowers. An exemplary promoter is the anther specific promoter 5126 (U.S. Pat. Nos. 5,689,049 and 5,689,051). Examples of seed-preferred promoters include, but are not limited to, 27 kD gamma zein promoter and waxy promoter, Boronat, A. et al. (1986) Plant Sci. 47:95-102; Reina, M. et al. Nucl. Acids Res. 18(21):6426; and Kloesgen, R. B. et al. (1986) Mol. Gen. Genet. 203:237-244. Promoters that express in the embryo, pericarp, and endosperm are disclosed in U.S. Pat. No. 6,225,529 and PCT publication WO 00/12733. The disclosures each of these are incorporated herein by reference in their entirety.

[0095] In some embodiments it will be beneficial to express the gene from an inducible promoter, particularly from a pathogen-inducible promoter. Such promoters include those from pathogenesis-related proteins (PR proteins), which are induced following infection by a pathogen; e.g., PR proteins, SAR proteins, beta-1,3-glucanase, chitinase, etc. See, for example, Redolfi et al. (1983) Neth. J. Plant Pathol. 89:245-254; Uknes et al. (1992) Plant Cell 4:645-656; and Van Loon (1985) Plant Mol. Virol. 4:111-116. See also WO 99/43819, herein incorporated by reference.

[0096] Of interest are promoters that are expressed locally at or near the site of pathogen infection. See, for example, Marineau et al. (1987) Plant Mol. Biol. 9:335-342; Matton et al. (1989) Molecular Plant-Microbe Interactions 2:325-331; Somsisch et al. (1986) Proc. Natl. Acad. Sci. USA 83:2427-2430; Somsisch et al. (1988) Mol. Gen. Genet. 2:93-98; and Yang (1996) Proc. Natl. Acad. Sci. USA 93:14972-14977. See also, Chen et al. (1996) Plant J. 10:955-966; Zhang et al. (1994) Proc. Natl. Acad. Sci. USA 91:2507-2511; Warner et al. (1993) Plant J. 3:191-201; Siebertz et al. (1989) Plant Cell 1:961-968; U.S. Pat. No. 5,750,386 (nematode-inducible); and the references cited therein. Of particular interest is the inducible promoter for the maize PRms gene, whose expression is induced by the pathogen Fusarium moniliforme (see, for example, Cordero et al. (1992) Physiol. Mol. Plant Path. 41:189-200).

[0097] Additionally, as pathogens find entry into plants through wounds or insect damage, a wound-inducible promoter may be used in the constructions of the polynucleotides. Such wound-inducible promoters include potato proteinase inhibitor (pin II) gene (Ryan (1990) Ann. Rev. Phytopath. 28:425-449; Duan et al. (1996) Nature Biotech. 14:494-498); wun1 and wun2, U.S. Pat. No. 5,428,148; win1 and win2 (Stanford et al. (1989) Mol. Gen. Genet. 215:200-208); systemin (McGurl et al. (1992) Science 225:1570-1573); WIP1 (Rohmeier et al. (1993) Plant Mol. Biol. 22:783-792; Eckelkamp et al. (1993) FEBS Lett. 323:73-76); MPI gene (Corderok et al. (1994) Plant J. 6(2):141-150); and the like, herein incorporated by reference.

[0098] Chemical-regulated promoters can be used to modulate the expression of a gene in a plant through the application of an exogenous chemical regulator. Depending upon the objective, the promoter may be a chemical-inducible promoter, where application of the chemical induces gene expression, or a chemical-repressible promoter, where application of the chemical represses gene expression. Chemical-inducible promoters are known in the art and include, but are not limited to, the maize In2-2 promoter, which is activated by benzenesulfonamide herbicide safeners, the maize GST promoter, which is activated by hydrophobic electrophilic compounds that are used as pre-emergent herbicides, and the tobacco PR-1a promoter, which is activated by salicylic acid. Other chemical-regulated promoters of interest include steroid-responsive promoters (see, for example, the glucocorticoid-inducible promoter in Schena et al. (1991) Proc. Natl. Acad. Sci. USA 88:10421-10425 and McNellis et al. (1998) Plant J. 14(2):247-257) and tetracycline-inducible and tetracycline-repressible promoters (see, for example, Gatz et al. (1991) Mol. Gen. Genet. 227:229-237, and U.S. Pat. Nos. 5,814,618 and 5,789,156), herein incorporated by reference.

[0099] Tissue-preferred promoters can be utilized to target enhanced expression of a sequence of interest within a particular plant tissue. Tissue-preferred promoters include Yamamoto et al. (1997) Plant J. 12(2):255-265; Kawamata et al. (1997) Plant Cell Physiol. 38(7):792-803; Hansen et al. (1997) Mol. Gen Genet. 254(3):337-343; Russell et al. (1997) Transgenic Res. 6(2):157-168; Rinehart et al. (1996) Plant Physiol. 112(3):1331-1341; Van Camp et al. (1996) Plant Physiol. 112(2):525-535; Canevascini et al. (1996) Plant Physiol. 112(2):513-524; Yamamoto et al. (1994) Plant Cell Physiol. 35(5):773-778; Lam (1994) Results Probl. Cell Differ. 20:181-196; Orozco et al. (1993) Plant Mol Biol. 23(6):1129-1138; Matsuoka et al. (1993) Proc Natl. Acad. Sci. USA 90(20):9586-9590; and Guevara-Garcia et al. (1993) Plant J. 4(3):495-505. Such promoters can be modified, if necessary, for weak expression.

[0100] Leaf-preferred promoters are known in the art. See, for example, Yamamoto et al. (1997) Plant J. 12(2):255-265; Kwon et al. (1994) Plant Physiol. 105:357-67; Yamamoto et al. (1994) Plant Cell Physiol. 35(5):773-778; Gotor et al. (1993) Plant J. 3:509-18; Orozco et al. (1993) Plant Mol. Biol. 23(6):1129-1138; and Matsuoka et al. (1993) Proc. Natl. Acad. Sci. USA 90(20):9586-9590. In addition, the promoters of cab and rubisco can also be used. See, for example, Simpson et al. (1958) EMBO J 4:2723-2729 and Timko et al. (1988) Nature 318:57-58.

[0101] Root-preferred promoters are known and can be selected from the many available from the literature or isolated de novo from various compatible species. See, for example, Hire et al. (1992) Plant Mol. Biol. 20(2):207-218 (soybean root-specific glutamine synthetase gene); Keller and Baumgartner (1991) Plant Cell 3(10):1051-1061 (root-specific control element in the GRP 1.8 gene of French bean); Sanger et al. (1990) Plant Mol. Biol. 14(3):433-443 (root-specific promoter of the mannopine synthase (MAS) gene of Agrobacterium tumefaciens); and Miao et al. (1991) Plant Cell 3(1):11-22 (full-length cDNA clone encoding cytosolic glutamine synthetase (GS), which is expressed in roots and root nodules of soybean). See also Bogusz et al. (1990) Plant Cell 2(7):633-641, where two root-specific promoters isolated from hemoglobin genes from the nitrogen-fixing nonlegume Parasponia andersonii and the related non-nitrogen-fixing nonlegume Trema tomentosa are described. The promoters of these genes were linked to a β-glucuronidase reporter gene and introduced into both the nonlegume Nicotiana tabacum and the legume Lotus comiculatus, and in both instances root-specific promoter activity was preserved. Leach and Aoyagi (1991) describe their analysis of the promoters of the highly expressed rolC and rolD root-inducing genes of Agrobacterium rhizogenes (see Plant Science (Limerick) 79(1):69-76). They concluded that enhancer and tissue-preferred DNA determinants are dissociated in those promoters. Teeri et al. (1989) used gene fusion to lacZ to show that the Agrobacterium T-DNA gene encoding octopine synthase is especially active in the epidermis of the root tip and that the TR2′ gene is root specific in the intact plant and stimulated by wounding in leaf tissue, an especially desirable combination of characteristics for use with an insecticidal or larvicidal gene (see EMBO J. 8(2):343-350). The TR1′ gene, fused to nptII (neomycin phosphotransferase II) showed similar characteristics. Additional root-preferred promoters include the VfENOD-GRP3 gene promoter (Kuster et al. (1995) Plant Mol. Biol. 29(4):759-772); and rolB promoter (Capana et al. (1994) Plant Mol. Biol. 25(4):681-691. See also U.S. Pat. Nos. 5,837,876; 5,750,386; 5,633,363; 5,459,252; 5,401,836; 5,110,732; and 5,023,179. The phaseolin gene (Murai et al. (1983) Science 23:476-482 and Sengopta-Gopalen et al. (1988) PNAS 82:3320-3324.

[0102] Transformation protocols as well as protocols for introducing nucleotide sequences into plants may vary depending on the type of plant or plant cell, i.e., monocot or dicot, targeted for transformation. Suitable methods of introducing the DNA construct include microinjection (Crossway et al. (1986) Biotechniques 4:320-334; and U.S. Pat. No. 6,300,543), sexual crossing, electroporation (Riggs et al. (1986) Proc. Natl. Acad. Sci. USA 83:5602-5606), Agrobacterium-mediated transformation (Townsend et al., U.S. Pat. No. 5,563,055; and U.S. Pat. No. 5,981,840), direct gene transfer (Paszkowski et al. (1984) EMBO J. 3:2717-2722), and ballistic particle acceleration (see, for example, Sanford et al., U.S. Pat. No. 4,945,050; Tomes et al., U.S. Pat. No. 5,879,918; Tomes et al., U.S. Pat. No. 5,886,244; Bidney et al., U.S. Pat. No. 5,932,782; Tomes et al. (1995) “Direct DNA Transfer into Intact Plant Cells via Microprojectile Bombardment,” in Plant Cell, Tissue, and Organ Culture: Fundamental Methods, ed. Gamborg and Phillips (Springer-Verlag, Berlin); and McCabe et al. (1988) Biotechnology 6:923-926). Also see Weissinger et al. (1988) Ann. Rev. Genet. 22:421-477; Sanford et al. (1987) Particulate Science and Technology 5:27-37 (onion); Christou et al. (1988) Plant Physiol. 87:671-674 (soybean); Finer and McMullen (1991) In Vitro Cell Dev. Biol. 27P:175-182 (soybean); Singh et al. (1998) Theor. Appl. Genet. 96:319-324 (soybean); Datta et al. (1990) Biotechnology 8:736-740 (rice); Klein et al. (1988) Proc. Natl. Acad. Sci. USA 85:4305-4309 (maize); Klein et al. (1988) Biotechnology 6:559-563 (maize); Tomes, U.S. Pat. No. 5,240,855; Buising et al., U.S. Pat. Nos. 5,322,783 and 5,324,646; Klein et al. (1988) Plant Physiol. 91:440-444 (maize); Fromm et al. (1990) Biotechnology 8:833-839 (maize); Hooykaas-Van Slogteren et al. (1984) Nature (London) 311:763-764; Bowen et al., U.S. Pat. No. 5,736,369 (cereals); Bytebier et al. (1987) Proc. Natl. Acad. Sci. USA 84:5345-5349 (Liliaceae); De Wet et al. (1985) in The Experimental Manipulation of Ovule Tissues, ed. Chapman et al. (Longman, New York), pp. 197-209 (pollen); Kaeppler et al. (1990) Plant Cell Reports 9:415-418 and Kaeppler et al. (1992) Theor. Appl. Genet. 84:560-566 (whisker-mediated transformation); D'Halluin et al. (1992) Plant Cell 4:1495-1505 (electroporation); Li et al. (1993) Plant Cell Reports 12:250-255 and Christou and Ford (1995) Annals of Botany 75:407-413 (rice); Osjoda et al. (1996) Nature Biotechnology 14:745-750 (maize via Agrobacterium tumefaciens); and U.S. Pat. No. 5,736,369 (meristem transformation), all of which are herein incorporated by reference.

[0103] The nucleotide constructs may be introduced into plants by contacting plants with a virus or viral nucleic acids. Generally, such methods involve incorporating a nucleotide construct within a viral DNA or RNA molecule. Further, it is recognized that useful promoters encompass promoters utilized for transcription by viral RNA polymerases. Methods for introducing nucleotide constructs into plants and expressing a protein encoded therein, involving viral DNA or RNA molecules, are known in the art. See, for example, U.S. Pat. Nos. 5,889,191, 5,889,190, 5,866,785, 5,589,367 and 5,316,931; herein incorporated by reference.

[0104] In some embodiments, transient expression may be desired. In those cases, standard transient transformation techniques may be used. Such methods include, but are not limited to viral transformation methods, and microinjection of DNA or RNA, as well other methods well known in the art.

[0105] The cells from the plants that have stably incorporated the nucleotide sequence may be grown into plants in accordance with conventional ways. See, for example, McCormick et al. (1986) Plant Cell Reports 5:81-84. These plants may then be grown, and either pollinated with the same transformed strain or different strains, and the resulting hybrid having constitutive expression of the desired phenotypic characteristic imparted by the nucleotide sequence of interest and/or the genetic markers contained within the target site or transfer cassette. Two or more generations may be grown to ensure that expression of the desired phenotypic characteristic is stably maintained and inherited and then seeds harvested to ensure expression of the desired phenotypic characteristic has been achieved.

[0106] In an embodiment, a method for altering expression of a stably introduced nucleotide sequence in a plant includes:
[0107] a) making a DNA expression construct comprising a stably introduced nucleotide sequence and at least one sequence capable of hybridizing to the isolated polynucleotide;
[0108] b) transforming a plant with the DNA expression construct of part (a); and
[0109] c) selecting a transformed plant which comprises the DNA expression construct of part (a) in its genome and which has altered expression of the stably introduced nucleotide sequence when compared to a plant transformed with a modified version of the DNA expression construct of part (a) wherein the modified construct lacks the sequence capable of hybridizing to the isolated polynucleotide disclosed herein.

TABLE 1
MicroRNA sequences and targets thereof

| Micro | | |
|---|---|---|
| RNA | | |
| Core | | |
| Seq. | | |
| (SEQ | | |
| ID | MicroRNA Precursor Genes (SEQ ID | MicroRNA Target Genes SEQ ID NOs (Transcript, |
| NO) | NOs) | Peptide; Transcript, Peptide) |
| 1 | 298, 659, 660 | 1379, 2742; 2368, 3693; |
| 2 | 917 | |
| 3 | 414 | |
| 4 | 537 | |
| 5 | 735 | 2001, 3287; |
| 6 | 198, 199, 200, 201, 202, 203, 273, 274, 275, 276, | 1248, 2617; 1835, 3183; |
| | 277, 278, 279, 280, 281, 282, 283, 284, 285, | |
| | 286, 287, 288, 289, 423, 426, 427, 428, 429, | |
| | 430, 431, 432, 433, 434, 435, 436, 437, 438, | |
| | 439, 440, 441, 442, 443, 444, 445, 446, 447, 448, | |
| | 449, 450, 451, 453, 454, 455, 456, 457, 547, | |
| | 548, 549, 550, 551, 552, 553, 554, 555, 556, | |
| | 557, 558, 559, 560, 561, 562, 563, 564, 565, | |
| | 566, 567, 638, 639, 640, 641, 642, 643, 644, 645, | |
| | 646, 647, 648, 649, 650, 651, 652, 653, 654, | |
| | 655, 656, 739, 740, 741, 742, 743, 744, 745, | |
| | 746, 747, 748, 749, 750, 751, 752, 753, 754, | |
| | 756, 757, 840, 841, 842, 843, 844, 845, 846, 847, | |
| | 848, 849, 850, 851, 890, 891, 892, 893, 894, | |
| | 895, 896, 897, 898, 899, 900, 901, 902, 903, | |
| | 904, 905, 906, 907, 908, 977, 978, 979, 980, | |
| | 981, 982, 983, 984, 985, 988, 1009, 1010, 1011, | |
| | 1012, 1013, 1014, 1015, 1072, 1073, 1074, | |
| | 1075, 1076, 1077, 1078, 1079, 1080 | |
| 7 | 420, 635 | 1942, 3287; 2026, 3364; 2484, 3796; |
| 8 | 5, 201, 092 | 1366, 2730; 1635, 2989; 1769, 3119; 1862, 3210; 2470, 3782; |
| 9 | 3, 554, 716, 991, 037 | 1366, 2730; 1635, 2989; 1769, 3119; 1862, 3210; 2319, 3645; 2470, |
| | | 3782; |
| 10 | 589 | 1366, 2730; 1635, 2989; 1769, 3119; 1862, 3210; 2470, 3782; |
| 11 | 208, 209, 223, 224, 225, 226, 227, 228, 229, 230, | 1366, 2730; 1635, 2989; 1769, 3119; 1862, 3210; 2470, 3782; |
| | 231, 232, 233, 234, 235, 237, 238, 239, 240, | |
| | 241, 242, 243, 244, 245, 246, 247, 248, 249, | |
| | 250, 251, 252, 253, 255, 256, 257, 258, 259, | |
| | 260, 261, 262, 263, 310, 311, 312, 313, 314, 315, | |
| | 316, 318, 319, 320, 321, 322, 323, 324, 325, | |
| | 326, 327, 328, 329, 330, 331, 332, 333, 334, | |
| | 335, 336, 337, 338, 339, 340, 341, 342, 343, | |
| | 344, 345, 346, 347, 348, 349, 350, 351, 352, 353, | |
| | 354, 356, 358, 359, 360, 361, 362, 363, 364, | |
| | 365, 366, 367, 368, 369, 370, 371, 372, 373, | |
| | 374, 375, 376, 377, 378, 379, 380, 381, 382, | |
| | 383, 384, 385, 386, 387, 389, 390, 391, 392, 393, | |
| | 394, 395, 396, 397, 398, 399, 400, 401, 402, | |
| | 403, 404, 406, 472, 473, 474, 475, 476, 477, | |
| | 478, 479, 480, 481, 482, 483, 484, 485, 486, | |
| | 487, 488, 489, 490, 491, 492, 493, 494, 495, 496, | |
| | 497, 498, 499, 500, 501, 502, 503, 504, 505, | |
| | 506, 507, 508, 509, 510, 511, 512, 513, 514, | |
| | 515, 516, 517, 518, 519, 521, 577, 578, 580, | |
| | 581, 582, 583, 584, 585, 586, 587, 588, 590, 591, | |
| | 592, 593, 594, 595, 596, 597, 598, 599, 600, | |
| | 601, 602, 603, 604, 605, 606, 607, 608, 609, | |
| | 610, 611, 612, 613, 614, 615, 616, 617, 669, | |
| | 670, 671, 672, 673, 674, 675, 676, 677, 678, 679, | |
| | 680, 681, 682, 683, 684, 685, 686, 687, 688, | |
| | 689, 690, 691, 692, 693, 694, 695, 696, 697, | |
| | 698, 700, 701, 702, 703, 704, 705, 706, 707, | |
| | 708, 709, 710, 711, 712, 713, 714, 715, 716, 717, | |
| | 772, 773, 774, 775, 776, 777, 778, 779, 780, | |
| | 781, 782, 783, 784, 785, 786, 787, 788, 789, | |
| | 790, 791, 792, 793, 794, 795, 796, 797, 798, | |
| | 799, 800, 801, 802, 803, 804, 805, 806, 807, 808, | |
| | 809, 810, 811, 812, 813, 814, 859, 860, 861, | |
| | 862, 863, 864, 865, 866, 867, 868, 869, 870, | |
| | 871, 872, 873, 874, 875, 876, 877, 878, 879, | |
| | 880, 923, 924, 925, 926, 927, 928, 929, 930, 931, | |
| | 932, 933, 934, 935, 936, 937, 938, 939, 940, | |
| | 941, 942, 943, 944, 945, 946, 947, 948, 949, | |
| | 950, 951, 952, 953, 954, 955, 956, 957, 958, | |
| | 959, 960, 1017, 1019, 1020, 1021, 1022, 1023, | |
| | 1024, 1025, 1026, 1027, 1028, 1029, 1030, | |
| | 1031, 1032, 1033, 1034, 1035, 1036, 1038, | |
| | 1039, 1040, 1041, 1042, 1043, 1044, 1045, 1046, | |
| | 1047, 1048, 1049, 1050, 1051, 1081, 1082, | |
| | 1083, 1084, 1085, 1086, 1087, 1088, 1089, | |
| | 1090, 1091, 1093, 1094, 1095, 1096, 1097, | |
| | 1098, 1099, 1100, 1101, 1102, 1103 | |
| 12 | 405 | 1366, 2730; 1635, 2989; 1769, 3119; 1862, 3210; 2470, 3782; |
| 13 | 835 | 1211, 2580; 1288, 2656; 1323, 2689; 1324, 2690; 1356, 2720; 1380, |
| | | 2743; 1391, 2754; 1447, 2808; 1853, 3201; 1879, 3227; 1910, 3255; |
| | | 1987, 3326; 2236, 3564; 1401, No_Pept; |
| 14 | 264, 357 | 1273, 2642; 1281, 2649; 1340, 2706; 1635, 2989; 1907, 3252; 2074, |
| | | 3409; 2275, 3603; 2372, 3697; 2470, 3782; |
| 15 | 308 | |
| 16 | 888 | 1205, 2574; 1221, 2590; 1628, 2982; 1661, 3014; |
| 17 | 626 | |
| 18 | 538 | 2423, No_Pept; |
| 19 | 569, 997 | 1395, 2758; 1489, 2845; 1657, 3010; 2299, 3625; 2427, 3741; |
| 20 | 665 | |
| 21 | 425 | 1660, 3013; 1676, 3028; |
| 22 | 6, 571, 016 | 1662, 3015; 1940, 3285; 2132, 3463; 2397, 3719; 2481, 3793; |
| 23 | 852 | 1662, 3015; 1690, 3042; 1940, 3285; 2132, 3463; 2397, 3719; 2481, |
| | | 3793; |
| 24 | 733 | |
| 25 | 732 | 1924, 3269; |
| 26 | 909 | 1260, 2629; 1934, 3279; |
| 27 | 291 | |
| 28 | 910 | 1212, 2581; 1344, 2708; 2105, 3438; 2253, 3581; 2269, 3597; 2464, |
| | | 3776; |
| 29 | 540 | 1662, 3015; 2132, 3463; 2249, 3577; |
| 30 | 317, 579 | 1635, 2989; 1716, 3067; 2265, 3593; 2275, 3603; 2470, 3782; |
| 31 | 73, 111, 051, 106, 110, 700, 000, 000 | 1680, 3032; 1928, 3273; |
| 32 | 542 | 1213, 2582; 2100, 3433; 2493, 3803; 2494, No_Pept; |
| 33 | 410 | |
| 34 | 218, 219, 221, 407, 408, 409, 523, 524, 526, 527, | |
| | 528, 620, 621, 622, 623, 624, 625, 723, 724, | |
| | 725, 727, 820, 821, 822, 823, 824, 855, 918, | |
| | 919, 920, 1000, 1001, 1002, 1057, 1058, 1060, | |
| | 1061, 1062 | |
| 35 | 856 | 2240, 3568; |
| 36 | 729, 966 | |
| 37 | 267 | |
| 38 | 881 | |
| 39 | 719 | 1150, 2519; 1151, 2520; 1179, 2548; 1183, 2552; 1277, 2645; 1473, |
| | | 2833; 1588, 2943; 1643, 2997; 1732, 3083; 1828, 3177; 1876, 3224; |
| | | 2009, 3347; 2158, 3488; 2294, 3620; 2448, 3761; |
| 40 | 815 | 1150, 2519; 1151, 2520; 1179, 2548; 1183, 2552; 1277, 2645; 1473, |
| | | 2833; 1588, 2943; 1643, 2997; 1732, 3083; 1773, 3123; 1828, 3177; |
| | | 1876, 3224; 2009, 3347; 2079, 3414; 2158, 3488; 2294, 3620; 2334, |
| | | 3660; 2375, 3699; 2448, 3761; 2471, 3783; |
| 41 | 886 | 1166, 2535; 1255, 2624; 1280, 2648; 1336, 2702; 1464, 2824; 1487, |
| | | 2843; 1550, 2905; 1611, 2965; 1630, 2984; 1778, 3128; 1975, 3316; |
| | | 1983, 3322; 1993, 3332; 2042, 3379; 2077, 3412; 2156, 3486; 2165, |
| | | 3495; 2171, 3500; 2178, 3507; 2180, 3509; 2261, 3589; 2283, 3610; |
| | | 2284, 3611; 2329, 3655; 2345, 3671; 2361, 3686; 2403, 3724; |
| | | 2411, 3730; 2430, 3743; 2450, 3762; 2480, 3792; 2031, No_Pept; 2429, |
| | | No_Pept; |
| 42 | 969 | 1416, 2777; 1420, 2781; 1478, 2834; 1612, 2966; 1956, 3300; 2368, |
| | | 3693; 2408, 3729; |
| 43 | 236 | 1564, 2919; 1635, 2989; 1703, 3054; 1769, 3119; 1926, 3271; 2319, |
| | | 3645; 2470, 3782; |
| 44 | 388 | 1313, 2681; 1366, 2730; 1635, 2989; 1769, 3119; 1862, 3210; 1926, |
| | | 3271; 2470, 3782; |
| 45 | 1066 | 1386, 2749; 1662, 3015; 1690, 3042; 1940, 3285; 2132, 3463; 2139, |
| | | 3470; 2249, 3577; |
| 46 | 309 | 1128, 2497; 1147, 2516; 1289, 2657; 1311, 2679; 1314, 2682; 1316, |
| | | 2684; 1338, 2704; 1415, 2776; 1416, 2777; 1456, 2816; 1488, 2844; |
| | | 1498, 2854; 1547, 2902; 1570, 2925; 1574, 2929; 1589, 2944; 1590, |
| | | 2945; 1623, 2977; 1647, 3000; 1655, 3008; 1697, 3049; 1717, 3068; |
| | | 1734, 3085; 1843, 3191; 1867, 3215; 1920, 3265; 2075, 3410; |
| | | 2091, 3426; 2092, 3427; 2094, 3429; 2107, 3440; 2123, 3454; 2127, |
| | | 3458; 2175, 3504; 2190, 3519; 2223, 3551; 2321, 3647; 2447, 3760; |
| 47 | 990 | 1731, 3082; 1912, 3257; |
| 48 | 911 | 1168, 2537; 1731, 3082; 1748, 3098; 1912, 3257; |
| 49 | 307 | 1159, 2528; 1360, 2724; 2350, 3675; |
| 50 | 838 | 1939, 3284; 2131, 3462; |
| 51 | 424 | 1248, 2617; 1407, 2769; 1744, 3094; 1782, 3132; |
| 52 | 760 | 1484, 2840; 1901, 3246; 2201, 3530; 2483, 3795; |
| 53 | 271 | 1185, 2554; 1329, 2695; 1381, 2744; 1425, 2786; 1437, 2798; 1451, |
| | | 2811; 1494, 2850; 1503, 2859; 1554, 2909; 1718, 3069; 1903, 3248; |
| | | 1921, 3266; 1958, 3302; 2023, 3361; 2067, 3402; 2113, 3444; 2126, |
| | | 3457; 2130, 3461; 2222, 3550; |
| 54 | 299 | 1129, 2498; 1223, 2592; 1280, 2648; 1404, 2766; 1443, 2804; 1484, |
| | | 2840; 1625, 2979; 1650, 3003; 1674, 3026; 1715, 3066; 1801, 3150; |
| | | 1950, 3294; 1951, 3295; 2144, 3475; 2185, 3514; 2198, 3527; 2296, |
| | | 3622; 2336, 3662; 2365, 3690; 2366, 3691; 2390, 3712; 2402, 3723; |
| | | 2435, 3748; 2459, 3771; |
| 55 | 418 | 2273, 3601; 1401, No_Pept; |
| 56 | 469 | 1315, 2683; 2222, 3550; |
| 57 | 220, 726, 825 | 1443, 2804; |
| 58 | 465 | 1268, 2637; 1533, 2888; 1616, 2970; |
| 59 | 827 | 1392, 2755; 1585, 2940; 1673, 3025; 2002, 3340; |
| 60 | 755 | 1248, 2617; |
| 61 | 976 | 1248, 2617; |
| 62 | 460 | 1192, 2561; 1215, 2584; 1731, 3082; 1989, 3328; 1959, No_Pept; 2208, |
| | | No_Pept; |
| 63 | 206, 633 | 1303, 2671; 1362, 2726; 1406, 2768; 1515, 2870; 1653, 3006; 2013, |
| | | 3351; 2220, 3548; 2251, 3579; 2381, 3703; 2395, 3717; 2064, No_Pept; |
| | | 2146, No_Pept; 2487, No_Pept; |
| 64 | 1003 | 1132, 2501; 1149, 2518; 1222, 2591; 1343, 2707; 1353, 2717; 1579, |
| | | 2934; 1640, 2994; 1686, 3038; 1745, 3095; 1819, 3168; 1844, 3192; |
| | | 1847, 3195; 1868, 3216; 1902, 3247; 1923, 3268; 1938, 3283; 2348, |
| | | 3674; 2355, 3680; 2377, 3701; |
| 65 | 1070 | 1188, 2557; 1381, 2744; 1414, 2775; 1503, 2859; 2222, 3550; |
| 66 | 618 | 1657, 3010; |
| 67 | 2, 174, 665, 715, 729, 160, 000 | 2089, 3424; 2311, 3637; 2368, 3693; |
| 68 | 52, 581, 910, 591, 063 | 2240, 3568; |
| 69 | 8, 821, 005 | |
| 70 | 4, 154, 177, 281, 068 | 1261, 2630; 1516, 2871; 2347, 3673; 2466, 3778; |
| 71 | 268, 269, 270, 416, 828, 829, 967, 968 | 1261, 2630; 1516, 2871; 2347, 3673; 2466, 3778; |
| 72 | 834 | 1153, 2522; 1365, 2729; 1974, 3315; 2230, 3558; |
| 73 | 630, 833 | 1153, 2522; 1365, 2729; 1974, 3315; 2230, 3558; |
| 74 | 412 | 1153, 2522; 1365, 2729; 2230, 3558; 1645, No_Pept; |
| 75 | 1052 | 1153, 2522; 1365, 2729; 1974, 3315; 2086, 3421; 2113, 3444; 2230, |
| | | 3558; 1645, No_Pept; |
| 76 | 720, 816 | 1205, 2574; 1221, 2590; 1628, 2982; 1661, 3014; |
| 77 | 1018 | 1349, 2713; 1366, 2730; 1635, 2989; 1769, 3119; 1862, 3210; 2176, |
| | | 3505; 2272, 3600; 2319, 3645; 2406, 3727; 2470, 3782; |
| 78 | 996 | 1229, 2598; 1283, 2651; 1418, 2779; 1525, 2880; 1597, 2952; 1764, |
| | | 3114; 1863, 3211; 1905, 3250; 2121, 3452; 2141, 3472; 2151, 3481; |
| | | 2278, 3606; 2444, 3757; 2457, 3769; 2463, 3775; 2472, 3784; |
| 79 | 568 | 2382, 3704; |
| 80 | 913 | 1402, 2764; 1462, 2822; 1946, 3291; 1949, 3293; 2191, 3520; 2475, |
| | | 3787; |
| 81 | 912 | 1645, No_Pept; |
| 82 | 413 | 1365, 2729; |
| 83 | 629 | 1335, 2701; 1855, 3203; 2149, 3479; 2221, 3549; 1645, No_Pept; |
| 84 | 539 | 1386, 2749; 1469, 2829; 1535, 2890; 1662, 3015; 1690, 3042; 1940, |
| | | 3285; 2085, 3420; 2132, 3463; 2249, 3577; |
| 85 | 306, 667, 770, 884 | 1162, 2531; 1225, 2594; 1241, 2610; 1287, 2655; 1308, 2676; 1534, |
| | | 2889; 1691, 3043; 1694, 3046; 1724, 3075; 1838, 3186; 1860, 3208; |
| | | 1866, 3214; 1951, 3295; 2007, 3345; 2045, 3382; 2058, 3394; 2129, |
| | | 3460; 2137, 3468; 2140, 3471; 2199, 3528; 2207, 3536; 2271, 3599; |
| | | 2437, 3750; 2464, 3776; 2467, 3779; 2473, 3785; 2399, No_Pept; |
| 86 | 470 | 1162, 2531; 1225, 2594; 1287, 2655; 1308, 2676; 1325, 2691; 1534, |
| | | 2889; 1691, 3043; 1694, 3046; 1724, 3075; 1798, 3147; 1838, 3186; |
| | | 1860, 3208; 1866, 3214; 1951, 3295; 2007, 3345; 2045, 3382; 2058, |
| | | 3394; 2129, 3460; 2137, 3468; 2140, 3471; 2199, 3528; 2200, 3529; |
| | | 2207, 3536; 2249, 3577; 2271, 3599; 2437, 3750; 2464, 3776; |
| | | 2467, 3779; 2473, 3785; 2399, No_Pept; |
| 87 | 887 | 1821, 3170; 1857, 3205; 2362, 3687; 2491, 3801; |
| 88 | 632 | 1441, 2802; 1720, 3071; 1885, 3233; 2058, 3394; |
| 89 | 817 | 1322, 2688; 1736, 3087; |
| 90 | 722 | |
| 91 | 215 | 2323, 3649; |
| 92 | 734 | 1259, 2628; 1327, 2693; 1354, 2718; 1513, 2868; 1803, 3152; 2285, |
| | | 3612; 2303, 3629; |
| 93 | 631 | 1606, 2960; 1752, 3102; |
| 94 | 858 | 1265, 2634; 1270, 2639; 1498, 2854; 1499, 2855; 1790, 3140; 1867, |
| | | 3215; 1925, 3270; 1944, 3289; 1997, 3336; 2101, 3434; 2167, 3497; |
| | | 2303, 3629; 2310, 3636; 2328, 3654; 2436, 3749; 2168, No_Pept; |
| 95 | 831 | 1537, 2892; 1960, 3303; 2270, 3598; |
| 96 | 290, 296, 297, 461, 462, 463, 464, 570, 658, 762, | |
| | 763, 914, 1055 | |
| 97 | 1118 | 1662, 3015; 1672, 3024; 1758, 3108; 1780, 3130; 1810, 3159; 1832, |
| | | 3180; 1834, 3182; 1837, 3185; 1892, 3239; 1916, 3261; 1999, 3338; |
| | | 2004, 3342; 2102, 3435; 2106, 3439; 2197, 3526; 2434, 3747; |
| 98 | 459 | |
| 99 | 293, 759 | 2177, 3506; 2291, 3618; 2309, 3635; |
| 100 | 961 | 1348, 2712; 2420, 3737; 2482, 3794; |
| 101 | 1008 | 1200, 2569; 1388, 2751; 1501, 2857; 1848, 3196; 1932, 3277; 2065, |
| | | 3400; 2189, 3518; 2226, 3554; 2239, 3567; 2360, 3685; |
| 102 | 737 | 1174, 2543; 1296, 2664; 1317, 2685; 1650, 3003; 1967, 3310; 2394, |
| | | 3716; 2476, 3788; |
| 103 | 204, 205, 986, 987 | 1203, 2572; 1248, 2617; 1660, 3013; 1822, 3171; 2142, 3473; |
| 104 | 452 | 1203, 2572; 1248, 2617; 1660, 3013; 1676, 3028; 1822, 3171; 2142, |
| | | 3473; 2184, 3513; |
| 105 | 1117 | 1133, 2502; 1220, 2589; 1233, 2602; 1240, 2609; 1244, 2613; 1291, |
| | | 2659; 1305, 2673; 1368, 2732; 1372, 2736; 1386, 2749; 1449, 2809; |
| | | 1500, 2856; 1510, 2865; 1512, 2867; 1521, 2876; 1529, 2884; 1543, |
| | | 2898; 1565, 2920; 1613, 2967; 1646, 2999; 1659, 3012; 1708, 3059; |
| | | 1727, 3078; 1733, 3084; 1740, 3090; 1750, 3100; 1767, 3117; |
| | | 1781, 3131; 1789, 3139; 1825, 3174; 1839, 3187; 1859, 3207; 1863, |
| | | 3211; 1891, 3238; 1893, 3240; 1897, 3242; 1927, 3272; 1936, 3281; |
| | | 1970, 3311; 1985, 3324; 2012, 3350; 2018, 3356; 2025, 3363; 2054, |
| | | 3390; 2056, 3392; 2059, 3395; 2063, 3399; 2067, 3402; 2081, 3416; |
| | | 2102, 3435; 2196, 3525; 2211, 3539; 2244, 3572; 2251, 3579; |
| | | 2254, 3582; 2268, 3596; 2281, 3608; 2289, 3616; 2297, 3623; 2308, |
| | | 3634; 2337, 3663; 2357, 3682; 2367, 3692; 2383, 3705; 2387, 3709; |
| | | 2426, 3740; 2458, 3770; 2461, 3773; 2473, 3785; 2478, 3790; |
| 106 | 1113 | 1134, 2503; 1142, 2511; 1165, 2534; 1172, 2541; 1177, 2546; 1184, |
| | | 2553; 1196, 2565; 1214, 2583; 1224, 2593; 1238, 2607; 1267, 2636; |
| | | 1279, 2647; 1309, 2677; 1326, 2692; 1339, 2705; 1360, 2724; 1390, |
| | | 2753; 1460, 2820; 1462, 2822; 1470, 2830; 1484, 2840; 1509, 2864; |
| | | 1523, 2878; 1528, 2883; 1560, 2915; 1572, 2927; 1591, 2946; |
| | | 1600, 2955; 1601, 2956; 1609, 2963; 1615, 2969; 1624, 2978; 1641, |
| | | 2995; 1642, 2996; 1664, 3017; 1677, 3029; 1683, 3035; 1684, 3036; |
| | | 1687, 3039; 1694, 3046; 1706, 3057; 1749, 3099; 1760, 3110; 1775, |
| | | 3125; 1777, 3127; 1788, 3138; 1793, 3143; 1800, 3149; 1801, 3150; |
| | | 1804, 3153; 1884, 3232; 1888, 3235; 1915, 3260; 1970, 3311; |
| | | 1971, 3312; 1991, 3330; 1996, 3335; 2033, 3370; 2043, 3380; 2061, |
| | | 3397; 2062, 3398; 2067, 3402; 2114, 3445; 2119, 3450; 2122, 3453; |
| | | 2164, 3494; 2209, 3537; 2237, 3565; 2257, 3585; 2288, 3615; 2315, |
| | | 3641; 2342, 3668; 2358, 3683; 2370, 3695; 2376, 3700; 1321, No_Pept; |
| | | 1341, No_Pept; 1448, No_Pept; 1474, No_Pept; 1476, No_Pept; |
| | | 1477, No_Pept; 1508, No_Pept; 1605, No_Pept; 1702, No_Pept; |
| | | 1830, No_Pept; 1887, No_Pept; 1895, No_Pept; 1948, No_Pept; |
| | | 1968, No_Pept; 1976, No_Pept; 1978, No_Pept; 2098, No_Pept; |
| | | 2109, No_Pept; 2280, No_Pept; 2293, No_Pept; 2379, No_Pept; |
| | | 2415, No_Pept; 2425, No_Pept; 2449, No_Pept; |
| 107 | 1, 110, 111, 111, 121, 110 | 1135, 2504; 1142, 2511; 1153, 2522; 1157, 2526; 1171, 2540; 1172, |
| | | 2541; 1177, 2546; 1178, 2547; 1204, 2573; 1214, 2583; 1218, 2587; |
| | | 1224, 2593; 1236, 2605; 1237, 2606; 1238, 2607; 1242, 2611; 1250, |
| | | 2619; 1251, 2620; 1262, 2631; 1267, 2636; 1297, 2665; 1300, 2668; |
| | | 1306, 2674; 1339, 2705; 1347, 2711; 1383, 2746; 1390, 2753; |
| | | 1399, 2762; 1411, 2773; 1422, 2783; 1426, 2787; 1433, 2794; 1436, |
| | | 2797; 1442, 2803; 1454, 2814; 1460, 2820; 1462, 2822; 1470, 2830; |
| | | 1480, 2836; 1484, 2840; 1485, 2841; 1496, 2852; 1509, 2864; 1523, |
| | | 2878; 1527, 2882; 1528, 2883; 1552, 2907; 1560, 2915; 1568, 2923; |
| | | 1570, 2925; 1573, 2928; 1576, 2931; 1591, 2946; 1592, 2947; |
| | | 1596, 2951; 1598, 2953; 1599, 2954; 1600, 2955; 1601, 2956; 1609, |
| | | 2963; 1615, 2969; 1622, 2976; 1624, 2978; 1627, 2981; 1632, 2986; |
| | | 1634, 2988; 1642, 2996; 1664, 3017; 1668, 3020; 1677, 3029; 1683, |
| | | 3035; 1684, 3036; 1687, 3039; 1694, 3046; 1700, 3052; 1709, 3060; |
| | | 1711, 3062; 1714, 3065; 1723, 3074; 1749, 3099; 1754, 3104; |
| | | 1775, 3125; 1777, 3127; 1788, 3138; 1800, 3149; 1804, 3153; 1807, |
| | | 3156; 1808, 3157; 1820, 3169; 1878, 3226; 1880, 3228; 1888, 3235; |
| | | 1970, 3311; 1980, 3319; 1982, 3321; 1984, 3323; 1991, 3330; 1992, |
| | | 3331; 1995, 3334; 1996, 3335; 2016, 3354; 2030, 3368; 2033, 3370; |
| | | 2043, 3380; 2055, 3391; 2057, 3393; 2062, 3398; 2087, 3422; |
| | | 2114, 3445; 2119, 3450; 2122, 3453; 2124, 3455; 2128, 3459; 2133, |
| | | 3464; 2143, 3474; 2164, 3494; 2182, 3511; 2186, 3515; 2209, 3537; |
| | | 2210, 3538; 2219, 3547; 2231, 3559; 2237, 3565; 2250, 3578; 2257, |
| | | 3585; 2279, 3607; 2288, 3615; 2292, 3619; 2304, 3630; 2315, 3641; |
| | | 2317, 3643; 2333, 3659; 2340, 3666; 2342, 3668; 2354, 3679; |
| | | 2358, 3683; 2369, 3694; 2386, 3708; 2393, 3715; 2407, 3728; 2414, |
| | | 3733; 2422, 3739; 2455, 3767; 2460, 3772; 2474, 3786; 2477, 3789; |
| | | 1321, No_Pept; 1341, No_Pept; 1448, No_Pept; 1474, No_Pept; |
| | | 1476, No_Pept; 1477, No_Pept; 1508, No_Pept; 1605, No_Pept; |
| | | 1702, No_Pept; 1830, No_Pept; 1887, No_Pept; 1895, No_Pept; 1948, |
| | | No_Pept; 1968, No_Pept; 1976, No_Pept; 1978, No_Pept; 2098, |
| | | No_Pept; 2109, No_Pept; 2280, No_Pept; 2293, No_Pept; 2379, |
| | | No_Pept; 2415, No_Pept; 2425, No_Pept; 2449, No_Pept; |
| 108 | 1115 | 1135, 2504; 1142, 2511; 1153, 2522; 1157, 2526; 1175, 2544; 1214, |
| | | 2583; 1237, 2606; 1238, 2607; 1242, 2611; 1245, 2614; 1250, 2619; |
| | | 1251, 2620; 1262, 2631; 1267, 2636; 1279, 2647; 1294, 2662; 1297, |
| | | 2665; 1300, 2668; 1307, 2675; 1309, 2677; 1328, 2694; 1347, 2711; |
| | | 1390, 2753; 1399, 2762; 1419, 2780; 1422, 2783; 1433, 2794; |
| | | 1436, 2797; 1453, 2813; 1454, 2814; 1460, 2820; 1462, 2822; 1480, |
| | | 2836; 1483, 2839; 1484, 2840; 1496, 2852; 1509, 2864; 1523, 2878; |
| | | 1527, 2882; 1528, 2883; 1543, 2898; 1551, 2906; 1552, 2907; 1560, |
| | | 2915; 1571, 2926; 1576, 2931; 1577, 2932; 1591, 2946; 1596, 2951; |
| | | 1598, 2953; 1600, 2955; 1601, 2956; 1608, 2962; 1609, 2963; |
| | | 1610, 2964; 1624, 2978; 1642, 2996; 1644, 2998; 1658, 3011; 1664, |
| | | 3017; 1666, 3019; 1668, 3020; 1678, 3030; 1683, 3035; 1684, 3036; |
| | | 1687, 3039; 1694, 3046; 1700, 3052; 1709, 3060; 1738, 3089; 1749, |
| | | 3099; 1757, 3107; 1775, 3125; 1776, 3126; 1777, 3127; 1785, 3135; |
| | | 1788, 3138; 1800, 3149; 1807, 3156; 1820, 3169; 1861, 3209; |
| | | 1880, 3228; 1888, 3235; 1913, 3258; 1970, 3311; 1982, 3321; 1984, |
| | | 3323; 1992, 3331; 1994, 3333; 1995, 3334; 1996, 3335; 2011, 3349; |
| | | 2033, 3370; 2048, 3385; 2055, 3391; 2057, 3393; 2096, 3431; 2114, |
| | | 3445; 2119, 3450; 2122, 3453; 2133, 3464; 2164, 3494; 2181, 3510; |
| | | 2182, 3511; 2209, 3537; 2210, 3538; 2218, 3546; 2237, 3565; |
| | | 2250, 3578; 2257, 3585; 2279, 3607; 2287, 3614; 2288, 3615; 2304, |
| | | 3630; 2317, 3643; 2323, 3649; 2333, 3659; 2340, 3666; 2342, 3668; |
| | | 2354, 3679; 2358, 3683; 2359, 3684; 2386, 3708; 2394, 3716; 2404, |
| | | 3725; 2451, 3763; 2455, 3767; 2460, 3772; 2474, 3786; 1321, No_Pept; |
| | | 1341, No_Pept; 1373, No_Pept; 1448, No_Pept; 1474, No_Pept; |
| | | 1476, No_Pept; 1477, No_Pept; 1508, No_Pept; 1605, No_Pept; |
| | | 1702, No_Pept; 1830, No_Pept; 1887, No_Pept; 1895, No_Pept; |
| | | 1948, No_Pept; 1968, No_Pept; 1976, No_Pept; 1978, No_Pept; |
| | | 2098, No_Pept; 2109, No_Pept; 2280, No_Pept; 2293, No_Pept; |
| | | 2379, No_Pept; 2415, No_Pept; 2425, No_Pept; 2449, No_Pept; |
| 109 | 1114 | 1134, 2503; 1135, 2504; 1137, 2506; 1141, 2510; 1142, 2511; 1153, |
| | | 2522; 1157, 2526; 1158, 2527; 1172, 2541; 1178, 2547; 1182, 2551; |
| | | 1190, 2559; 1195, 2564; 1228, 2597; 1236, 2605; 1237, 2606; 1238, |
| | | 2607; 1243, 2612; 1247, 2616; 1251, 2620; 1262, 2631; 1272, 2641; |
| | | 1275, 2644; 1281, 2649; 1294, 2662; 1297, 2665; 1299, 2667; |
| | | 1309, 2677; 1314, 2682; 1326, 2692; 1327, 2693; 1331, 2697; 1332, |
| | | 2698; 1347, 2711; 1351, 2715; 1363, 2727; 1390, 2753; 1397, 2760; |
| | | 1398, 2761; 1410, 2772; 1411, 2773; 1419, 2780; 1424, 2785; 1426, |
| | | 2787; 1433, 2794; 1436, 2797; 1453, 2813; 1454, 2814; 1456, 2816; |
| | | 1460, 2820; 1462, 2822; 1480, 2836; 1483, 2839; 1484, 2840; |
| | | 1490, 2846; 1494, 2850; 1496, 2852; 1504, 2860; 1509, 2864; 1520, |
| | | 2875; 1528, 2883; 1530, 2885; 1538, 2893; 1543, 2898; 1545, 2900; |
| | | 1549, 2904; 1553, 2908; 1562, 2917; 1566, 2921; 1576, 2931; 1582, |
| | | 2937; 1591, 2946; 1592, 2947; 1598, 2953; 1600, 2955; 1601, 2956; |
| | | 1608, 2962; 1609, 2963; 1619, 2973; 1622, 2976; 1627, 2981; |
| | | 1632, 2986; 1642, 2996; 1644, 2998; 1646, 2999; 1654, 3007; 1664, |
| | | 3017; 1683, 3035; 1684, 3036; 1687, 3039; 1696, 3048; 1700, 3052; |
| | | 1701, 3053; 1709, 3060; 1711, 3062; 1712, 3063; 1713, 3064; 1719, |
| | | 3070; 1723, 3074; 1730, 3081; 1749, 3099; 1754, 3104; 1757, 3107; |
| | | 1767, 3117; 1777, 3127; 1779, 3129; 1783, 3133; 1784, 3134; |
| | | 1788, 3138; 1800, 3149; 1801, 3150; 1807, 3156; 1808, 3157; 1809, |
| | | 3158; 1815, 3164; 1823, 3172; 1826, 3175; 1827, 3176; 1836, 3184; |
| | | 1865, 3213; 1869, 3217; 1880, 3228; 1881, 3229; 1882, 3230; 1883, |
| | | 3231; 1884, 3232; 1888, 3235; 1914, 3259; 1915, 3260; 1931, 3276; |
| | | 1935, 3280; 1963, 3306; 1970, 3311; 1979, 3318; 1980, 3319; |
| | | 1981, 3320; 1982, 3321; 1985, 3324; 1996, 3335; 1998, 3337; 2019, |
| | | 3357; 2030, 3368; 2036, 3373; 2043, 3380; 2046, 3383; 2055, 3391; |
| | | 2062, 3398; 2087, 3422; 2089, 3424; 2096, 3431; 2103, 3436; 2114, |
| | | 3445; 2126, 3457; 2133, 3464; 2136, 3467; 2142, 3473; 2143, 3474; |
| | | 2147, 3477; 2161, 3491; 2164, 3494; 2169, 3498; 2206, 3535; |
| | | 2209, 3537; 2210, 3538; 2214, 3542; 2219, 3547; 2231, 3559; 2234, |
| | | 3562; 2235, 3563; 2250, 3578; 2257, 3585; 2287, 3614; 2317, 3643; |
| | | 2325, 3651; 2332, 3658; 2333, 3659; 2335, 3661; 2342, 3668; 2354, |
| | | 3679; 2358, 3683; 2359, 3684; 2364, 3689; 2369, 3694; 2376, 3700; |
| | | 2385, 3707; 2393, 3715; 2398, 3720; 2414, 3733; 2418, 3735; |
| | | 2445, 3758; 2452, 3764; 2455, 3767; 2460, 3772; 2462, 3774; 2474, |
| | | 3786; 2477, 3789; 2485, 3797; 1276, No_Pept; 1320, No_Pept; 1321, |
| | | No_Pept; 1341, No_Pept; 1342, No_Pept; 1448, No_Pept; 1474, |
| | | No_Pept; 1475, No_Pept; 1476, No_Pept; 1477, No_Pept; 1508, |
| | | No_Pept; 1605, No_Pept; 1702, No_Pept; 1830, No_Pept; 1887, |
| | | No_Pept; 1894, No_Pept; 1895, No_Pept; 1948, No_Pept; 1968, No_Pept; |
| | | 1969, No_Pept; 1976, No_Pept; 1978, No_Pept; 2097, No_Pept; |
| | | 2098, No_Pept; 2109, No_Pept; 2110, No_Pept; 2280, No_Pept; |
| | | 2293, No_Pept; 2378, No_Pept; 2379, No_Pept; 2409, No_Pept; |
| | | 2410, No_Pept; 2415, No_Pept; 2416, No_Pept; 2425, No_Pept; |
| | | 2449, No_Pept; |
| 110 | 661 | 1127, 2496; 1519, 2874; 1695, 3047; 1746, 3096; 1922, 3267; 1947, |
| | | 3292; 1972, 3313; 2000, 3339; 2015, 3353; 2072, 3407; 2193, 3522; |
| | | 2374, 3698; |
| 111 | 854 | 1319, 2687; 1405, 2767; 1620, 2974; 1682, 3034; 1707, 3058; 1728, |
| | | 3079; 1746, 3096; 1787, 3137; 1845, 3193; 1945, 3290; 1739, No_Pept; |
| 112 | 771 | 1269, 2638; 1502, 2858; 1575, 2930; 1664, 3017; 1693, 3045; 1829, |
| | | 3178; 1909, 3254; 2040, 3377; 2462, 3774; |
| 113 | 467 | 1162, 2531; 1293, 2661; 1481, 2837; 1517, 2872; 1557, 2912; 1608, |
| | | 2962; 1610, 2964; 1663, 3016; 1670, 3022; 1943, 3288; 1965, 3308; |
| | | 1977, 3317; 1986, 3325; 2041, 3378; 2209, 3537; 2243, 3571; 2284, |
| | | 3611; 2331, 3657; 2469, 3781; |
| 114 | 546 | 1170, 2539; 1173, 2542; 1202, 2571; 1334, 2700; 1382, 2745; 1457, |
| | | 2817; 1464, 2824; 1466, 2826; 1471, 2831; 1472, 2832; 1495, 2851; |
| | | 1541, 2896; 1593, 2948; 1604, 2959; 1649, 3002; 1675, 3027; 1721, |
| | | 3072; 1766, 3116; 1771, 3121; 1774, 3124; 1814, 3163; 1824, 3173; |
| | | 1840, 3188; 1841, 3189; 1852, 3200; 1925, 3270; 1964, 3307; |
| | | 2006, 3344; 2008, 3346; 2076, 3411; 2084, 3419; 2093, 3428; 2111, |
| | | 3442; 2112, 3443; 2142, 3473; 2166, 3496; 2173, 3502; 2179, 3508; |
| | | 2194, 3523; 2217, 3545; 2290, 3617; 2314, 3640; 2339, 3665; 2341, |
| | | 3667; 2343, 3669; 2352, 3677; 2353, 3678; 2428, 3742; 2433, 3746; |
| | | 2442, 3755; 2455, 3767; 2464, 3776; 2466, 3778; |
| 115 | 921 | 1143, 2512; 1153, 2522; 1258, 2627; 1355, 2719; 1371, 2735; 1385, |
| | | 2748; 1417, 2778; 1461, 2821; 1532, 2887; 1638, 2992; 1639, 2993; |
| | | 1743, 3093; 1811, 3160; 1889, 3236; 1898, 3243; 2033, 3370; 2090, |
| | | 3425; 2095, 3430; 2150, 3480; 2216, 3544; 2228, 3556; 2248, 3576; |
| | | 2252, 3580; 2283, 3610; 2400, 3721; 2405, 3726; 2419, 3736; |
| | | 2492, 3802; |
| 116 | 975 | 1129, 2498; 1130, 2499; 1131, 2500; 1136, 2505; 1138, 2507; 1140, |
| | | 2509; 1144, 2513; 1153, 2522; 1156, 2525; 1161, 2530; 1163, 2532; |
| | | 1165, 2534; 1169, 2538; 1186, 2555; 1191, 2560; 1192, 2561; 1197, |
| | | 2566; 1198, 2567; 1204, 2573; 1207, 2576; 1208, 2577; 1209, 2578; |
| | | 1210, 2579; 1227, 2596; 1235, 2604; 1246, 2615; 1255, 2624; |
| | | 1264, 2633; 1282, 2650; 1285, 2653; 1286, 2654; 1290, 2658; 1292, |
| | | 2660; 1295, 2663; 1301, 2669; 1330, 2696; 1333, 2699; 1346, 2710; |
| | | 1350, 2714; 1358, 2722; 1367, 2731; 1370, 2734; 1384, 2747; 1387, |
| | | 2750; 1400, 2763; 1403, 2765; 1408, 2770; 1413, 2774; 1427, 2788; |
| | | 1438, 2799; 1439, 2800; 1440, 2801; 1445, 2806; 1446, 2807; |
| | | 1455, 2815; 1456, 2816; 1458, 2818; 1459, 2819; 1465, 2825; 1482, |
| | | 2838; 1483, 2839; 1511, 2866; 1518, 2873; 1522, 2877; 1524, 2879; |
| | | 1532, 2887; 1533, 2888; 1539, 2894; 1542, 2897; 1559, 2914; 1589, |
| | | 2944; 1602, 2957; 1607, 2961; 1615, 2969; 1626, 2980; 1631, 2985; |
| | | 1636, 2990; 1641, 2995; 1652, 3005; 1663, 3016; 1668, 3020; |
| | | 1669, 3021; 1689, 3041; 1699, 3051; 1704, 3055; 1705, 3056; 1710, |
| | | 3061; 1756, 3106; 1759, 3109; 1762, 3112; 1765, 3115; 1794, 3144; |
| | | 1795, 3145; 1805, 3154; 1806, 3155; 1818, 3167; 1833, 3181; 1842, |
| | | 3190; 1846, 3194; 1847, 3195; 1849, 3197; 1850, 3198; 1871, 3219; |
| | | 1875, 3223; 1877, 3225; 1889, 3236; 1890, 3237; 1899, 3244; |
| | | 1902, 3247; 1911, 3256; 1918, 3263; 1919, 3264; 1929, 3274; 1947, |
| | | 3292; 1954, 3298; 1973, 3314; 2003, 3341; 2014, 3352; 2027, 3365; |
| | | 2028, 3366; 2035, 3372; 2039, 3376; 2044, 3381; 2047, 3384; 2049, |
| | | 3386; 2050, 3387; 2063, 3399; 2071, 3406; 2090, 3425; 2099, 3432; |
| | | 2117, 3448; 2122, 3453; 2145, 3476; 2160, 3490; 2162, 3492; |
| | | 2170, 3499; 2183, 3512; 2192, 3521; 2202, 3531; 2210, 3538; 2213, |
| | | 3541; 2224, 3552; 2225, 3553; 2233, 3561; 2245, 3573; 2255, 3583; |
| | | 2256, 3584; 2268, 3596; 2274, 3602; 2276, 3604; 2291, 3618; 2302, |
| | | 3628; 2307, 3633; 2312, 3638; 2316, 3642; 2320, 3646; 2322, 3648; |
| | | 2327, 3653; 2330, 3656; 2338, 3664; 2346, 3672; 2351, 3676; |
| | | 2363, 3688; 2412, 3731; 2432, 3745; 2443, 3756; 2454, 3766; 2455, |
| | | 3767; 2456, 3768; 2465, 3777; 2489, 3799; 2495, 3804; |
| 117 | 965 | 1154, 2523; 1378, 2741; 1966, 3309; 1990, 3329; 2260, 3588; |
| 118 | 764 | 2423, No_Pept; |
| 119 | 411 | 1155, 2524; 1312, 2680; 1384, 2747; 1428, 2789; 1489, 2845; 1614, |
| | | 2968; 1621, 2975; 1741, 3091; 1755, 3105; 1786, 3136; 1856, 3204; |
| | | 2015, 3353; 2138, 3469; 2172, 3501; 2179, 3508; 2187, 3516; 2205, |
| | | 3534; 2358, 3683; 2439, 3752; 2484, 3796; |
| 120 | 628 | |
| 121 | 832 | 1386, 2749; 1662, 3015; 1940, 3285; 2132, 3463; 2249, 3577; |
| 122 | 213 | 1187, 2556; 1396, 2759; 1434, 2795; 1904, 3249; 1959, No_Pept; 2208, |
| | | No_Pept; |
| 123 | 5, 291, 126 | 1651, 3004; |
| 124 | 530, 531, 532, 533, 534, 535 | 1651, 3004; 2462, 3774; |
| 125 | 211, 292 | |
| 126 | 767 | 1377, 2740; 1441, 2802; 1548, 2903; 1561, 2916; 1594, 2949; 1698, |
| | | 3050; 1747, 3097; 2005, 3343; 2108, 3441; 2238, 3566; 2266, 3594; |
| | | 2318, 3644; 2486, 3798; |
| 127 | 768, 970 | 1130, 2499; 1135, 2504; 1146, 2515; 1160, 2529; 1164, 2533; 1231, |
| | | 2600; 1304, 2672; 1361, 2725; 1374, 2737; 1375, 2738; 1376, 2739; |
| | | 1377, 2740; 1430, 2791; 1450, 2810; 1452, 2812; 1486, 2842; 1567, |
| | | 2922; 1688, 3040; 1725, 3076; 1802, 3151; 1812, 3161; 1859, 3207; |
| | | 1873, 3221; 2015, 3353; 2017, 3355; 2020, 3358; 2024, 3362; |
| | | 2140, 3471; 2152, 3482; 2157, 3487; 2188, 3517; 2237, 3565; 2238, |
| | | 3566; 2295, 3621; 2321, 3647; 2324, 3650; 2371, 3696; 2388, 3710; |
| | | 2389, 3711; 2396, 3718; |
| 128 | 993, 994, 995 | |
| 129 | 207 | |
| 130 | 973 | 1188, 2557; 1206, 2575; 1381, 2744; 1394, 2757; 1500, 2856; 1726, |
| | | 3077; 2154, 3484; 2222, 3550; 2267, 3595; 2384, 3706; |
| 131 | 573 | 1130, 2499; 1139, 2508; 1238, 2607; 1357, 2721; 1358, 2722; 1376, |
| | | 2739; 1536, 2891; 1742, 3092; 1751, 3101; 1761, 3111; 1772, 3122; |
| | | 1797, 3146; 2135, 3466; 2326, 3652; 2417, 3734; |
| 132 | 7, 188, 261, 064 | 2424, No_Pept; |
| 133 | 222 | |
| 134 | 265 | 1249, 2618; |
| 135 | 536 | |
| 136 | 266 | 1189, 2558; 1799, 3148; 1872, 3220; |
| 137 | 974 | 1193, 2562; 1217, 2586; 1393, 2756; 1563, 2918; 1628, 2982; 2277, |
| | | 3605; 2401, 3722; |
| 138 | 254 | 1366, 2730; 1635, 2989; 1769, 3119; 1862, 3210; 2470, 3782; |
| 139 | 636, 637 | 1386, 2749; 1930, 3275; 2249, 3577; 2373, No_Pept; |
| 140 | 422 | 1386, 2749; 1618, 2972; 2032, 3369; 2249, 3577; 2263, 3591; |
| 141 | 989 | |
| 142 | 212 | |
| 143 | 1053 | 2034, 3371; |
| 144 | 634 | 2120, 3451; |
| 145 | 576 | 1192, 2561; 1215, 2584; 1603, 2958; 1763, 3113; 1989, 3328; 1959, |
| | | No_Pept; 2208, No_Pept; |
| 146 | 758 | 2423, No_Pept; 2424, No_Pept; |
| 147 | 721 | |
| 148 | 666 | 1176, 2545; 1254, 2623; 1257, 2626; 1479, 2835; 1722, 3073; 1766, |
| | | 3116; 1791, 3141; 1962, 3305; 2060, 3396; 2115, 3446; 2212, 3540; |
| | | 2305, 3631; 2314, 3640; 2413, 3732; 2479, 3791; |
| 149 | 11, 201, 121 | 1177, 2546; 1226, 2595; 1854, 3202; |
| 150 | 419, 662, 663, 883 | 1177, 2546; 1226, 2595; 1584, 2939; 2241, 3569; |
| 151 | 300, 301, 302, 303, 304 | 1177, 2546; 1226, 2595; 1584, 2939; 2241, 3569; |
| 152 | 836 | 1177, 2546; 1226, 2595; 1369, 2733; 1584, 2939; 1854, 3202; 1870, |
| | | 3218; 1898, 3243; 2241, 3569; 2246, 3574; |
| 153 | 5, 741, 119 | 1177, 2546; 1226, 2595; 1369, 2733; 1584, 2939; 1870, 3218; 1898, |
| | | 3243; 2241, 3569; 2246, 3574; 2262, 3590; 2490, 3800; |
| 154 | 853 | 1153, 2522; 1365, 2729; 1941, 3286; 2086, 3421; 2113, 3444; 2230, |
| | | 3558; 2301, 3627; 1645, No_Pept; |
| 155 | 544, 545, 837 | 1303, 2671; 1362, 2726; 1406, 2768; 1515, 2870; 1653, 3006; 2013, |
| | | 3351; 2220, 3548; 2381, 3703; 2395, 3717; 2064, No_Pept; 2146, |
| | | No_Pept; 2487, No_Pept; |
| 156 | 915 | 1303, 2671; 1362, 2726; 1406, 2768; 1515, 2870; 1653, 3006; 2013, |
| | | 3351; 2184, 3513; 2220, 3548; 2381, 3703; 2395, 3717; 2438, 3751; |
| | | 2064, No_Pept; 2146, No_Pept; 2487, No_Pept; |
| 157 | 761 | 1681, 3033; 2177, 3506; 2291, 3618; |
| 158 | 214 | 1681, 3033; 1908, 3253; 2177, 3506; 2291, 3618; |
| 159 | 2, 951, 054 | 2177, 3506; 2291, 3618; 2309, 3635; |
| 160 | 738 | 1145, 2514; 2184, 3513; |
| 161 | 458 | 1167, 2536; 1216, 2585; 2073, 3408; |
| 162 | 668, 857 | |
| 163 | 1123 | 1497, 2853; 1648, 3001; 1831, 3179; |
| 164 | 1122 | |
| 165 | 7, 651, 069 | 1497, 2853; 1514, 2869; 1583, 2938; 1648, 3001; |
| 166 | 421, 839 | 1180, 2549; 1278, 2646; 1287, 2655; 1308, 2676; 1429, 2790; 1534, |
| | | 2889; 1633, 2987; 1724, 3075; 1816, 3165; 1838, 3186; 1866, 3214; |
| | | 1896, 3241; 2104, 3437; 2129, 3460; 2356, 3681; 2464, 3776; 2399, |
| | | No_Pept; |
| 167 | 736 | 1298, 2666; 1429, 2790; 1534, 2889; 1569, 2924; 1633, 2987; 1685, |
| | | 3037; 1724, 3075; 1816, 3165; 1896, 3241; 2129, 3460; 2249, 3577; |
| | | 2282, 3609; 2464, 3776; 2399, No_Pept; |
| 168 | 922 | 1161, 2530; 1201, 2570; 1253, 2622; 1256, 2625; 1266, 2635; 1282, |
| | | 2650; 1352, 2716; 1359, 2723; 1410, 2772; 1423, 2784; 1470, 2830; |
| | | 1492, 2848; 1493, 2849; 1540, 2895; 1587, 2942; 1595, 2950; 1617, |
| | | 2971; 1637, 2991; 1679, 3031; 1692, 3044; 1735, 3086; 1770, 3120; |
| | | 1792, 3142; 1917, 3262; 1952, 3296; 1957, 3301; 2010, 3348; |
| | | 2053, 3389; 2082, 3417; 2083, 3418; 2125, 3456; 2134, 3465; 2153, |
| | | 3483; 2165, 3495; 2227, 3555; 2313, 3639; 2314, 3640; 2385, 3707; |
| | | 2468, 3780; |
| 169 | 1065 | 1148, 2517; 1225, 2594; 1234, 2603; 1239, 2608; 1284, 2652; 1318, |
| | | 2686; 1357, 2721; 1364, 2728; 1414, 2775; 1435, 2796; 1463, 2823; |
| | | 1506, 2862; 1526, 2881; 1531, 2886; 1558, 2913; 1580, 2935; 1586, |
| | | 2941; 1813, 3162; 1900, 3245; 1937, 3282; 1955, 3299; 2068, 3403; |
| | | 2070, 3405; 2148, 3478; 2163, 3493; 2180, 3509; 2203, 3532; |
| | | 2204, 3533; 2242, 3570; 2380, 3702; 2392, 3714; 2441, 3754; 2455, |
| | | 3767; |
| 170 | 8, 851, 007 | 1199, 2568; 1232, 2601; 1337, 2703; 1467, 2827; 1715, 3066; 1988, |
| | | 3327; 2037, 3374; 2051, 3388; 2300, 3626; 2306, 3632; 2429, No_Pept; |
| 171 | 522 | 1141, 2510; 1181, 2550; 1184, 2553; 1190, 2559; 1219, 2588; 1263, |
| | | 2632; 1345, 2709; 1389, 2752; 1403, 2765; 1451, 2811; 1467, 2827; |
| | | 1468, 2828; 1491, 2847; 1546, 2901; 1665, 3018; 1874, 3222; 2037, |
| | | 3374; 2051, 3388; 2078, 3413; 2080, 3415; 2136, 3467; 2159, 3489; |
| | | 2174, 3503; 2215, 3543; 2229, 3557; 2232, 3560; 2306, 3632; |
| | | 2368, 3693; 2440, 3753; 2031, No_Pept; 2429, No_Pept; |
| 172 | 889 | 1141, 2510; 1181, 2550; 1184, 2553; 1190, 2559; 1194, 2563; 1219, |
| | | 2588; 1263, 2632; 1271, 2640; 1323, 2689; 1345, 2709; 1389, 2752; |
| | | 1392, 2755; 1403, 2765; 1451, 2811; 1467, 2827; 1468, 2828; 1491, |
| | | 2847; 1544, 2899; 1546, 2901; 1665, 3018; 1671, 3023; 1817, 3166; |
| | | 1874, 3222; 1988, 3327; 2021, 3359; 2022, 3360; 2037, 3374; |
| | | 2051, 3388; 2078, 3413; 2080, 3415; 2136, 3467; 2159, 3489; 2174, |
| | | 3503; 2215, 3543; 2229, 3557; 2232, 3560; 2306, 3632; 2368, 3693; |
| | | 2391, 3713; 2440, 3753; 2031, No_Pept; 2429, No_Pept; |
| 173 | 1067 | 1275, 2644; 1933, 3278; 2247, 3575; 2286, 3613; |
| 174 | 962 | 1275, 2644; 1409, 2771; 1421, 2782; 1431, 2792; 1432, 2793; 1933, |
| | | 3278; 2069, 3404; |
| 175 | 963, 964 | 1275, 2644; 1409, 2771; 1431, 2792; 1432, 2793; 1933, 3278; 2069, |
| | | 3404; 2431, 3744; |
| 176 | 972 | 2222, 3550; 2264, 3592; |
| 177 | 575, 971 | 2066, 3401; 2222, 3550; 2264, 3592; 2481, 3793; |
| 178 | 305, 769 | 2264, 3592; |
| 179 | 541 | 1252, 2621; 1302, 2670; 1444, 2805; 1578, 2933; 1729, 3080; 1886, |
| | | 3234; 1906, 3251; 2029, 3367; 2088, 3423; 2195, 3524; 2258, 3586; |
| | | 2259, 3587; 2453, 3765; |
| 180 | 294 | |
| 181 | 1006 | |
| 182 | 818 | 1737, 3088; |
| 183 | 272, 664 | |
| 184 | 216 | 1505, 2861; 1629, 2983; 1753, 3103; 1768, 3118; 2116, 3447; 2298, |
| | | 3624; 2300, 3626; 2344, 3670; 2424, No_Pept; |
| 185 | 1125 | 1858, 3206; |
| 186 | 543 | 1152, 2521; 1483, 2839; 1507, 2863; 2038, 3375; 2118, 3449; 2446, |
| | | 3759; |
| 187 | 1124 | 1483, 2839; 1656, 3009; 1851, 3199; 1858, 3206; 2118, 3449; |
| 188 | 210 | 1274, 2643; 1483, 2839; 2038, 3375; 2118, 3449; 2238, 3566; |
| 189 | 998 | 1310, 2678; 1555, 2910; 1556, 2911; 1581, 2936; 1657, 3010; 2421, |
| | | 3738; |
| 190 | 6, 277, 308, 301, 004 | 1872, 3220; 1953, 3297; 1961, 3304; 2155, 3485; |
| 191 | 991, 992 | 1973, 3314; |
| 192 | 1104 | |
| 193 | 1071 | 1230, 2599; 1657, 3010; 1864, 3212; |
| 194 | 619 | 1230, 2599; 1657, 3010; |
| 195 | 999 | 1230, 2599; 1657, 3010; |
| 196 | 468 | |
| 197 | 766 | |

TABLE 2
Trait values for microRNA targets and associated traits

| Target | Target | | | | |
|---|---|---|---|---|---|
| Gene | Gene | | | Relative | |
| DNA | Peptide | | Relative | Nitro- | Relative |
| SEQ | SEQ ID | Relevant Traits for | Drought | gen | Yield |
| ID No: | No: | miRNA Targets | Value | Value | Value |
| 1128 | 2497 | Drought-Nitrogen-Yield | 0.745 | 1.000 | 1.000 |
| 1130 | 2499 | Drought-Nitrogen-Yield | 0.745 | 1.000 | 1.000 |
| 1136 | 2505 | Drought-Nitrogen-Yield | 0.780 | 0.517 | 0.757 |
| 1138 | 2507 | Drought-Nitrogen-Yield | 0.555 | 0.654 | 0.979 |
| 1145 | 2514 | Drought-Nitrogen-Yield | 0.786 | 0.762 | 0.877 |
| 1147 | 2516 | Drought-Nitrogen-Yield | 1.000 | 0.763 | 0.784 |
| 1157 | 2526 | Drought-Nitrogen-Yield | 0.549 | 0.647 | 0.950 |
| 1161 | 2530 | Drought-Nitrogen-Yield | 0.923 | 0.621 | 0.678 |
| 1167 | 2536 | Drought-Nitrogen-Yield | 0.513 | 0.606 | 0.710 |
| 1173 | 2542 | Drought-Nitrogen-Yield | 0.688 | 0.830 | 0.716 |
| 1254 | 2623 | Drought-Nitrogen-Yield | 0.919 | 0.991 | 0.844 |
| 1265 | 2634 | Drought-Nitrogen-Yield | 0.726 | 0.554 | 0.651 |
| 1308 | 2676 | Drought-Nitrogen-Yield | 0.614 | 0.538 | 0.843 |
| 1342 | N.A. | Drought-Nitrogen-Yield | 0.481 | 0.609 | 0.699 |
| 1390 | 2753 | Drought-Nitrogen-Yield | 0.544 | 0.804 | 0.713 |
| 1471 | 2831 | Drought-Nitrogen-Yield | 0.522 | 0.591 | 0.668 |
| 1472 | 2832 | Drought-Nitrogen-Yield | 0.522 | 0.591 | 0.668 |
| 1533 | 2888 | Drought-Nitrogen-Yield | 0.504 | 0.618 | 0.678 |
| 1537 | 2892 | Drought-Nitrogen-Yield | 0.502 | 0.688 | 0.653 |
| 1540 | 2895 | Drought-Nitrogen-Yield | 0.502 | 0.618 | 0.773 |
| 1588 | 2943 | Drought-Nitrogen-Yield | 0.485 | 0.609 | 0.720 |
| 1592 | 2947 | Drought-Nitrogen-Yield | 0.483 | 0.609 | 0.699 |
| 1600 | 2955 | Drought-Nitrogen-Yield | 0.481 | 0.609 | 0.740 |
| 1605 | N.A. | Drought-Nitrogen-Yield | 0.481 | 0.609 | 0.699 |
| 1621 | 2975 | Drought-Nitrogen-Yield | 0.477 | 0.779 | 0.755 |
| 1703 | 3054 | Drought-Nitrogen-Yield | 0.461 | 0.541 | 0.659 |
| 1129 | 2498 | Drought-Nitrogen | 0.745 | 0.000 | 1.000 |
| 1132 | 2501 | Drought-Nitrogen | 0.745 | 0.435 | 1.000 |
| 1134 | 2503 | Drought-Nitrogen | 0.593 | 0.582 | 0.507 |
| 1155 | 2524 | Drought-Nitrogen | 0.645 | 0.500 | 0.543 |
| 1199 | 2568 | Drought-Nitrogen | 0.466 | 0.580 | 0.615 |
| 1233 | 2602 | Drought-Nitrogen | 0.548 | 0.676 | 0.614 |
| 1237 | 2606 | Drought-Nitrogen | 0.485 | 0.612 | 0.631 |
| 1244 | 2613 | Drought-Nitrogen | 0.546 | 0.615 | 0.534 |
| 1249 | 2618 | Drought-Nitrogen | 0.462 | 0.600 | 0.582 |
| 1260 | 2629 | Drought-Nitrogen | 0.810 | 0.545 | 0.594 |
| 1263 | 2632 | Drought-Nitrogen | 0.736 | 0.490 | 0.489 |
| 1271 | 2640 | Drought-Nitrogen | 0.701 | 0.499 | 0.515 |
| 1284 | 2652 | Drought-Nitrogen | 0.652 | 0.550 | 0.549 |
| 1292 | 2660 | Drought-Nitrogen | 0.639 | 0.599 | 0.576 |
| 1296 | 2664 | Drought-Nitrogen | 0.631 | 0.506 | 0.594 |
| 1317 | 2685 | Drought-Nitrogen | 0.601 | 0.771 | 0.350 |
| 1329 | 2695 | Drought-Nitrogen | 0.586 | 0.589 | 0.528 |
| 1356 | 2720 | Drought-Nitrogen | 0.570 | 0.618 | 0.604 |
| 1379 | 2742 | Drought-Nitrogen | 0.550 | 0.626 | 0.249 |
| 1389 | 2752 | Drought-Nitrogen | 0.545 | 0.618 | 0.631 |
| 1394 | 2757 | Drought-Nitrogen | 0.543 | 0.501 | 0.510 |
| 1396 | 2759 | Drought-Nitrogen | 0.540 | 0.620 | 0.410 |
| 1408 | 2770 | Drought-Nitrogen | 0.535 | 0.507 | 0.533 |
| 1419 | 2780 | Drought-Nitrogen | 0.532 | 0.490 | 0.422 |
| 1429 | 2790 | Drought-Nitrogen | 0.529 | 0.686 | 0.619 |
| 1434 | 2795 | Drought-Nitrogen | 0.528 | 0.601 | 0.000 |
| 1435 | 2796 | Drought-Nitrogen | 0.528 | 0.629 | 0.419 |
| 1436 | 2797 | Drought-Nitrogen | 0.528 | 0.591 | 0.618 |
| 1438 | 2799 | Drought-Nitrogen | 0.528 | 0.498 | 0.587 |
| 1441 | 2802 | Drought-Nitrogen | 0.527 | 0.574 | 0.387 |
| 1451 | 2811 | Drought-Nitrogen | 0.525 | 0.591 | 0.568 |
| 1454 | 2814 | Drought-Nitrogen | 0.523 | 0.723 | 0.583 |
| 1458 | 2818 | Drought-Nitrogen | 0.523 | 0.501 | 0.510 |
| 1459 | 2819 | Drought-Nitrogen | 0.523 | 0.501 | 0.510 |
| 1460 | 2820 | Drought-Nitrogen | 0.523 | 0.591 | 0.618 |
| 1462 | 2822 | Drought-Nitrogen | 0.523 | 0.649 | 0.348 |
| 1473 | 2833 | Drought-Nitrogen | 0.522 | 0.591 | 0.618 |
| 1474 | N.A. | Drought-Nitrogen | 0.522 | 0.591 | 0.568 |
| 1475 | N.A. | Drought-Nitrogen | 0.522 | 0.591 | 0.568 |
| 1476 | N.A. | Drought-Nitrogen | 0.522 | 0.591 | 0.568 |
| 1477 | N.A. | Drought-Nitrogen | 0.522 | 0.591 | 0.568 |
| 1478 | 2834 | Drought-Nitrogen | 0.522 | 0.591 | 0.568 |
| 1479 | 2835 | Drought-Nitrogen | 0.522 | 0.591 | 0.568 |
| 1480 | 2836 | Drought-Nitrogen | 0.522 | 0.591 | 0.568 |
| 1481 | 2837 | Drought-Nitrogen | 0.522 | 0.591 | 0.568 |
| 1486 | 2842 | Drought-Nitrogen | 0.520 | 0.499 | 0.578 |
| 1491 | 2847 | Drought-Nitrogen | 0.518 | 0.516 | 0.620 |
| 1493 | 2849 | Drought-Nitrogen | 0.517 | 0.995 | 0.576 |
| 1501 | 2857 | Drought-Nitrogen | 0.513 | 0.626 | 0.304 |
| 1529 | 2884 | Drought-Nitrogen | 0.505 | 0.609 | 0.630 |
| 1563 | 2918 | Drought-Nitrogen | 0.497 | 0.589 | 0.491 |
| 1581 | 2936 | Drought-Nitrogen | 0.489 | 0.167 | 1.000 |
| 1584 | 2939 | Drought-Nitrogen | 0.488 | 0.612 | 0.630 |
| 1587 | 2942 | Drought-Nitrogen | 0.486 | 0.590 | 0.458 |
| 1593 | 2948 | Drought-Nitrogen | 0.482 | 0.597 | 0.534 |
| 1599 | 2954 | Drought-Nitrogen | 0.481 | 0.517 | 0.432 |
| 1601 | 2956 | Drought-Nitrogen | 0.481 | 0.609 | 0.630 |
| 1602 | 2957 | Drought-Nitrogen | 0.481 | 0.609 | 0.630 |
| 1603 | 2958 | Drought-Nitrogen | 0.481 | 0.609 | 0.630 |
| 1604 | 2959 | Drought-Nitrogen | 0.481 | 0.609 | 0.630 |
| 1611 | 2965 | Drought-Nitrogen | 0.480 | 0.554 | 0.361 |
| 1612 | 2966 | Drought-Nitrogen | 0.480 | 0.554 | 0.361 |
| 1613 | 2967 | Drought-Nitrogen | 0.480 | 0.554 | 0.560 |
| 1629 | 2983 | Drought-Nitrogen | 0.475 | 0.498 | 0.532 |
| 1641 | 2995 | Drought-Nitrogen | 0.472 | 0.541 | 0.604 |
| 1642 | 2996 | Drought-Nitrogen | 0.472 | 0.585 | 0.387 |
| 1683 | 3035 | Drought-Nitrogen | 0.464 | 0.541 | 0.469 |
| 1685 | 3037 | Drought-Nitrogen | 0.464 | 0.801 | 0.354 |
| 1704 | 3055 | Drought-Nitrogen | 0.461 | 0.541 | 0.469 |
| 1707 | 3058 | Drought-Nitrogen | 0.460 | 0.656 | 0.446 |
| 1168 | 2537 | Nitrogen-Yield | 0.305 | 0.548 | 0.705 |
| 1178 | 2547 | Nitrogen-Yield | 0.354 | 0.500 | 0.841 |
| 1179 | 2548 | Nitrogen-Yield | 0.440 | 0.983 | 0.767 |
| 1185 | 2554 | Nitrogen-Yield | 0.295 | 0.597 | 0.679 |
| 1194 | 2563 | Nitrogen-Yield | 0.357 | 0.500 | 0.683 |
| 1220 | 2589 | Nitrogen-Yield | 0.325 | 0.505 | 0.645 |
| 1710 | 3061 | Nitrogen-Yield | 0.456 | 0.569 | 0.652 |
| 1716 | 3067 | Nitrogen-Yield | 0.452 | 0.668 | 0.649 |
| 1733 | 3084 | Nitrogen-Yield | 0.438 | 0.572 | 0.652 |
| 1738 | 3089 | Nitrogen-Yield | 0.434 | 0.569 | 0.652 |
| 1771 | 3121 | Nitrogen-Yield | 0.415 | 0.580 | 0.662 |
| 1784 | 3134 | Nitrogen-Yield | 0.399 | 0.738 | 0.646 |
| 1795 | 3145 | Nitrogen-Yield | 0.388 | 0.767 | 0.654 |
| 1807 | 3156 | Nitrogen-Yield | 0.385 | 0.813 | 0.691 |
| 1823 | 3172 | Nitrogen-Yield | 0.374 | 0.492 | 0.732 |
| 1872 | 3220 | Nitrogen-Yield | 0.353 | 0.570 | 0.681 |
| 1892 | 3239 | Nitrogen-Yield | 0.345 | 0.536 | 0.771 |
| 1926 | 3271 | Nitrogen-Yield | 0.328 | 0.607 | 0.723 |
| 1936 | 3281 | Nitrogen-Yield | 0.322 | 0.681 | 0.729 |
| 1937 | 3282 | Nitrogen-Yield | 0.322 | 0.501 | 0.670 |
| 1938 | 3283 | Nitrogen-Yield | 0.322 | 0.501 | 0.670 |
| 1942 | 3287 | Nitrogen-Yield | 0.321 | 0.554 | 0.743 |
| 1970 | 3311 | Nitrogen-Yield | 0.306 | 0.528 | 0.668 |
| 2001 | 3287 | Nitrogen-Yield | 0.298 | 0.545 | 0.743 |
| 2003 | 3341 | Nitrogen-Yield | 0.297 | 0.554 | 0.735 |
| 2006 | 3344 | Nitrogen-Yield | 0.296 | 0.530 | 0.694 |
| 2026 | 3364 | Nitrogen-Yield | 0.287 | 0.545 | 0.743 |
| 2074 | 3409 | Nitrogen-Yield | 0.274 | 0.596 | 0.650 |
| 2105 | 3438 | Nitrogen-Yield | 0.259 | 0.593 | 0.656 |
| 2109 | N.A. | Nitrogen-Yield | 0.256 | 0.580 | 0.723 |
| 2110 | N.A. | Nitrogen-Yield | 0.256 | 0.580 | 0.723 |
| 2130 | 3461 | Nitrogen-Yield | 0.244 | 0.833 | 0.800 |
| 2145 | 3476 | Nitrogen-Yield | 0.227 | 0.490 | 0.735 |
| 2152 | 3482 | Nitrogen-Yield | 0.220 | 0.515 | 0.723 |
| 2174 | 3503 | Nitrogen-Yield | 0.204 | 0.692 | 0.692 |
| 2175 | 3504 | Nitrogen-Yield | 0.204 | 0.692 | 0.692 |
| 2189 | 3518 | Nitrogen-Yield | 0.190 | 0.779 | 0.755 |
| 2192 | 3521 | Nitrogen-Yield | 0.188 | 0.704 | 0.701 |
| 2199 | 3528 | Nitrogen-Yield | 0.179 | 0.490 | 0.751 |
| 2200 | 3529 | Nitrogen-Yield | 0.179 | 0.490 | 0.751 |
| 2202 | 3531 | Nitrogen-Yield | 0.176 | 0.911 | 0.659 |
| 2240 | 3568 | Nitrogen-Yield | 0.125 | 0.603 | 0.657 |
| 2245 | 3573 | Nitrogen-Yield | 0.119 | 0.569 | 0.714 |
| 2246 | 3574 | Nitrogen-Yield | 0.119 | 0.569 | 0.779 |
| 2291 | 3618 | Nitrogen-Yield | 0.045 | 0.510 | 0.699 |
| 2299 | 3625 | Nitrogen-Yield | 0.043 | 0.600 | 0.657 |
| 2310 | 3636 | Nitrogen-Yield | 0.013 | 0.496 | 0.789 |
| 2313 | 3639 | Nitrogen-Yield | 0.013 | 0.589 | 0.684 |
| 2340 | 3666 | Nitrogen-Yield | 0.000 | 0.754 | 0.670 |
| 2341 | 3667 | Nitrogen-Yield | 0.000 | 0.754 | 0.670 |
| 2371 | 3696 | Nitrogen-Yield | 0.000 | 0.711 | 0.650 |
| 2412 | 3731 | Nitrogen-Yield | 0.000 | 0.600 | 0.657 |
| 2413 | 3732 | Nitrogen-Yield | 0.000 | 0.600 | 0.657 |
| 2414 | 3733 | Nitrogen-Yield | 0.000 | 0.791 | 0.665 |
| 2417 | 3734 | Nitrogen-Yield | 0.000 | 0.511 | 0.725 |
| 2429 | N.A. | Nitrogen-Yield | 0.000 | 0.688 | 0.645 |
| 2430 | 3743 | Nitrogen-Yield | 0.000 | 0.688 | 0.653 |
| 2431 | 3744 | Nitrogen-Yield | 0.000 | 0.688 | 0.653 |
| 2443 | 3756 | Nitrogen-Yield | 0.000 | 0.779 | 0.755 |
| 2468 | 3780 | Nitrogen-Yield | 0.000 | 0.517 | 0.710 |
| 1135 | 2504 | Drought-Yield | 0.591 | 0.321 | 0.798 |
| 1137 | 2506 | Drought-Yield | 0.566 | 0.353 | 0.891 |
| 1141 | 2510 | Drought-Yield | 0.549 | 0.000 | 0.658 |
| 1142 | 2511 | Drought-Yield | 0.716 | 0.430 | 0.829 |
| 1143 | 2512 | Drought-Yield | 0.661 | 0.000 | 0.924 |
| 1146 | 2515 | Drought-Yield | 0.598 | 0.407 | 0.667 |
| 1153 | 2522 | Drought-Yield | 0.663 | 0.212 | 0.909 |
| 1154 | 2523 | Drought-Yield | 0.674 | 0.183 | 0.686 |
| 1160 | 2529 | Drought-Yield | 0.569 | 0.280 | 0.775 |
| 1164 | 2533 | Drought-Yield | 0.635 | 0.400 | 0.770 |
| 1166 | 2535 | Drought-Yield | 0.470 | 0.299 | 0.656 |
| 1169 | 2538 | Drought-Yield | 0.556 | 0.300 | 0.872 |
| 1183 | 2552 | Drought-Yield | 0.642 | 0.365 | 0.783 |
| 1190 | 2559 | Drought-Yield | 0.544 | 0.212 | 0.813 |
| 1192 | 2561 | Drought-Yield | 0.477 | 0.444 | 0.837 |
| 1195 | 2564 | Drought-Yield | 0.522 | 0.200 | 0.724 |
| 1208 | 2577 | Drought-Yield | 0.555 | 0.319 | 0.812 |
| 1231 | 2600 | Drought-Yield | 0.479 | 0.273 | 0.743 |
| 1255 | 2624 | Drought-Yield | 0.919 | 0.000 | 0.686 |
| 1256 | 2625 | Drought-Yield | 0.919 | 0.407 | 0.688 |
| 1258 | 2627 | Drought-Yield | 0.846 | 0.338 | 0.734 |
| 1267 | 2636 | Drought-Yield | 0.712 | 0.122 | 0.662 |
| 1275 | 2644 | Drought-Yield | 0.693 | 0.000 | 0.689 |
| 1278 | 2646 | Drought-Yield | 0.691 | 0.000 | 0.729 |
| 1279 | 2647 | Drought-Yield | 0.681 | 0.301 | 0.763 |
| 1283 | 2651 | Drought-Yield | 0.652 | 0.167 | 0.725 |
| 1290 | 2658 | Drought-Yield | 0.644 | 0.363 | 0.654 |
| 1299 | 2667 | Drought-Yield | 0.630 | 0.000 | 0.696 |
| 1307 | 2675 | Drought-Yield | 0.617 | 0.401 | 0.656 |
| 1322 | 2688 | Drought-Yield | 0.597 | 0.287 | 0.659 |
| 1336 | 2702 | Drought-Yield | 0.581 | 0.228 | 0.746 |
| 1339 | 2705 | Drought-Yield | 0.579 | 0.255 | 0.675 |
| 1342 | N.A. | Drought-Yield | 0.525 | 0.280 | 0.672 |
| 1347 | 2711 | Drought-Yield | 0.575 | 0.378 | 0.898 |
| 1353 | 2717 | Drought-Yield | 0.572 | 0.000 | 0.750 |
| 1355 | 2719 | Drought-Yield | 0.571 | 0.441 | 0.669 |
| 1361 | 2725 | Drought-Yield | 0.565 | 0.468 | 0.674 |
| 1362 | 2726 | Drought-Yield | 0.564 | 0.359 | 0.883 |
| 1363 | 2727 | Drought-Yield | 0.563 | 0.000 | 0.765 |
| 1373 | N.A. | Drought-Yield | 0.555 | 0.000 | 0.697 |
| 1378 | 2741 | Drought-Yield | 0.550 | 0.347 | 0.776 |
| 1409 | 2771 | Drought-Yield | 0.534 | 0.280 | 0.673 |
| 1415 | 2776 | Drought-Yield | 0.532 | 0.285 | 0.752 |
| 1430 | 2791 | Drought-Yield | 0.529 | 0.320 | 0.672 |
| 1431 | 2792 | Drought-Yield | 0.528 | 0.280 | 0.672 |
| 1432 | 2793 | Drought-Yield | 0.528 | 0.280 | 0.672 |
| 1437 | 2798 | Drought-Yield | 0.528 | 0.416 | 0.769 |
| 1448 | N.A. | Drought-Yield | 0.525 | 0.280 | 0.672 |
| 1449 | 2809 | Drought-Yield | 0.525 | 0.280 | 0.672 |
| 1452 | 2812 | Drought-Yield | 0.525 | 0.301 | 0.706 |
| 1453 | 2813 | Drought-Yield | 0.524 | 0.368 | 0.683 |
| 1468 | 2828 | Drought-Yield | 0.522 | 0.378 | 0.699 |
| 1487 | 2843 | Drought-Yield | 0.520 | 0.301 | 0.706 |
| 1498 | 2854 | Drought-Yield | 0.514 | 0.475 | 0.688 |
| 1505 | 2861 | Drought-Yield | 0.511 | 0.000 | 0.800 |
| 1552 | 2907 | Drought-Yield | 0.500 | 0.281 | 0.697 |
| 1562 | 2917 | Drought-Yield | 0.498 | 0.000 | 0.843 |
| 1575 | 2930 | Drought-Yield | 0.492 | 0.000 | 0.813 |
| 1615 | 2969 | Drought-Yield | 0.479 | 0.278 | 0.723 |
| 1643 | 2997 | Drought-Yield | 0.471 | 0.167 | 0.644 |
| 1655 | 3008 | Drought-Yield | 0.469 | 0.361 | 0.844 |
| 1662 | 3015 | Drought-Yield | 0.468 | 0.200 | 0.692 |
| 1664 | 3017 | Drought-Yield | 0.467 | 0.000 | 0.769 |
| 1680 | 3032 | Drought-Yield | 0.465 | 0.159 | 0.662 |
| 1684 | 3036 | Drought-Yield | 0.464 | 0.180 | 0.715 |
| 1177 | 2546 | Nitrogen | 0.460 | 0.500 | 0.634 |
| 1180 | 2549 | Nitrogen | 0.454 | 0.743 | 0.468 |
| 1198 | 2567 | Nitrogen | 0.279 | 0.505 | 0.607 |
| 1206 | 2575 | Nitrogen | 0.153 | 0.504 | 0.310 |
| 1207 | 2576 | Nitrogen | 0.176 | 0.503 | 0.315 |
| 1216 | 2585 | Nitrogen | 0.410 | 0.983 | 0.318 |
| 1218 | 2587 | Nitrogen | 0.294 | 0.643 | 0.492 |
| 1234 | 2603 | Nitrogen | 0.296 | 0.685 | 0.511 |
| 1246 | 2615 | Nitrogen | 0.349 | 0.523 | 0.467 |
| 1342 | N.A. | Nitrogen | 0.305 | 0.548 | 0.507 |
| 1342 | N.A. | Nitrogen | 0.047 | 0.546 | 0.617 |
| 1342 | N.A. | Nitrogen | 0.045 | 0.529 | 0.456 |
| 1342 | N.A. | Nitrogen | 0.000 | 0.747 | 0.542 |
| 1541 | 2896 | Nitrogen | 0.361 | 0.578 | 0.387 |
| 1711 | 3062 | Nitrogen | 0.454 | 0.561 | 0.578 |
| 1715 | 3066 | Nitrogen | 0.453 | 0.580 | 0.615 |
| 1717 | 3068 | Nitrogen | 0.450 | 0.499 | 0.528 |
| 1720 | 3071 | Nitrogen | 0.448 | 0.501 | 0.491 |
| 1721 | 3072 | Nitrogen | 0.448 | 0.578 | 0.531 |
| 1722 | 3073 | Nitrogen | 0.447 | 0.698 | 0.492 |
| 1726 | 3077 | Nitrogen | 0.441 | 0.586 | 0.479 |
| 1727 | 3078 | Nitrogen | 0.441 | 0.541 | 0.629 |
| 1728 | 3079 | Nitrogen | 0.441 | 0.569 | 0.474 |
| 1731 | 3082 | Nitrogen | 0.439 | 0.741 | 0.595 |
| 1734 | 3085 | Nitrogen | 0.437 | 0.513 | 0.555 |
| 1737 | 3088 | Nitrogen | 0.435 | 0.595 | 0.577 |
| 1739 | N.A. | Nitrogen | 0.434 | 0.569 | 0.474 |
| 1740 | 3090 | Nitrogen | 0.434 | 0.569 | 0.474 |
| 1741 | 3091 | Nitrogen | 0.434 | 0.569 | 0.474 |
| 1742 | 3092 | Nitrogen | 0.432 | 0.540 | 0.383 |
| 1745 | 3095 | Nitrogen | 0.430 | 0.623 | 0.535 |
| 1752 | 3102 | Nitrogen | 0.426 | 0.513 | 0.489 |
| 1753 | 3103 | Nitrogen | 0.425 | 0.710 | 0.469 |
| 1757 | 3107 | Nitrogen | 0.424 | 0.498 | 0.532 |
| 1759 | 3109 | Nitrogen | 0.422 | 0.498 | 0.532 |
| 1760 | 3110 | Nitrogen | 0.422 | 0.498 | 0.468 |
| 1761 | 3111 | Nitrogen | 0.421 | 0.676 | 0.445 |
| 1763 | 3113 | Nitrogen | 0.420 | 0.858 | 0.413 |
| 1764 | 3114 | Nitrogen | 0.419 | 0.498 | 0.555 |
| 1765 | 3115 | Nitrogen | 0.419 | 0.498 | 0.555 |
| 1766 | 3116 | Nitrogen | 0.419 | 0.498 | 0.555 |
| 1767 | 3117 | Nitrogen | 0.419 | 0.498 | 0.555 |
| 1775 | 3125 | Nitrogen | 0.408 | 0.738 | 0.595 |
| 1777 | 3127 | Nitrogen | 0.404 | 0.576 | 0.510 |
| 1778 | 3128 | Nitrogen | 0.404 | 0.576 | 0.510 |
| 1781 | 3131 | Nitrogen | 0.401 | 0.580 | 0.321 |
| 1783 | 3133 | Nitrogen | 0.399 | 0.738 | 0.595 |
| 1785 | 3135 | Nitrogen | 0.399 | 0.508 | 0.411 |
| 1786 | 3136 | Nitrogen | 0.398 | 0.504 | 0.514 |
| 1808 | 3157 | Nitrogen | 0.384 | 0.593 | 0.540 |
| 1809 | 3158 | Nitrogen | 0.384 | 0.768 | 0.304 |
| 1810 | 3159 | Nitrogen | 0.384 | 0.673 | 0.539 |
| 1812 | 3161 | Nitrogen | 0.381 | 0.706 | 0.380 |
| 1813 | 3162 | Nitrogen | 0.379 | 0.764 | 0.304 |
| 1814 | 3163 | Nitrogen | 0.378 | 0.556 | 0.491 |
| 1815 | 3164 | Nitrogen | 0.378 | 0.511 | 0.551 |
| 1820 | 3169 | Nitrogen | 0.375 | 0.677 | 0.447 |
| 1825 | 3174 | Nitrogen | 0.373 | 0.545 | 0.456 |
| 1826 | 3175 | Nitrogen | 0.371 | 0.589 | 0.462 |
| 1827 | 3176 | Nitrogen | 0.371 | 0.514 | 0.348 |
| 1832 | 3180 | Nitrogen | 0.370 | 0.511 | 0.363 |
| 1833 | 3181 | Nitrogen | 0.369 | 0.595 | 0.473 |
| 1834 | 3182 | Nitrogen | 0.369 | 0.537 | 0.411 |
| 1836 | 3184 | Nitrogen | 0.366 | 0.512 | 0.491 |
| 1842 | 3190 | Nitrogen | 0.362 | 0.608 | 0.597 |
| 1843 | 3191 | Nitrogen | 0.361 | 0.570 | 0.473 |
| 1844 | 3192 | Nitrogen | 0.361 | 0.548 | 0.507 |
| 1845 | 3193 | Nitrogen | 0.361 | 0.489 | 0.479 |
| 1847 | 3195 | Nitrogen | 0.360 | 0.541 | 0.451 |
| 1848 | 3196 | Nitrogen | 0.359 | 0.548 | 0.507 |
| 1852 | 3200 | Nitrogen | 0.358 | 0.525 | 0.442 |
| 1857 | 3205 | Nitrogen | 0.355 | 0.489 | 0.458 |
| 1858 | 3206 | Nitrogen | 0.355 | 0.489 | 0.456 |
| 1859 | 3207 | Nitrogen | 0.355 | 0.489 | 0.553 |
| 1860 | 3208 | Nitrogen | 0.355 | 0.489 | 0.456 |
| 1861 | 3209 | Nitrogen | 0.355 | 0.489 | 0.456 |
| 1862 | 3210 | Nitrogen | 0.355 | 0.489 | 0.456 |
| 1863 | 3211 | Nitrogen | 0.355 | 0.489 | 0.456 |
| 1866 | 3214 | Nitrogen | 0.354 | 0.529 | 0.456 |
| 1867 | 3215 | Nitrogen | 0.354 | 0.490 | 0.529 |
| 1868 | 3216 | Nitrogen | 0.353 | 0.567 | 0.514 |
| 1871 | 3219 | Nitrogen | 0.353 | 0.608 | 0.479 |
| 1873 | 3221 | Nitrogen | 0.352 | 0.514 | 0.470 |
| 1874 | 3222 | Nitrogen | 0.351 | 0.492 | 0.411 |
| 1880 | 3228 | Nitrogen | 0.348 | 0.568 | 0.417 |
| 1881 | 3229 | Nitrogen | 0.348 | 0.490 | 0.631 |
| 1882 | 3230 | Nitrogen | 0.345 | 0.636 | 0.481 |
| 1884 | 3232 | Nitrogen | 0.345 | 0.501 | 0.547 |
| 1888 | 3235 | Nitrogen | 0.345 | 0.570 | 0.473 |
| 1889 | 3236 | Nitrogen | 0.345 | 0.570 | 0.473 |
| 1890 | 3237 | Nitrogen | 0.345 | 0.570 | 0.473 |
| 1893 | 3240 | Nitrogen | 0.345 | 0.536 | 0.435 |
| 1894 | N.A. | Nitrogen | 0.345 | 0.574 | 0.572 |
| 1895 | N.A. | Nitrogen | 0.345 | 0.574 | 0.572 |
| 1896 | 3241 | Nitrogen | 0.345 | 0.574 | 0.560 |
| 1897 | 3242 | Nitrogen | 0.345 | 0.574 | 0.387 |
| 1898 | 3243 | Nitrogen | 0.345 | 0.574 | 0.387 |
| 1899 | 3244 | Nitrogen | 0.344 | 0.589 | 0.492 |
| 1901 | 3246 | Nitrogen | 0.343 | 0.576 | 0.459 |
| 1903 | 3248 | Nitrogen | 0.340 | 0.495 | 0.438 |
| 1911 | 3256 | Nitrogen | 0.336 | 0.498 | 0.555 |
| 1913 | 3258 | Nitrogen | 0.335 | 0.523 | 0.627 |
| 1914 | 3259 | Nitrogen | 0.334 | 0.841 | 0.271 |
| 1915 | 3260 | Nitrogen | 0.334 | 0.592 | 0.573 |
| 1916 | 3261 | Nitrogen | 0.334 | 0.592 | 0.573 |
| 1923 | 3268 | Nitrogen | 0.332 | 0.540 | 0.318 |
| 1924 | 3269 | Nitrogen | 0.332 | 0.545 | 0.344 |
| 1929 | 3274 | Nitrogen | 0.326 | 0.490 | 0.529 |
| 1930 | 3275 | Nitrogen | 0.326 | 0.490 | 0.507 |
| 1931 | 3276 | Nitrogen | 0.326 | 0.490 | 0.509 |
| 1933 | 3278 | Nitrogen | 0.325 | 0.552 | 0.507 |
| 1939 | 3284 | Nitrogen | 0.322 | 0.501 | 0.547 |
| 1940 | 3285 | Nitrogen | 0.322 | 0.501 | 0.547 |
| 1941 | 3286 | Nitrogen | 0.322 | 0.501 | 0.547 |
| 1945 | 3290 | Nitrogen | 0.320 | 0.493 | 0.379 |
| 1949 | 3293 | Nitrogen | 0.316 | 0.492 | 0.278 |
| 1952 | 3296 | Nitrogen | 0.316 | 0.664 | 0.575 |
| 1954 | 3298 | Nitrogen | 0.315 | 0.548 | 0.451 |
| 1955 | 3299 | Nitrogen | 0.315 | 0.541 | 0.451 |
| 1956 | 3300 | Nitrogen | 0.315 | 0.541 | 0.451 |
| 1958 | 3302 | Nitrogen | 0.312 | 0.574 | 0.402 |
| 1961 | 3304 | Nitrogen | 0.311 | 0.671 | 0.502 |
| 1966 | 3309 | Nitrogen | 0.308 | 0.841 | 0.420 |
| 1969 | N.A. | Nitrogen | 0.306 | 0.528 | 0.328 |
| 1971 | 3312 | Nitrogen | 0.306 | 0.528 | 0.384 |
| 1976 | N.A. | Nitrogen | 0.305 | 0.548 | 0.507 |
| 1977 | 3317 | Nitrogen | 0.305 | 0.548 | 0.507 |
| 1978 | N.A. | Nitrogen | 0.305 | 0.548 | 0.507 |
| 1979 | 3318 | Nitrogen | 0.305 | 0.548 | 0.507 |
| 1980 | 3319 | Nitrogen | 0.305 | 0.548 | 0.507 |
| 1981 | 3320 | Nitrogen | 0.305 | 0.548 | 0.519 |
| 1982 | 3321 | Nitrogen | 0.305 | 0.589 | 0.492 |
| 1983 | 3322 | Nitrogen | 0.305 | 0.589 | 0.492 |
| 1990 | 3329 | Nitrogen | 0.301 | 0.495 | 0.361 |
| 1991 | 3330 | Nitrogen | 0.301 | 0.827 | 0.425 |
| 1999 | 3338 | Nitrogen | 0.300 | 0.493 | 0.619 |
| 2000 | 3339 | Nitrogen | 0.299 | 0.592 | 0.539 |
| 2002 | 3340 | Nitrogen | 0.297 | 0.523 | 0.552 |
| 2004 | 3342 | Nitrogen | 0.296 | 0.535 | 0.318 |
| 2005 | 3343 | Nitrogen | 0.296 | 0.723 | 0.529 |
| 2007 | 3345 | Nitrogen | 0.296 | 0.496 | 0.561 |
| 2009 | 3347 | Nitrogen | 0.296 | 0.749 | 0.338 |
| 2014 | 3352 | Nitrogen | 0.294 | 0.580 | 0.327 |
| 2023 | 3361 | Nitrogen | 0.287 | 0.554 | 0.375 |
| 2025 | 3363 | Nitrogen | 0.287 | 0.701 | 0.399 |
| 2027 | 3365 | Nitrogen | 0.287 | 0.545 | 0.344 |
| 2028 | 3366 | Nitrogen | 0.287 | 0.545 | 0.594 |
| 2029 | 3367 | Nitrogen | 0.287 | 0.545 | 0.456 |
| 2029 | 3367 | Nitrogen | 0.287 | 0.545 | 0.456 |
| 2030 | 3368 | Nitrogen | 0.287 | 0.545 | 0.456 |
| 2031 | N.A. | Nitrogen | 0.287 | 0.545 | 0.344 |
| 2032 | 3369 | Nitrogen | 0.287 | 0.545 | 0.344 |
| 2033 | 3370 | Nitrogen | 0.287 | 0.669 | 0.533 |
| 2035 | 3372 | Nitrogen | 0.287 | 0.678 | 0.427 |
| 2038 | 3375 | Nitrogen | 0.286 | 0.493 | 0.318 |
| 2041 | 3378 | Nitrogen | 0.285 | 0.733 | 0.376 |
| 2042 | 3379 | Nitrogen | 0.285 | 0.733 | 0.376 |
| 2053 | 3389 | Nitrogen | 0.284 | 0.495 | 0.450 |
| 2066 | 3401 | Nitrogen | 0.278 | 0.593 | 0.414 |
| 2067 | 3402 | Nitrogen | 0.278 | 0.559 | 0.289 |
| 2068 | 3403 | Nitrogen | 0.276 | 0.498 | 0.547 |
| 2081 | 3416 | Nitrogen | 0.273 | 0.523 | 0.552 |
| 2082 | 3417 | Nitrogen | 0.273 | 0.523 | 0.466 |
| 2083 | 3418 | Nitrogen | 0.273 | 0.523 | 0.466 |
| 2084 | 3419 | Nitrogen | 0.273 | 0.518 | 0.466 |
| 2088 | 3423 | Nitrogen | 0.270 | 0.580 | 0.321 |
| 2091 | 3426 | Nitrogen | 0.270 | 0.586 | 0.591 |
| 2092 | 3427 | Nitrogen | 0.270 | 0.490 | 0.627 |
| 2093 | 3428 | Nitrogen | 0.269 | 0.532 | 0.000 |
| 2094 | 3429 | Nitrogen | 0.268 | 0.541 | 0.405 |
| 2099 | 3432 | Nitrogen | 0.260 | 0.747 | 0.494 |
| 2100 | 3433 | Nitrogen | 0.260 | 0.685 | 0.557 |
| 2101 | 3434 | Nitrogen | 0.259 | 0.490 | 0.498 |
| 2108 | 3441 | Nitrogen | 0.256 | 0.841 | 0.337 |
| 2111 | 3442 | Nitrogen | 0.256 | 0.582 | 0.335 |
| 2112 | 3443 | Nitrogen | 0.253 | 0.621 | 0.408 |
| 2117 | 3448 | Nitrogen | 0.252 | 0.701 | 0.478 |
| 2118 | 3449 | Nitrogen | 0.251 | 0.546 | 0.428 |
| 2119 | 3450 | Nitrogen | 0.250 | 0.502 | 0.561 |
| 2120 | 3451 | Nitrogen | 0.249 | 0.537 | 0.378 |
| 2126 | 3457 | Nitrogen | 0.246 | 0.563 | 0.289 |
| 2127 | 3458 | Nitrogen | 0.245 | 0.490 | 0.627 |
| 2134 | 3465 | Nitrogen | 0.242 | 0.542 | 0.571 |
| 2135 | 3466 | Nitrogen | 0.239 | 0.515 | 0.318 |
| 2136 | 3467 | Nitrogen | 0.238 | 0.644 | 0.506 |
| 2142 | 3473 | Nitrogen | 0.235 | 0.583 | 0.390 |
| 2151 | 3481 | Nitrogen | 0.220 | 0.513 | 0.318 |
| 2157 | 3487 | Nitrogen | 0.219 | 0.753 | 0.431 |
| 2162 | 3492 | Nitrogen | 0.213 | 0.781 | 0.478 |
| 2163 | 3493 | Nitrogen | 0.211 | 0.493 | 0.411 |
| 2166 | 3496 | Nitrogen | 0.210 | 0.490 | 0.487 |
| 2170 | 3499 | Nitrogen | 0.205 | 0.522 | 0.478 |
| 2176 | 3505 | Nitrogen | 0.204 | 0.559 | 0.558 |
| 2177 | 3506 | Nitrogen | 0.204 | 0.559 | 0.558 |
| 2178 | 3507 | Nitrogen | 0.204 | 0.559 | 0.289 |
| 2179 | 3508 | Nitrogen | 0.204 | 0.559 | 0.289 |
| 2193 | 3522 | Nitrogen | 0.184 | 0.659 | 0.376 |
| 2194 | 3523 | Nitrogen | 0.180 | 0.520 | 0.443 |
| 2195 | 3524 | Nitrogen | 0.180 | 0.532 | 0.000 |
| 2196 | 3525 | Nitrogen | 0.179 | 0.490 | 0.627 |
| 2197 | 3526 | Nitrogen | 0.179 | 0.490 | 0.498 |
| 2198 | 3527 | Nitrogen | 0.179 | 0.490 | 0.487 |
| 2205 | 3534 | Nitrogen | 0.173 | 0.604 | 0.362 |
| 2209 | 3537 | Nitrogen | 0.164 | 0.830 | 0.523 |
| 2210 | 3538 | Nitrogen | 0.163 | 0.605 | 0.477 |
| 2211 | 3539 | Nitrogen | 0.160 | 0.702 | 0.420 |
| 2213 | 3541 | Nitrogen | 0.160 | 0.589 | 0.630 |
| 2217 | 3545 | Nitrogen | 0.153 | 0.534 | 0.305 |
| 2223 | 3551 | Nitrogen | 0.146 | 0.565 | 0.465 |
| 2224 | 3552 | Nitrogen | 0.146 | 0.532 | 0.000 |
| 2230 | 3558 | Nitrogen | 0.144 | 0.589 | 0.574 |
| 2236 | 3564 | Nitrogen | 0.132 | 0.674 | 0.526 |
| 2238 | 3566 | Nitrogen | 0.129 | 0.617 | 0.560 |
| 2241 | 3569 | Nitrogen | 0.125 | 0.518 | 0.605 |
| 2243 | 3571 | Nitrogen | 0.125 | 0.498 | 0.479 |
| 2247 | 3575 | Nitrogen | 0.114 | 0.510 | 0.442 |
| 2248 | 3576 | Nitrogen | 0.111 | 0.504 | 0.308 |
| 2249 | 3577 | Nitrogen | 0.111 | 0.509 | 0.478 |
| 2250 | 3578 | Nitrogen | 0.111 | 0.509 | 0.478 |
| 2251 | 3579 | Nitrogen | 0.108 | 0.530 | 0.374 |
| 2253 | 3581 | Nitrogen | 0.105 | 0.793 | 0.147 |
| 2254 | 3582 | Nitrogen | 0.105 | 0.582 | 0.507 |
| 2262 | 3590 | Nitrogen | 0.094 | 0.771 | 0.174 |
| 2270 | 3598 | Nitrogen | 0.086 | 0.549 | 0.395 |
| 2273 | 3601 | Nitrogen | 0.047 | 0.507 | 0.404 |
| 2275 | 3603 | Nitrogen | 0.047 | 0.546 | 0.536 |
| 2276 | 3604 | Nitrogen | 0.047 | 0.568 | 0.536 |
| 2279 | 3607 | Nitrogen | 0.047 | 0.805 | 0.474 |
| 2283 | 3610 | Nitrogen | 0.047 | 0.509 | 0.630 |
| 2284 | 3611 | Nitrogen | 0.047 | 0.509 | 0.478 |
| 2286 | 3613 | Nitrogen | 0.047 | 0.643 | 0.243 |
| 2287 | 3614 | Nitrogen | 0.045 | 0.592 | 0.496 |
| 2289 | 3616 | Nitrogen | 0.045 | 0.510 | 0.442 |
| 2290 | 3617 | Nitrogen | 0.045 | 0.510 | 0.442 |
| 2292 | 3619 | Nitrogen | 0.045 | 0.510 | 0.442 |
| 2293 | N.A. | Nitrogen | 0.045 | 0.529 | 0.456 |
| 2294 | 3620 | Nitrogen | 0.045 | 0.529 | 0.456 |
| 2295 | 3621 | Nitrogen | 0.045 | 0.529 | 0.456 |
| 2296 | 3622 | Nitrogen | 0.043 | 0.504 | 0.386 |
| 2300 | 3626 | Nitrogen | 0.043 | 0.668 | 0.386 |
| 2301 | 3627 | Nitrogen | 0.043 | 0.496 | 0.612 |
| 2303 | 3629 | Nitrogen | 0.043 | 0.589 | 0.295 |
| 2305 | 3631 | Nitrogen | 0.021 | 0.911 | 0.436 |
| 2307 | 3633 | Nitrogen | 0.021 | 0.589 | 0.345 |
| 2308 | 3634 | Nitrogen | 0.013 | 0.530 | 0.374 |
| 2309 | 3635 | Nitrogen | 0.013 | 0.496 | 0.428 |
| 2314 | 3640 | Nitrogen | 0.000 | 0.673 | 0.147 |
| 2315 | 3641 | Nitrogen | 0.000 | 0.712 | 0.636 |
| 2316 | 3642 | Nitrogen | 0.000 | 0.692 | 0.560 |
| 2320 | 3646 | Nitrogen | 0.000 | 0.496 | 0.443 |
| 2321 | 3647 | Nitrogen | 0.000 | 0.496 | 0.443 |
| 2322 | 3648 | Nitrogen | 0.000 | 0.496 | 0.514 |
| 2324 | 3650 | Nitrogen | 0.000 | 0.814 | 0.335 |
| 2325 | 3651 | Nitrogen | 0.000 | 0.589 | 0.434 |
| 2327 | 3653 | Nitrogen | 0.000 | 0.579 | 0.564 |
| 2328 | 3654 | Nitrogen | 0.000 | 0.634 | 0.377 |
| 2329 | 3655 | Nitrogen | 0.000 | 0.858 | 0.000 |
| 2330 | 3656 | Nitrogen | 0.000 | 0.549 | 0.000 |
| 2331 | 3657 | Nitrogen | 0.000 | 0.825 | 0.000 |
| 2343 | 3669 | Nitrogen | 0.000 | 0.530 | 0.374 |
| 2344 | 3670 | Nitrogen | 0.000 | 0.530 | 0.374 |
| 2345 | 3671 | Nitrogen | 0.000 | 0.530 | 0.374 |
| 2346 | 3672 | Nitrogen | 0.000 | 0.530 | 0.636 |
| 2347 | 3673 | Nitrogen | 0.000 | 0.530 | 0.374 |
| 2348 | 3674 | Nitrogen | 0.000 | 0.851 | 0.528 |
| 2352 | 3677 | Nitrogen | 0.000 | 0.692 | 0.560 |
| 2353 | 3678 | Nitrogen | 0.000 | 0.692 | 0.560 |
| 2355 | 3680 | Nitrogen | 0.000 | 0.770 | 0.481 |
| 2358 | 3683 | Nitrogen | 0.000 | 0.779 | 0.478 |
| 2360 | 3685 | Nitrogen | 0.000 | 0.606 | 0.147 |
| 2365 | 3690 | Nitrogen | 0.000 | 0.565 | 0.465 |
| 2366 | 3691 | Nitrogen | 0.000 | 0.565 | 0.465 |
| 2367 | 3692 | Nitrogen | 0.000 | 0.565 | 0.465 |
| 2368 | 3693 | Nitrogen | 0.000 | 0.571 | 0.578 |
| 2369 | 3694 | Nitrogen | 0.000 | 0.550 | 0.520 |
| 2370 | 3695 | Nitrogen | 0.000 | 0.550 | 0.520 |
| 2384 | 3706 | Nitrogen | 0.000 | 0.563 | 0.215 |
| 2385 | 3707 | Nitrogen | 0.000 | 0.713 | 0.554 |
| 2393 | 3715 | Nitrogen | 0.000 | 0.597 | 0.328 |
| 2394 | 3716 | Nitrogen | 0.000 | 0.597 | 0.328 |
| 2395 | 3717 | Nitrogen | 0.000 | 0.597 | 0.328 |
| 2415 | N.A. | Nitrogen | 0.000 | 0.668 | 0.383 |
| 2416 | N.A. | Nitrogen | 0.000 | 0.668 | 0.383 |
| 2418 | 3735 | Nitrogen | 0.000 | 0.542 | 0.517 |
| 2419 | 3736 | Nitrogen | 0.000 | 0.701 | 0.595 |
| 2420 | 3737 | Nitrogen | 0.000 | 0.582 | 0.507 |
| 2421 | 3738 | Nitrogen | 0.000 | 0.582 | 0.507 |
| 2422 | 3739 | Nitrogen | 0.000 | 0.496 | 0.562 |
| 2423 | N.A. | Nitrogen | 0.000 | 0.496 | 0.605 |
| 2424 | N.A. | Nitrogen | 0.000 | 0.496 | 0.605 |
| 2425 | N.A. | Nitrogen | 0.000 | 0.747 | 0.542 |
| 2427 | 3741 | Nitrogen | 0.000 | 0.634 | 0.398 |
| 2432 | 3745 | Nitrogen | 0.000 | 0.528 | 0.611 |
| 2433 | 3746 | Nitrogen | 0.000 | 0.583 | 0.437 |
| 2442 | 3755 | Nitrogen | 0.000 | 0.662 | 0.336 |
| 2442 | 3755 | Nitrogen | 0.000 | 0.662 | 0.336 |
| 2444 | 3757 | Nitrogen | 0.000 | 0.661 | 0.572 |
| 2446 | 3759 | Nitrogen | 0.000 | 0.858 | 0.304 |
| 2454 | 3766 | Nitrogen | 0.000 | 0.710 | 0.567 |
| 2455 | 3767 | Nitrogen | 0.000 | 0.522 | 0.478 |
| 2456 | 3768 | Nitrogen | 0.000 | 0.522 | 0.478 |
| 2457 | 3769 | Nitrogen | 0.000 | 0.522 | 0.478 |
| 2470 | 3782 | Nitrogen | 0.000 | 0.644 | 0.506 |
| 2471 | 3783 | Nitrogen | 0.000 | 0.644 | 0.506 |
| 2472 | 3784 | Nitrogen | 0.000 | 0.532 | 0.000 |
| 2473 | 3785 | Nitrogen | 0.000 | 0.532 | 0.000 |
| 2474 | 3786 | Nitrogen | 0.000 | 0.532 | 0.000 |
| 2475 | 3787 | Nitrogen | 0.000 | 0.532 | 0.000 |
| 2476 | 3788 | Nitrogen | 0.000 | 0.532 | 0.000 |
| 2492 | 3802 | Nitrogen | 0.000 | 0.589 | 0.574 |
| 2493 | 3803 | Nitrogen | 0.000 | 0.589 | 0.539 |
| 2494 | N.A. | Nitrogen | 0.000 | 0.589 | 0.539 |
| 2495 | 3804 | Nitrogen | 0.000 | 0.589 | 0.491 |
| 1127 | 2496 | Drought | 0.763 | 0.325 | 0.354 |
| 1131 | 2500 | Drought | 0.745 | 0.264 | 0.496 |
| 1133 | 2502 | Drought | 0.593 | 0.256 | 0.410 |
| 1139 | 2508 | Drought | 0.553 | 0.233 | 0.564 |
| 1140 | 2509 | Drought | 0.706 | 0.384 | 0.472 |
| 1144 | 2513 | Drought | 0.463 | 0.301 | 0.466 |
| 1148 | 2517 | Drought | 0.475 | 0.000 | 0.559 |
| 1150 | 2519 | Drought | 0.714 | 0.212 | 0.594 |
| 1151 | 2520 | Drought | 0.510 | 0.278 | 0.499 |
| 1158 | 2527 | Drought | 0.476 | 0.270 | 0.603 |
| 1175 | 2544 | Drought | 0.851 | 0.173 | 0.394 |
| 1176 | 2545 | Drought | 0.514 | 0.000 | 0.527 |
| 1184 | 2553 | Drought | 0.465 | 0.210 | 0.309 |
| 1188 | 2557 | Drought | 0.839 | 0.324 | 0.579 |
| 1201 | 2570 | Drought | 0.593 | 0.272 | 0.442 |
| 1202 | 2571 | Drought | 0.465 | 0.357 | 0.185 |
| 1205 | 2574 | Drought | 0.474 | 0.279 | 0.629 |
| 1209 | 2578 | Drought | 0.777 | 0.000 | 0.538 |
| 1213 | 2582 | Drought | 0.516 | 0.314 | 0.429 |
| 1221 | 2590 | Drought | 0.467 | 0.243 | 0.501 |
| 1222 | 2591 | Drought | 0.482 | 0.456 | 0.584 |
| 1223 | 2592 | Drought | 0.527 | 0.258 | 0.409 |
| 1224 | 2593 | Drought | 0.482 | 0.222 | 0.446 |
| 1227 | 2596 | Drought | 0.488 | 0.247 | 0.540 |
| 1228 | 2597 | Drought | 0.481 | 0.212 | 0.555 |
| 1232 | 2601 | Drought | 0.656 | 0.453 | 0.542 |
| 1236 | 2605 | Drought | 0.554 | 0.338 | 0.457 |
| 1238 | 2607 | Drought | 0.673 | 0.316 | 0.430 |
| 1239 | 2608 | Drought | 0.570 | 0.212 | 0.126 |
| 1240 | 2609 | Drought | 0.626 | 0.340 | 0.459 |
| 1243 | 2612 | Drought | 0.541 | 0.000 | 0.355 |
| 1247 | 2616 | Drought | 0.576 | 0.180 | 0.578 |
| 1251 | 2620 | Drought | 0.924 | 0.359 | 0.461 |
| 1252 | 2621 | Drought | 0.921 | 0.334 | 0.526 |
| 1253 | 2622 | Drought | 0.919 | 0.000 | 0.410 |
| 1257 | 2626 | Drought | 0.860 | 0.000 | 0.390 |
| 1259 | 2628 | Drought | 0.844 | 0.429 | 0.419 |
| 1261 | 2630 | Drought | 0.779 | 0.000 | 0.410 |
| 1262 | 2631 | Drought | 0.756 | 0.393 | 0.385 |
| 1264 | 2633 | Drought | 0.733 | 0.274 | 0.392 |
| 1266 | 2635 | Drought | 0.712 | 0.000 | 0.448 |
| 1268 | 2637 | Drought | 0.707 | 0.098 | 0.432 |
| 1269 | 2638 | Drought | 0.707 | 0.098 | 0.432 |
| 1270 | 2639 | Drought | 0.703 | 0.301 | 0.317 |
| 1272 | 2641 | Drought | 0.701 | 0.280 | 0.440 |
| 1273 | 2642 | Drought | 0.700 | 0.280 | 0.440 |
| 1274 | 2643 | Drought | 0.694 | 0.467 | 0.628 |
| 1276 | N.A. | Drought | 0.693 | 0.000 | 0.210 |
| 1277 | 2645 | Drought | 0.692 | 0.116 | 0.318 |
| 1280 | 2648 | Drought | 0.656 | 0.171 | 0.560 |
| 1281 | 2649 | Drought | 0.653 | 0.167 | 0.522 |
| 1282 | 2650 | Drought | 0.653 | 0.221 | 0.388 |
| 1285 | 2653 | Drought | 0.650 | 0.378 | 0.604 |
| 1286 | 2654 | Drought | 0.648 | 0.122 | 0.529 |
| 1287 | 2655 | Drought | 0.647 | 0.221 | 0.388 |
| 1288 | 2656 | Drought | 0.646 | 0.279 | 0.634 |
| 1289 | 2657 | Drought | 0.644 | 0.229 | 0.351 |
| 1291 | 2659 | Drought | 0.642 | 0.000 | 0.404 |
| 1293 | 2661 | Drought | 0.638 | 0.309 | 0.586 |
| 1294 | 2662 | Drought | 0.637 | 0.466 | 0.387 |
| 1295 | 2663 | Drought | 0.633 | 0.307 | 0.574 |
| 1297 | 2665 | Drought | 0.631 | 0.438 | 0.333 |
| 1298 | 2666 | Drought | 0.630 | 0.000 | 0.564 |
| 1300 | 2668 | Drought | 0.624 | 0.000 | 0.446 |
| 1301 | 2669 | Drought | 0.623 | 0.000 | 0.446 |
| 1302 | 2670 | Drought | 0.623 | 0.000 | 0.440 |
| 1303 | 2671 | Drought | 0.623 | 0.000 | 0.440 |
| 1304 | 2672 | Drought | 0.623 | 0.000 | 0.440 |
| 1305 | 2673 | Drought | 0.623 | 0.000 | 0.440 |
| 1306 | 2674 | Drought | 0.621 | 0.378 | 0.604 |
| 1309 | 2677 | Drought | 0.614 | 0.000 | 0.384 |
| 1310 | 2678 | Drought | 0.612 | 0.309 | 0.586 |
| 1311 | 2679 | Drought | 0.612 | 0.309 | 0.586 |
| 1312 | 2680 | Drought | 0.609 | 0.000 | 0.588 |
| 1313 | 2681 | Drought | 0.607 | 0.339 | 0.372 |
| 1314 | 2682 | Drought | 0.604 | 0.212 | 0.000 |
| 1315 | 2683 | Drought | 0.604 | 0.000 | 0.544 |
| 1316 | 2684 | Drought | 0.602 | 0.167 | 0.353 |
| 1318 | 2686 | Drought | 0.601 | 0.239 | 0.370 |
| 1319 | 2687 | Drought | 0.601 | 0.410 | 0.543 |
| 1320 | N.A. | Drought | 0.599 | 0.278 | 0.605 |
| 1321 | N.A. | Drought | 0.599 | 0.278 | 0.605 |
| 1323 | 2689 | Drought | 0.597 | 0.287 | 0.437 |
| 1324 | 2690 | Drought | 0.597 | 0.287 | 0.437 |
| 1325 | 2691 | Drought | 0.592 | 0.475 | 0.319 |
| 1326 | 2692 | Drought | 0.592 | 0.338 | 0.301 |
| 1327 | 2693 | Drought | 0.590 | 0.256 | 0.415 |
| 1328 | 2694 | Drought | 0.590 | 0.255 | 0.482 |
| 1330 | 2696 | Drought | 0.586 | 0.000 | 0.401 |
| 1331 | 2697 | Drought | 0.585 | 0.000 | 0.404 |
| 1332 | 2698 | Drought | 0.583 | 0.000 | 0.404 |
| 1333 | 2699 | Drought | 0.583 | 0.000 | 0.404 |
| 1334 | 2700 | Drought | 0.583 | 0.000 | 0.590 |
| 1335 | 2701 | Drought | 0.581 | 0.000 | 0.444 |
| 1337 | 2703 | Drought | 0.580 | 0.229 | 0.383 |
| 1338 | 2704 | Drought | 0.580 | 0.444 | 0.343 |
| 1340 | 2706 | Drought | 0.579 | 0.000 | 0.405 |
| 1341 | N.A. | Drought | 0.579 | 0.299 | 0.386 |
| 1342 | N.A. | Drought | 0.579 | 0.299 | 0.386 |
| 1342 | N.A. | Drought | 0.461 | 0.168 | 0.542 |
| 1343 | 2707 | Drought | 0.579 | 0.299 | 0.386 |
| 1344 | 2708 | Drought | 0.578 | 0.000 | 0.408 |
| 1345 | 2709 | Drought | 0.575 | 0.000 | 0.618 |
| 1346 | 2710 | Drought | 0.575 | 0.000 | 0.618 |
| 1348 | 2712 | Drought | 0.574 | 0.247 | 0.295 |
| 1349 | 2713 | Drought | 0.574 | 0.331 | 0.346 |
| 1350 | 2714 | Drought | 0.574 | 0.198 | 0.421 |
| 1351 | 2715 | Drought | 0.573 | 0.228 | 0.432 |
| 1352 | 2716 | Drought | 0.572 | 0.444 | 0.630 |
| 1354 | 2718 | Drought | 0.572 | 0.000 | 0.000 |
| 1357 | 2721 | Drought | 0.568 | 0.171 | 0.440 |
| 1358 | 2722 | Drought | 0.568 | 0.352 | 0.367 |
| 1359 | 2723 | Drought | 0.565 | 0.228 | 0.000 |
| 1360 | 2724 | Drought | 0.565 | 0.455 | 0.576 |
| 1364 | 2728 | Drought | 0.563 | 0.455 | 0.582 |
| 1365 | 2729 | Drought | 0.561 | 0.419 | 0.383 |
| 1366 | 2730 | Drought | 0.560 | 0.409 | 0.471 |
| 1367 | 2731 | Drought | 0.557 | 0.281 | 0.371 |
| 1368 | 2732 | Drought | 0.557 | 0.228 | 0.432 |
| 1369 | 2733 | Drought | 0.556 | 0.460 | 0.466 |
| 1369 | 2733 | Drought | 0.556 | 0.460 | 0.466 |
| 1369 | 2733 | Drought | 0.550 | 0.460 | 0.307 |
| 1370 | 2734 | Drought | 0.556 | 0.361 | 0.369 |
| 1371 | 2735 | Drought | 0.556 | 0.000 | 0.614 |
| 1372 | 2736 | Drought | 0.555 | 0.000 | 0.614 |
| 1374 | 2737 | Drought | 0.555 | 0.000 | 0.614 |
| 1375 | 2738 | Drought | 0.555 | 0.000 | 0.614 |
| 1376 | 2739 | Drought | 0.554 | 0.347 | 0.516 |
| 1377 | 2740 | Drought | 0.551 | 0.247 | 0.387 |
| 1380 | 2743 | Drought | 0.549 | 0.475 | 0.575 |
| 1381 | 2744 | Drought | 0.549 | 0.000 | 0.400 |
| 1382 | 2745 | Drought | 0.548 | 0.278 | 0.479 |
| 1383 | 2746 | Drought | 0.548 | 0.347 | 0.516 |
| 1384 | 2747 | Drought | 0.547 | 0.173 | 0.339 |
| 1385 | 2748 | Drought | 0.546 | 0.355 | 0.423 |
| 1386 | 2749 | Drought | 0.546 | 0.000 | 0.417 |
| 1387 | 2750 | Drought | 0.545 | 0.255 | 0.609 |
| 1388 | 2751 | Drought | 0.545 | 0.301 | 0.493 |
| 1391 | 2754 | Drought | 0.544 | 0.382 | 0.462 |
| 1392 | 2755 | Drought | 0.544 | 0.274 | 0.344 |
| 1393 | 2756 | Drought | 0.543 | 0.122 | 0.321 |
| 1395 | 2758 | Drought | 0.541 | 0.000 | 0.399 |
| 1397 | 2760 | Drought | 0.540 | 0.336 | 0.471 |
| 1398 | 2761 | Drought | 0.539 | 0.293 | 0.610 |
| 1399 | 2762 | Drought | 0.539 | 0.256 | 0.504 |
| 1400 | 2763 | Drought | 0.538 | 0.301 | 0.440 |
| 1401 | N.A. | Drought | 0.538 | 0.301 | 0.462 |
| 1402 | 2764 | Drought | 0.537 | 0.212 | 0.588 |
| 1403 | 2765 | Drought | 0.537 | 0.228 | 0.422 |
| 1404 | 2766 | Drought | 0.536 | 0.000 | 0.000 |
| 1405 | 2767 | Drought | 0.536 | 0.233 | 0.594 |
| 1406 | 2768 | Drought | 0.536 | 0.199 | 0.395 |
| 1407 | 2769 | Drought | 0.535 | 0.000 | 0.474 |
| 1410 | 2772 | Drought | 0.534 | 0.168 | 0.499 |
| 1411 | 2773 | Drought | 0.533 | 0.418 | 0.393 |
| 1412 | 2773 | Drought | 0.533 | 0.418 | 0.393 |
| 1413 | 2774 | Drought | 0.533 | 0.229 | 0.351 |
| 1414 | 2775 | Drought | 0.533 | 0.484 | 0.559 |
| 1416 | 2777 | Drought | 0.532 | 0.315 | 0.554 |
| 1417 | 2778 | Drought | 0.532 | 0.000 | 0.422 |
| 1418 | 2779 | Drought | 0.532 | 0.000 | 0.422 |
| 1420 | 2781 | Drought | 0.532 | 0.408 | 0.432 |
| 1421 | 2782 | Drought | 0.532 | 0.000 | 0.422 |
| 1422 | 2783 | Drought | 0.532 | 0.000 | 0.422 |
| 1423 | 2784 | Drought | 0.531 | 0.199 | 0.602 |
| 1424 | 2785 | Drought | 0.531 | 0.000 | 0.514 |
| 1425 | 2786 | Drought | 0.531 | 0.239 | 0.338 |
| 1426 | 2787 | Drought | 0.530 | 0.000 | 0.497 |
| 1427 | 2788 | Drought | 0.529 | 0.200 | 0.000 |
| 1428 | 2789 | Drought | 0.529 | 0.454 | 0.326 |
| 1433 | 2794 | Drought | 0.528 | 0.321 | 0.454 |
| 1439 | 2800 | Drought | 0.528 | 0.336 | 0.301 |
| 1440 | 2801 | Drought | 0.527 | 0.000 | 0.508 |
| 1442 | 2803 | Drought | 0.527 | 0.098 | 0.590 |
| 1443 | 2804 | Drought | 0.527 | 0.462 | 0.559 |
| 1444 | 2805 | Drought | 0.527 | 0.462 | 0.561 |
| 1445 | 2806 | Drought | 0.527 | 0.462 | 0.561 |
| 1446 | 2807 | Drought | 0.527 | 0.462 | 0.561 |
| 1447 | 2808 | Drought | 0.526 | 0.255 | 0.525 |
| 1450 | 2810 | Drought | 0.525 | 0.264 | 0.473 |
| 1455 | 2815 | Drought | 0.523 | 0.000 | 0.497 |
| 1456 | 2816 | Drought | 0.523 | 0.000 | 0.514 |
| 1457 | 2817 | Drought | 0.523 | 0.000 | 0.514 |
| 1461 | 2821 | Drought | 0.523 | 0.358 | 0.603 |
| 1463 | 2823 | Drought | 0.523 | 0.000 | 0.000 |
| 1464 | 2824 | Drought | 0.523 | 0.287 | 0.396 |
| 1465 | 2825 | Drought | 0.522 | 0.198 | 0.476 |
| 1466 | 2826 | Drought | 0.522 | 0.278 | 0.526 |
| 1467 | 2827 | Drought | 0.522 | 0.000 | 0.100 |
| 1469 | 2829 | Drought | 0.522 | 0.301 | 0.555 |
| 1470 | 2830 | Drought | 0.522 | 0.000 | 0.372 |
| 1482 | 2838 | Drought | 0.521 | 0.000 | 0.511 |
| 1483 | 2839 | Drought | 0.520 | 0.228 | 0.477 |
| 1484 | 2840 | Drought | 0.520 | 0.301 | 0.578 |
| 1485 | 2841 | Drought | 0.520 | 0.301 | 0.578 |
| 1488 | 2844 | Drought | 0.520 | 0.301 | 0.551 |
| 1489 | 2845 | Drought | 0.519 | 0.419 | 0.416 |
| 1490 | 2846 | Drought | 0.518 | 0.168 | 0.559 |
| 1492 | 2848 | Drought | 0.517 | 0.198 | 0.524 |
| 1494 | 2850 | Drought | 0.517 | 0.000 | 0.556 |
| 1495 | 2851 | Drought | 0.517 | 0.228 | 0.537 |
| 1496 | 2852 | Drought | 0.516 | 0.000 | 0.451 |
| 1497 | 2853 | Drought | 0.514 | 0.000 | 0.462 |
| 1499 | 2855 | Drought | 0.514 | 0.416 | 0.298 |
| 1500 | 2856 | Drought | 0.513 | 0.270 | 0.478 |
| 1502 | 2858 | Drought | 0.513 | 0.448 | 0.396 |
| 1503 | 2859 | Drought | 0.512 | 0.000 | 0.000 |
| 1504 | 2860 | Drought | 0.512 | 0.294 | 0.556 |
| 1506 | 2862 | Drought | 0.511 | 0.314 | 0.452 |
| 1507 | 2863 | Drought | 0.511 | 0.255 | 0.450 |
| 1508 | N.A. | Drought | 0.511 | 0.255 | 0.450 |
| 1509 | 2864 | Drought | 0.511 | 0.280 | 0.590 |
| 1510 | 2865 | Drought | 0.511 | 0.376 | 0.550 |
| 1511 | 2866 | Drought | 0.511 | 0.331 | 0.378 |
| 1512 | 2867 | Drought | 0.509 | 0.294 | 0.422 |
| 1513 | 2868 | Drought | 0.508 | 0.000 | 0.556 |
| 1514 | 2869 | Drought | 0.508 | 0.278 | 0.400 |
| 1515 | 2870 | Drought | 0.508 | 0.000 | 0.409 |
| 1516 | 2871 | Drought | 0.507 | 0.339 | 0.405 |
| 1517 | 2872 | Drought | 0.507 | 0.378 | 0.573 |
| 1518 | 2873 | Drought | 0.507 | 0.319 | 0.415 |
| 1519 | 2874 | Drought | 0.507 | 0.168 | 0.531 |
| 1520 | 2875 | Drought | 0.507 | 0.256 | 0.450 |
| 1521 | 2876 | Drought | 0.507 | 0.000 | 0.000 |
| 1522 | 2877 | Drought | 0.507 | 0.000 | 0.524 |
| 1523 | 2878 | Drought | 0.507 | 0.256 | 0.382 |
| 1524 | 2879 | Drought | 0.506 | 0.000 | 0.364 |
| 1525 | 2880 | Drought | 0.506 | 0.000 | 0.556 |
| 1526 | 2881 | Drought | 0.506 | 0.000 | 0.556 |
| 1527 | 2882 | Drought | 0.506 | 0.000 | 0.000 |
| 1528 | 2883 | Drought | 0.506 | 0.225 | 0.587 |
| 1530 | 2885 | Drought | 0.505 | 0.305 | 0.374 |
| 1531 | 2886 | Drought | 0.505 | 0.167 | 0.509 |
| 1532 | 2887 | Drought | 0.504 | 0.000 | 0.524 |
| 1534 | 2889 | Drought | 0.503 | 0.255 | 0.411 |
| 1535 | 2890 | Drought | 0.503 | 0.000 | 0.497 |
| 1536 | 2891 | Drought | 0.503 | 0.294 | 0.000 |
| 1538 | 2893 | Drought | 0.502 | 0.279 | 0.374 |
| 1539 | 2894 | Drought | 0.502 | 0.167 | 0.353 |
| 1541 | 2896 | Drought | 0.501 | 0.458 | 0.396 |
| 1542 | 2897 | Drought | 0.501 | 0.473 | 0.396 |
| 1543 | 2898 | Drought | 0.501 | 0.168 | 0.531 |
| 1544 | 2899 | Drought | 0.501 | 0.168 | 0.624 |
| 1545 | 2900 | Drought | 0.501 | 0.168 | 0.624 |
| 1546 | 2901 | Drought | 0.501 | 0.305 | 0.374 |
| 1547 | 2902 | Drought | 0.500 | 0.448 | 0.396 |
| 1548 | 2903 | Drought | 0.500 | 0.448 | 0.569 |
| 1549 | 2904 | Drought | 0.500 | 0.000 | 0.491 |
| 1550 | 2905 | Drought | 0.500 | 0.448 | 0.396 |
| 1551 | 2906 | Drought | 0.500 | 0.000 | 0.364 |
| 1553 | 2908 | Drought | 0.499 | 0.000 | 0.448 |
| 1554 | 2909 | Drought | 0.499 | 0.212 | 0.579 |
| 1555 | 2910 | Drought | 0.498 | 0.000 | 0.000 |
| 1556 | 2911 | Drought | 0.498 | 0.171 | 0.040 |
| 1557 | 2912 | Drought | 0.498 | 0.326 | 0.313 |
| 1558 | 2913 | Drought | 0.498 | 0.307 | 0.401 |
| 1559 | 2914 | Drought | 0.498 | 0.167 | 0.353 |
| 1560 | 2915 | Drought | 0.498 | 0.000 | 0.364 |
| 1561 | 2916 | Drought | 0.498 | 0.000 | 0.000 |
| 1564 | 2919 | Drought | 0.497 | 0.448 | 0.569 |
| 1565 | 2920 | Drought | 0.497 | 0.448 | 0.396 |
| 1566 | 2921 | Drought | 0.497 | 0.448 | 0.396 |
| 1567 | 2922 | Drought | 0.497 | 0.448 | 0.396 |
| 1568 | 2923 | Drought | 0.497 | 0.448 | 0.396 |
| 1569 | 2924 | Drought | 0.496 | 0.386 | 0.493 |
| 1570 | 2925 | Drought | 0.495 | 0.256 | 0.447 |
| 1571 | 2926 | Drought | 0.495 | 0.000 | 0.000 |
| 1572 | 2927 | Drought | 0.495 | 0.168 | 0.499 |
| 1573 | 2928 | Drought | 0.493 | 0.000 | 0.506 |
| 1574 | 2929 | Drought | 0.492 | 0.488 | 0.452 |
| 1575 | 2930 | Drought | 0.470 | 0.000 | 0.000 |
| 1576 | 2931 | Drought | 0.491 | 0.386 | 0.319 |
| 1577 | 2932 | Drought | 0.491 | 0.247 | 0.551 |
| 1578 | 2933 | Drought | 0.491 | 0.173 | 0.333 |
| 1579 | 2934 | Drought | 0.490 | 0.333 | 0.453 |
| 1580 | 2935 | Drought | 0.490 | 0.167 | 0.419 |
| 1582 | 2937 | Drought | 0.488 | 0.000 | 0.000 |
| 1583 | 2938 | Drought | 0.488 | 0.000 | 0.314 |
| 1585 | 2940 | Drought | 0.486 | 0.000 | 0.486 |
| 1586 | 2941 | Drought | 0.486 | 0.296 | 0.323 |
| 1589 | 2944 | Drought | 0.485 | 0.345 | 0.382 |
| 1590 | 2945 | Drought | 0.484 | 0.228 | 0.000 |
| 1591 | 2946 | Drought | 0.484 | 0.000 | 0.382 |
| 1594 | 2949 | Drought | 0.482 | 0.000 | 0.382 |
| 1595 | 2950 | Drought | 0.482 | 0.000 | 0.382 |
| 1596 | 2951 | Drought | 0.482 | 0.000 | 0.382 |
| 1597 | 2952 | Drought | 0.482 | 0.000 | 0.382 |
| 1598 | 2953 | Drought | 0.482 | 0.000 | 0.382 |
| 1606 | 2960 | Drought | 0.481 | 0.348 | 0.569 |
| 1607 | 2961 | Drought | 0.481 | 0.256 | 0.367 |
| 1608 | 2962 | Drought | 0.480 | 0.368 | 0.505 |
| 1609 | 2963 | Drought | 0.480 | 0.367 | 0.281 |
| 1610 | 2964 | Drought | 0.480 | 0.255 | 0.482 |
| 1614 | 2968 | Drought | 0.479 | 0.272 | 0.343 |
| 1616 | 2970 | Drought | 0.479 | 0.175 | 0.497 |
| 1617 | 2971 | Drought | 0.479 | 0.000 | 0.522 |
| 1618 | 2972 | Drought | 0.479 | 0.440 | 0.451 |
| 1619 | 2973 | Drought | 0.478 | 0.343 | 0.479 |
| 1620 | 2974 | Drought | 0.478 | 0.000 | 0.421 |
| 1622 | 2976 | Drought | 0.477 | 0.475 | 0.363 |
| 1623 | 2977 | Drought | 0.477 | 0.357 | 0.588 |
| 1624 | 2978 | Drought | 0.477 | 0.407 | 0.537 |
| 1625 | 2979 | Drought | 0.477 | 0.389 | 0.409 |
| 1626 | 2980 | Drought | 0.476 | 0.280 | 0.555 |
| 1627 | 2981 | Drought | 0.476 | 0.410 | 0.543 |
| 1628 | 2982 | Drought | 0.475 | 0.301 | 0.462 |
| 1630 | 2984 | Drought | 0.474 | 0.248 | 0.468 |
| 1631 | 2985 | Drought | 0.474 | 0.210 | 0.309 |
| 1632 | 2986 | Drought | 0.474 | 0.183 | 0.396 |
| 1633 | 2987 | Drought | 0.474 | 0.000 | 0.527 |
| 1634 | 2988 | Drought | 0.474 | 0.000 | 0.497 |
| 1635 | 2989 | Drought | 0.474 | 0.000 | 0.497 |
| 1636 | 2990 | Drought | 0.474 | 0.470 | 0.444 |
| 1637 | 2991 | Drought | 0.473 | 0.000 | 0.557 |
| 1638 | 2992 | Drought | 0.473 | 0.000 | 0.000 |
| 1639 | 2993 | Drought | 0.472 | 0.000 | 0.474 |
| 1640 | 2994 | Drought | 0.472 | 0.000 | 0.308 |
| 1644 | 2998 | Drought | 0.471 | 0.228 | 0.396 |
| 1645 | N.A. | Drought | 0.471 | 0.419 | 0.383 |
| 1646 | 2999 | Drought | 0.471 | 0.167 | 0.439 |
| 1647 | 3000 | Drought | 0.471 | 0.228 | 0.404 |
| 1648 | 3001 | Drought | 0.470 | 0.272 | 0.345 |
| 1649 | 3002 | Drought | 0.470 | 0.098 | 0.432 |
| 1650 | 3003 | Drought | 0.470 | 0.000 | 0.540 |
| 1651 | 3004 | Drought | 0.470 | 0.301 | 0.508 |
| 1652 | 3005 | Drought | 0.470 | 0.248 | 0.468 |
| 1653 | 3006 | Drought | 0.469 | 0.334 | 0.526 |
| 1654 | 3007 | Drought | 0.469 | 0.387 | 0.542 |
| 1656 | 3009 | Drought | 0.469 | 0.415 | 0.475 |
| 1657 | 3010 | Drought | 0.468 | 0.000 | 0.408 |
| 1658 | 3011 | Drought | 0.468 | 0.426 | 0.395 |
| 1659 | 3012 | Drought | 0.468 | 0.000 | 0.399 |
| 1660 | 3013 | Drought | 0.468 | 0.293 | 0.535 |
| 1661 | 3014 | Drought | 0.468 | 0.339 | 0.543 |
| 1663 | 3016 | Drought | 0.468 | 0.418 | 0.389 |
| 1665 | 3018 | Drought | 0.467 | 0.122 | 0.381 |
| 1666 | 3019 | Drought | 0.467 | 0.000 | 0.000 |
| 1667 | 3019 | Drought | 0.467 | 0.000 | 0.000 |
| 1668 | 3020 | Drought | 0.467 | 0.248 | 0.483 |
| 1669 | 3021 | Drought | 0.467 | 0.248 | 0.483 |
| 1670 | 3022 | Drought | 0.467 | 0.248 | 0.483 |
| 1671 | 3023 | Drought | 0.467 | 0.167 | 0.353 |
| 1672 | 3024 | Drought | 0.466 | 0.247 | 0.540 |
| 1673 | 3025 | Drought | 0.466 | 0.098 | 0.432 |
| 1674 | 3026 | Drought | 0.465 | 0.280 | 0.442 |
| 1675 | 3027 | Drought | 0.465 | 0.000 | 0.423 |
| 1676 | 3028 | Drought | 0.465 | 0.167 | 0.353 |
| 1677 | 3029 | Drought | 0.465 | 0.167 | 0.353 |
| 1678 | 3030 | Drought | 0.465 | 0.167 | 0.353 |
| 1679 | 3031 | Drought | 0.465 | 0.159 | 0.319 |
| 1681 | 3033 | Drought | 0.465 | 0.159 | 0.497 |
| 1682 | 3034 | Drought | 0.465 | 0.098 | 0.432 |
| 1686 | 3038 | Drought | 0.464 | 0.168 | 0.542 |
| 1687 | 3039 | Drought | 0.463 | 0.280 | 0.555 |
| 1688 | 3040 | Drought | 0.463 | 0.247 | 0.540 |
| 1689 | 3041 | Drought | 0.463 | 0.000 | 0.386 |
| 1690 | 3042 | Drought | 0.463 | 0.298 | 0.000 |
| 1691 | 3043 | Drought | 0.463 | 0.407 | 0.554 |
| 1692 | 3044 | Drought | 0.463 | 0.407 | 0.554 |
| 1693 | 3045 | Drought | 0.463 | 0.000 | 0.396 |
| 1694 | 3046 | Drought | 0.463 | 0.441 | 0.499 |
| 1695 | 3047 | Drought | 0.463 | 0.301 | 0.571 |
| 1696 | 3048 | Drought | 0.463 | 0.000 | 0.000 |
| 1697 | 3049 | Drought | 0.462 | 0.345 | 0.404 |
| 1698 | 3050 | Drought | 0.462 | 0.301 | 0.505 |
| 1699 | 3051 | Drought | 0.462 | 0.098 | 0.355 |
| 1700 | 3052 | Drought | 0.462 | 0.000 | 0.000 |
| 1701 | 3053 | Drought | 0.462 | 0.336 | 0.391 |
| 1702 | N.A. | Drought | 0.461 | 0.168 | 0.542 |
| 1705 | 3056 | Drought | 0.461 | 0.475 | 0.421 |
| 1706 | 3057 | Drought | 0.461 | 0.000 | 0.482 |
| 1708 | 3059 | Drought | 0.460 | 0.247 | 0.540 |
| 1149 | 2518 | Yield | 0.407 | 0.385 | 0.868 |
| 1152 | 2521 | Yield | 0.458 | 0.459 | 0.777 |
| 1156 | 2525 | Yield | 0.346 | 0.159 | 0.770 |
| 1159 | 2528 | Yield | 0.424 | 0.445 | 0.699 |
| 1162 | 2531 | Yield | 0.363 | 0.339 | 0.668 |
| 1163 | 2532 | Yield | 0.429 | 0.212 | 0.824 |
| 1165 | 2534 | Yield | 0.284 | 0.247 | 0.684 |
| 1170 | 2539 | Yield | 0.457 | 0.363 | 0.719 |
| 1171 | 2540 | Yield | 0.218 | 0.100 | 0.804 |
| 1172 | 2541 | Yield | 0.214 | 0.100 | 0.697 |
| 1174 | 2543 | Yield | 0.207 | 0.273 | 0.771 |
| 1181 | 2550 | Yield | 0.434 | 0.442 | 0.675 |
| 1182 | 2551 | Yield | 0.370 | 0.455 | 0.653 |
| 1186 | 2555 | Yield | 0.433 | 0.212 | 0.853 |
| 1187 | 2556 | Yield | 0.286 | 0.431 | 0.684 |
| 1189 | 2558 | Yield | 0.294 | 0.212 | 0.652 |
| 1191 | 2560 | Yield | 0.198 | 0.184 | 0.815 |
| 1193 | 2562 | Yield | 0.235 | 0.295 | 0.658 |
| 1196 | 2565 | Yield | 0.219 | 0.482 | 0.681 |
| 1197 | 2566 | Yield | 0.119 | 0.309 | 0.960 |
| 1200 | 2569 | Yield | 0.427 | 0.284 | 0.775 |
| 1203 | 2572 | Yield | 0.141 | 0.247 | 0.840 |
| 1204 | 2573 | Yield | 0.292 | 0.401 | 0.696 |
| 1210 | 2579 | Yield | 0.306 | 0.212 | 0.775 |
| 1211 | 2580 | Yield | 0.410 | 0.122 | 0.697 |
| 1212 | 2581 | Yield | 0.302 | 0.420 | 0.733 |
| 1214 | 2583 | Yield | 0.264 | 0.388 | 0.724 |
| 1215 | 2584 | Yield | 0.423 | 0.098 | 0.810 |
| 1217 | 2586 | Yield | 0.193 | 0.000 | 0.730 |
| 1219 | 2588 | Yield | 0.294 | 0.309 | 0.762 |
| 1225 | 2594 | Yield | 0.382 | 0.469 | 0.645 |
| 1226 | 2595 | Yield | 0.444 | 0.276 | 0.676 |
| 1229 | 2598 | Yield | 0.389 | 0.376 | 0.743 |
| 1230 | 2599 | Yield | 0.337 | 0.239 | 0.688 |
| 1235 | 2604 | Yield | 0.305 | 0.287 | 0.663 |
| 1241 | 2610 | Yield | 0.338 | 0.212 | 0.647 |
| 1242 | 2611 | Yield | 0.071 | 0.100 | 0.748 |
| 1245 | 2614 | Yield | 0.384 | 0.427 | 0.669 |
| 1248 | 2617 | Yield | 0.433 | 0.000 | 0.715 |
| 1250 | 2619 | Yield | 0.253 | 0.199 | 0.653 |
| 1342 | N.A. | Yield | 0.371 | 0.122 | 0.660 |
| 1342 | N.A. | Yield | 0.318 | 0.000 | 0.648 |
| 1342 | N.A. | Yield | 0.306 | 0.338 | 0.705 |
| 1342 | N.A. | Yield | 0.282 | 0.173 | 0.723 |
| 1342 | N.A. | Yield | 0.273 | 0.198 | 0.680 |
| 1342 | N.A. | Yield | 0.047 | 0.264 | 0.681 |
| 1342 | N.A. | Yield | 0.000 | 0.000 | 0.672 |
| 1702 | N.A. | Yield | 0.273 | 0.198 | 0.680 |
| 1702 | N.A. | Yield | 0.000 | 0.000 | 0.684 |
| 1709 | 3060 | Yield | 0.460 | 0.339 | 0.727 |
| 1712 | 3063 | Yield | 0.453 | 0.365 | 0.723 |
| 1713 | 3064 | Yield | 0.453 | 0.280 | 0.663 |
| 1714 | 3065 | Yield | 0.453 | 0.280 | 0.705 |
| 1718 | 3069 | Yield | 0.450 | 0.239 | 0.672 |
| 1719 | 3070 | Yield | 0.449 | 0.278 | 0.723 |
| 1723 | 3074 | Yield | 0.447 | 0.000 | 0.645 |
| 1724 | 3075 | Yield | 0.446 | 0.272 | 0.754 |
| 1725 | 3076 | Yield | 0.446 | 0.000 | 0.744 |
| 1729 | 3080 | Yield | 0.439 | 0.195 | 0.816 |
| 1730 | 3081 | Yield | 0.439 | 0.301 | 0.658 |
| 1732 | 3083 | Yield | 0.438 | 0.407 | 0.687 |
| 1735 | 3086 | Yield | 0.437 | 0.000 | 0.770 |
| 1736 | 3087 | Yield | 0.435 | 0.000 | 0.686 |
| 1743 | 3093 | Yield | 0.432 | 0.441 | 0.701 |
| 1744 | 3094 | Yield | 0.431 | 0.000 | 0.788 |
| 1746 | 3096 | Yield | 0.430 | 0.000 | 0.686 |
| 1747 | 3097 | Yield | 0.429 | 0.433 | 0.742 |
| 1748 | 3098 | Yield | 0.428 | 0.000 | 0.690 |
| 1749 | 3099 | Yield | 0.428 | 0.228 | 0.690 |
| 1750 | 3100 | Yield | 0.428 | 0.000 | 0.643 |
| 1751 | 3101 | Yield | 0.428 | 0.000 | 0.657 |
| 1754 | 3104 | Yield | 0.424 | 0.228 | 0.642 |
| 1755 | 3105 | Yield | 0.424 | 0.348 | 0.658 |
| 1756 | 3106 | Yield | 0.424 | 0.000 | 0.647 |
| 1758 | 3108 | Yield | 0.422 | 0.320 | 0.709 |
| 1762 | 3112 | Yield | 0.420 | 0.098 | 0.688 |
| 1768 | 3118 | Yield | 0.418 | 0.000 | 0.691 |
| 1769 | 3119 | Yield | 0.416 | 0.000 | 0.647 |
| 1770 | 3120 | Yield | 0.416 | 0.000 | 0.647 |
| 1772 | 3122 | Yield | 0.414 | 0.383 | 0.646 |
| 1773 | 3123 | Yield | 0.413 | 0.122 | 0.664 |
| 1774 | 3124 | Yield | 0.409 | 0.145 | 1.000 |
| 1776 | 3126 | Yield | 0.406 | 0.233 | 0.654 |
| 1779 | 3129 | Yield | 0.404 | 0.199 | 0.645 |
| 1780 | 3130 | Yield | 0.402 | 0.488 | 0.689 |
| 1782 | 3132 | Yield | 0.400 | 0.199 | 0.646 |
| 1787 | 3137 | Yield | 0.397 | 0.000 | 0.667 |
| 1788 | 3138 | Yield | 0.397 | 0.000 | 0.667 |
| 1789 | 3139 | Yield | 0.397 | 0.000 | 0.739 |
| 1790 | 3140 | Yield | 0.393 | 0.000 | 0.650 |
| 1791 | 3141 | Yield | 0.389 | 0.000 | 0.666 |
| 1792 | 3142 | Yield | 0.389 | 0.000 | 0.650 |
| 1793 | 3143 | Yield | 0.389 | 0.000 | 0.650 |
| 1794 | 3144 | Yield | 0.389 | 0.000 | 0.732 |
| 1796 | 3118 | Yield | 0.388 | 0.199 | 0.646 |
| 1797 | 3146 | Yield | 0.387 | 0.278 | 0.724 |
| 1798 | 3147 | Yield | 0.387 | 0.488 | 0.689 |
| 1799 | 3148 | Yield | 0.387 | 0.488 | 0.673 |
| 1800 | 3149 | Yield | 0.387 | 0.390 | 0.730 |
| 1801 | 3150 | Yield | 0.387 | 0.359 | 0.730 |
| 1802 | 3151 | Yield | 0.387 | 0.359 | 0.730 |
| 1803 | 3152 | Yield | 0.386 | 0.485 | 0.704 |
| 1804 | 3153 | Yield | 0.386 | 0.122 | 0.643 |
| 1805 | 3154 | Yield | 0.386 | 0.456 | 0.676 |
| 1806 | 3155 | Yield | 0.385 | 0.325 | 0.658 |
| 1811 | 3160 | Yield | 0.382 | 0.000 | 0.729 |
| 1816 | 3165 | Yield | 0.377 | 0.299 | 0.663 |
| 1817 | 3166 | Yield | 0.377 | 0.000 | 0.750 |
| 1818 | 3167 | Yield | 0.377 | 0.122 | 0.660 |
| 1819 | 3168 | Yield | 0.376 | 0.198 | 0.660 |
| 1821 | 3170 | Yield | 0.375 | 0.361 | 0.671 |
| 1822 | 3171 | Yield | 0.375 | 0.369 | 0.689 |
| 1824 | 3173 | Yield | 0.374 | 0.000 | 0.769 |
| 1828 | 3177 | Yield | 0.371 | 0.122 | 0.680 |
| 1829 | 3178 | Yield | 0.371 | 0.122 | 0.660 |
| 1830 | N.A. | Yield | 0.371 | 0.122 | 0.660 |
| 1831 | 3179 | Yield | 0.370 | 0.394 | 0.650 |
| 1835 | 3183 | Yield | 0.368 | 0.442 | 0.643 |
| 1837 | 3185 | Yield | 0.366 | 0.449 | 0.676 |
| 1838 | 3186 | Yield | 0.366 | 0.000 | 0.658 |
| 1839 | 3187 | Yield | 0.365 | 0.000 | 0.648 |
| 1840 | 3188 | Yield | 0.364 | 0.433 | 0.728 |
| 1841 | 3189 | Yield | 0.364 | 0.279 | 0.655 |
| 1846 | 3194 | Yield | 0.361 | 0.247 | 0.722 |
| 1849 | 3197 | Yield | 0.359 | 0.000 | 0.655 |
| 1850 | 3198 | Yield | 0.359 | 0.000 | 0.742 |
| 1851 | 3199 | Yield | 0.359 | 0.287 | 0.663 |
| 1853 | 3201 | Yield | 0.356 | 0.352 | 0.654 |
| 1854 | 3202 | Yield | 0.356 | 0.000 | 0.643 |
| 1855 | 3203 | Yield | 0.355 | 0.098 | 0.662 |
| 1856 | 3204 | Yield | 0.355 | 0.278 | 1.000 |
| 1864 | 3212 | Yield | 0.355 | 0.489 | 0.732 |
| 1865 | 3213 | Yield | 0.355 | 0.000 | 0.730 |
| 1869 | 3217 | Yield | 0.353 | 0.417 | 0.649 |
| 1870 | 3218 | Yield | 0.353 | 0.000 | 0.658 |
| 1875 | 3223 | Yield | 0.351 | 0.279 | 0.658 |
| 1876 | 3224 | Yield | 0.351 | 0.279 | 0.650 |
| 1877 | 3225 | Yield | 0.350 | 0.000 | 0.724 |
| 1878 | 3226 | Yield | 0.349 | 0.000 | 0.730 |
| 1879 | 3227 | Yield | 0.349 | 0.000 | 0.679 |
| 1883 | 3231 | Yield | 0.345 | 0.247 | 0.767 |
| 1885 | 3233 | Yield | 0.345 | 0.000 | 0.773 |
| 1886 | 3234 | Yield | 0.345 | 0.000 | 0.649 |
| 1887 | N.A. | Yield | 0.345 | 0.000 | 0.649 |
| 1891 | 3238 | Yield | 0.345 | 0.000 | 0.755 |
| 1900 | 3245 | Yield | 0.344 | 0.000 | 0.666 |
| 1902 | 3247 | Yield | 0.342 | 0.255 | 0.690 |
| 1904 | 3249 | Yield | 0.339 | 0.448 | 0.731 |
| 1905 | 3250 | Yield | 0.338 | 0.233 | 0.705 |
| 1906 | 3251 | Yield | 0.338 | 0.168 | 0.704 |
| 1907 | 3252 | Yield | 0.338 | 0.233 | 0.705 |
| 1908 | 3253 | Yield | 0.338 | 0.122 | 0.649 |
| 1909 | 3254 | Yield | 0.337 | 0.278 | 0.655 |
| 1910 | 3255 | Yield | 0.337 | 0.412 | 0.727 |
| 1912 | 3257 | Yield | 0.336 | 0.381 | 1.000 |
| 1917 | 3262 | Yield | 0.334 | 0.122 | 0.642 |
| 1918 | 3263 | Yield | 0.333 | 0.122 | 0.650 |
| 1919 | 3264 | Yield | 0.333 | 0.339 | 0.648 |
| 1920 | 3265 | Yield | 0.332 | 0.173 | 0.692 |
| 1920 | 3265 | Yield | 0.000 | 0.307 | 0.661 |
| 1921 | 3266 | Yield | 0.332 | 0.173 | 0.692 |
| 1922 | 3267 | Yield | 0.332 | 0.481 | 0.731 |
| 1925 | 3270 | Yield | 0.331 | 0.173 | 0.687 |
| 1927 | 3272 | Yield | 0.327 | 0.122 | 0.700 |
| 1928 | 3273 | Yield | 0.327 | 0.122 | 0.690 |
| 1932 | 3277 | Yield | 0.325 | 0.351 | 0.730 |
| 1934 | 3279 | Yield | 0.324 | 0.221 | 0.677 |
| 1935 | 3280 | Yield | 0.323 | 0.287 | 0.845 |
| 1938 | 3283 | Yield | 0.274 | 0.000 | 0.670 |
| 1939 | 3284 | Yield | 0.274 | 0.000 | 0.670 |
| 1943 | 3288 | Yield | 0.321 | 0.460 | 0.662 |
| 1944 | 3289 | Yield | 0.321 | 0.278 | 0.736 |
| 1946 | 3291 | Yield | 0.320 | 0.000 | 0.753 |
| 1947 | 3292 | Yield | 0.320 | 0.352 | 0.673 |
| 1948 | N.A. | Yield | 0.318 | 0.000 | 0.648 |
| 1950 | 3294 | Yield | 0.316 | 0.301 | 0.703 |
| 1951 | 3295 | Yield | 0.316 | 0.301 | 0.703 |
| 1953 | 3297 | Yield | 0.315 | 0.000 | 0.647 |
| 1957 | 3301 | Yield | 0.313 | 0.390 | 0.690 |
| 1959 | N.A. | Yield | 0.311 | 0.000 | 0.765 |
| 1960 | 3303 | Yield | 0.311 | 0.265 | 0.649 |
| 1962 | 3305 | Yield | 0.310 | 0.325 | 0.645 |
| 1963 | 3306 | Yield | 0.310 | 0.000 | 0.729 |
| 1964 | 3307 | Yield | 0.310 | 0.000 | 0.681 |
| 1965 | 3308 | Yield | 0.309 | 0.322 | 0.759 |
| 1967 | 3310 | Yield | 0.306 | 0.338 | 0.705 |
| 1968 | N.A. | Yield | 0.306 | 0.338 | 0.705 |
| 1972 | 3313 | Yield | 0.306 | 0.239 | 0.651 |
| 1973 | 3314 | Yield | 0.305 | 0.287 | 0.653 |
| 1974 | 3315 | Yield | 0.305 | 0.145 | 0.663 |
| 1975 | 3316 | Yield | 0.305 | 0.481 | 0.707 |
| 1984 | 3323 | Yield | 0.305 | 0.000 | 0.670 |
| 1985 | 3324 | Yield | 0.305 | 0.272 | 1.000 |
| 1986 | 3325 | Yield | 0.305 | 0.272 | 0.649 |
| 1987 | 3326 | Yield | 0.305 | 0.272 | 0.704 |
| 1988 | 3327 | Yield | 0.304 | 0.420 | 0.665 |
| 1989 | 3328 | Yield | 0.303 | 0.252 | 0.786 |
| 1992 | 3331 | Yield | 0.300 | 0.000 | 0.702 |
| 1993 | 3332 | Yield | 0.300 | 0.239 | 0.724 |
| 1994 | 3333 | Yield | 0.300 | 0.239 | 0.705 |
| 1995 | 3334 | Yield | 0.300 | 0.239 | 0.670 |
| 1996 | 3335 | Yield | 0.300 | 0.382 | 0.730 |
| 1997 | 3336 | Yield | 0.300 | 0.122 | 0.697 |
| 1998 | 3337 | Yield | 0.300 | 0.122 | 0.652 |
| 2008 | 3346 | Yield | 0.296 | 0.000 | 0.769 |
| 2010 | 3348 | Yield | 0.295 | 0.229 | 0.725 |
| 2011 | 3349 | Yield | 0.295 | 0.287 | 0.745 |
| 2012 | 3350 | Yield | 0.295 | 0.287 | 0.727 |
| 2013 | 3351 | Yield | 0.294 | 0.290 | 0.693 |
| 2015 | 3353 | Yield | 0.292 | 0.122 | 0.647 |
| 2016 | 3354 | Yield | 0.292 | 0.272 | 0.743 |
| 2017 | 3355 | Yield | 0.292 | 0.272 | 0.692 |
| 2018 | 3356 | Yield | 0.292 | 0.272 | 0.723 |
| 2019 | 3357 | Yield | 0.292 | 0.272 | 0.723 |
| 2020 | 3358 | Yield | 0.290 | 0.200 | 0.858 |
| 2021 | 3359 | Yield | 0.289 | 0.352 | 0.654 |
| 2022 | 3360 | Yield | 0.289 | 0.352 | 0.654 |
| 2024 | 3362 | Yield | 0.287 | 0.000 | 0.655 |
| 2034 | 3371 | Yield | 0.287 | 0.167 | 0.729 |
| 2036 | 3373 | Yield | 0.287 | 0.387 | 0.656 |
| 2037 | 3374 | Yield | 0.287 | 0.183 | 0.844 |
| 2039 | 3376 | Yield | 0.286 | 0.167 | 0.681 |
| 2040 | 3377 | Yield | 0.285 | 0.000 | 0.652 |
| 2043 | 3380 | Yield | 0.285 | 0.000 | 0.651 |
| 2044 | 3381 | Yield | 0.285 | 0.000 | 0.657 |
| 2045 | 3382 | Yield | 0.285 | 0.000 | 0.656 |
| 2046 | 3383 | Yield | 0.285 | 0.171 | 0.668 |
| 2047 | 3384 | Yield | 0.285 | 0.171 | 0.796 |
| 2048 | 3385 | Yield | 0.285 | 0.173 | 0.697 |
| 2049 | 3386 | Yield | 0.284 | 0.319 | 0.673 |
| 2050 | 3387 | Yield | 0.284 | 0.319 | 0.673 |
| 2051 | 3388 | Yield | 0.284 | 0.256 | 0.661 |
| 2052 | 3052 | Yield | 0.284 | 0.256 | 0.772 |
| 2054 | 3390 | Yield | 0.284 | 0.256 | 0.660 |
| 2055 | 3391 | Yield | 0.282 | 0.390 | 0.672 |
| 2056 | 3392 | Yield | 0.282 | 0.390 | 0.928 |
| 2057 | 3393 | Yield | 0.282 | 0.361 | 0.651 |
| 2058 | 3394 | Yield | 0.282 | 0.173 | 0.696 |
| 2059 | 3395 | Yield | 0.281 | 0.420 | 0.669 |
| 2060 | 3396 | Yield | 0.281 | 0.420 | 0.665 |
| 2061 | 3397 | Yield | 0.281 | 0.366 | 0.731 |
| 2062 | 3398 | Yield | 0.281 | 0.366 | 0.709 |
| 2063 | 3399 | Yield | 0.281 | 0.394 | 0.770 |
| 2064 | N.A. | Yield | 0.280 | 0.239 | 0.693 |
| 2065 | 3400 | Yield | 0.278 | 0.352 | 0.773 |
| 2069 | 3404 | Yield | 0.276 | 0.167 | 0.770 |
| 2070 | 3405 | Yield | 0.276 | 0.167 | 0.697 |
| 2071 | 3406 | Yield | 0.276 | 0.167 | 0.720 |
| 2072 | 3407 | Yield | 0.276 | 0.167 | 0.715 |
| 2073 | 3408 | Yield | 0.274 | 0.281 | 0.672 |
| 2075 | 3410 | Yield | 0.274 | 0.000 | 0.734 |
| 2076 | 3411 | Yield | 0.274 | 0.325 | 0.678 |
| 2077 | 3412 | Yield | 0.274 | 0.000 | 0.694 |
| 2078 | 3413 | Yield | 0.273 | 0.339 | 0.659 |
| 2079 | 3414 | Yield | 0.273 | 0.000 | 0.845 |
| 2080 | 3415 | Yield | 0.273 | 0.256 | 0.696 |
| 2085 | 3420 | Yield | 0.273 | 0.198 | 0.731 |
| 2086 | 3421 | Yield | 0.273 | 0.198 | 0.731 |
| 2087 | 3422 | Yield | 0.271 | 0.229 | 0.648 |
| 2089 | 3424 | Yield | 0.270 | 0.000 | 0.696 |
| 2090 | 3425 | Yield | 0.270 | 0.199 | 0.646 |
| 2095 | 3430 | Yield | 0.266 | 0.287 | 0.651 |
| 2096 | 3431 | Yield | 0.266 | 0.287 | 0.651 |
| 2097 | N.A. | Yield | 0.261 | 0.420 | 0.669 |
| 2098 | N.A. | Yield | 0.261 | 0.420 | 0.669 |
| 2102 | 3435 | Yield | 0.259 | 0.000 | 0.739 |
| 2103 | 3436 | Yield | 0.259 | 0.436 | 0.653 |
| 2104 | 3437 | Yield | 0.259 | 0.000 | 0.687 |
| 2106 | 3439 | Yield | 0.257 | 0.247 | 0.722 |
| 2107 | 3440 | Yield | 0.257 | 0.301 | 0.668 |
| 2113 | 3444 | Yield | 0.253 | 0.365 | 0.921 |
| 2114 | 3445 | Yield | 0.253 | 0.199 | 0.725 |
| 2115 | 3446 | Yield | 0.253 | 0.199 | 0.652 |
| 2116 | 3447 | Yield | 0.252 | 0.000 | 0.690 |
| 2121 | 3452 | Yield | 0.248 | 0.239 | 0.693 |
| 2122 | 3453 | Yield | 0.246 | 0.000 | 0.660 |
| 2123 | 3454 | Yield | 0.246 | 0.000 | 0.669 |
| 2124 | 3455 | Yield | 0.246 | 0.000 | 0.687 |
| 2125 | 3456 | Yield | 0.246 | 0.000 | 0.687 |
| 2128 | 3459 | Yield | 0.245 | 0.473 | 0.735 |
| 2129 | 3460 | Yield | 0.245 | 0.473 | 0.664 |
| 2131 | 3462 | Yield | 0.244 | 0.331 | 0.693 |
| 2132 | 3463 | Yield | 0.243 | 0.000 | 0.655 |
| 2133 | 3464 | Yield | 0.242 | 0.420 | 0.784 |
| 2137 | 3468 | Yield | 0.237 | 0.000 | 0.651 |
| 2138 | 3469 | Yield | 0.237 | 0.000 | 0.651 |
| 2139 | 3470 | Yield | 0.237 | 0.000 | 0.747 |
| 2140 | 3471 | Yield | 0.237 | 0.000 | 0.747 |
| 2141 | 3472 | Yield | 0.236 | 0.363 | 0.648 |
| 2143 | 3474 | Yield | 0.231 | 0.122 | 0.677 |
| 2144 | 3475 | Yield | 0.228 | 0.000 | 0.699 |
| 2146 | N.A. | Yield | 0.224 | 0.286 | 0.676 |
| 2147 | 3477 | Yield | 0.220 | 0.274 | 0.705 |
| 2148 | 3478 | Yield | 0.220 | 0.274 | 0.650 |
| 2149 | 3479 | Yield | 0.220 | 0.274 | 0.648 |
| 2150 | 3480 | Yield | 0.220 | 0.274 | 0.648 |
| 2153 | 3483 | Yield | 0.220 | 0.293 | 0.723 |
| 2154 | 3484 | Yield | 0.220 | 0.293 | 0.666 |
| 2155 | 3485 | Yield | 0.220 | 0.293 | 0.766 |
| 2156 | 3486 | Yield | 0.219 | 0.084 | 1.000 |
| 2158 | 3488 | Yield | 0.218 | 0.256 | 0.654 |
| 2159 | 3489 | Yield | 0.218 | 0.334 | 0.721 |
| 2160 | 3490 | Yield | 0.215 | 0.318 | 0.642 |
| 2161 | 3491 | Yield | 0.213 | 0.000 | 0.744 |
| 2164 | 3494 | Yield | 0.211 | 0.000 | 0.724 |
| 2165 | 3495 | Yield | 0.210 | 0.000 | 0.710 |
| 2167 | 3497 | Yield | 0.208 | 0.199 | 0.645 |
| 2168 | N.A. | Yield | 0.208 | 0.199 | 0.645 |
| 2169 | 3498 | Yield | 0.205 | 0.378 | 0.722 |
| 2171 | 3500 | Yield | 0.205 | 0.173 | 0.680 |
| 2172 | 3501 | Yield | 0.205 | 0.173 | 0.679 |
| 2173 | 3502 | Yield | 0.205 | 0.173 | 0.846 |
| 2180 | 3509 | Yield | 0.204 | 0.000 | 0.655 |
| 2181 | 3510 | Yield | 0.204 | 0.000 | 0.848 |
| 2182 | 3511 | Yield | 0.204 | 0.000 | 0.655 |
| 2183 | 3512 | Yield | 0.201 | 0.301 | 0.668 |
| 2184 | 3513 | Yield | 0.200 | 0.297 | 0.709 |
| 2185 | 3514 | Yield | 0.199 | 0.334 | 0.721 |
| 2186 | 3515 | Yield | 0.198 | 0.180 | 0.844 |
| 2187 | 3516 | Yield | 0.196 | 0.462 | 0.670 |
| 2188 | 3517 | Yield | 0.191 | 0.289 | 0.689 |
| 2190 | 3519 | Yield | 0.190 | 0.122 | 0.664 |
| 2191 | 3520 | Yield | 0.189 | 0.453 | 0.668 |
| 2201 | 3530 | Yield | 0.178 | 0.000 | 0.664 |
| 2203 | 3532 | Yield | 0.175 | 0.122 | 0.664 |
| 2204 | 3533 | Yield | 0.173 | 0.411 | 0.731 |
| 2206 | 3535 | Yield | 0.173 | 0.452 | 0.661 |
| 2207 | 3536 | Yield | 0.171 | 0.335 | 0.701 |
| 2208 | N.A. | Yield | 0.166 | 0.000 | 0.776 |
| 2212 | 3540 | Yield | 0.160 | 0.000 | 0.847 |
| 2214 | 3542 | Yield | 0.159 | 0.437 | 0.659 |
| 2215 | 3543 | Yield | 0.157 | 0.221 | 0.658 |
| 2216 | 3544 | Yield | 0.157 | 0.122 | 0.664 |
| 2218 | 3546 | Yield | 0.153 | 0.000 | 0.729 |
| 2219 | 3547 | Yield | 0.153 | 0.331 | 0.707 |
| 2220 | 3548 | Yield | 0.152 | 0.000 | 0.679 |
| 2221 | 3549 | Yield | 0.150 | 0.278 | 0.765 |
| 2222 | 3550 | Yield | 0.150 | 0.385 | 0.675 |
| 2225 | 3553 | Yield | 0.146 | 0.000 | 0.672 |
| 2226 | 3554 | Yield | 0.146 | 0.000 | 0.672 |
| 2227 | 3555 | Yield | 0.146 | 0.000 | 0.674 |
| 2228 | 3556 | Yield | 0.146 | 0.428 | 0.749 |
| 2229 | 3557 | Yield | 0.146 | 0.274 | 0.667 |
| 2231 | 3559 | Yield | 0.143 | 0.274 | 0.667 |
| 2232 | 3560 | Yield | 0.141 | 0.000 | 0.843 |
| 2233 | 3561 | Yield | 0.135 | 0.159 | 0.692 |
| 2234 | 3562 | Yield | 0.132 | 0.233 | 0.711 |
| 2235 | 3563 | Yield | 0.132 | 0.233 | 0.665 |
| 2237 | 3565 | Yield | 0.129 | 0.000 | 0.843 |
| 2239 | 3567 | Yield | 0.125 | 0.335 | 0.668 |
| 2242 | 3570 | Yield | 0.125 | 0.410 | 0.642 |
| 2244 | 3572 | Yield | 0.119 | 0.000 | 0.673 |
| 2252 | 3580 | Yield | 0.106 | 0.279 | 0.665 |
| 2255 | 3583 | Yield | 0.101 | 0.000 | 0.755 |
| 2256 | 3584 | Yield | 0.101 | 0.084 | 0.709 |
| 2257 | 3585 | Yield | 0.098 | 0.274 | 0.653 |
| 2258 | 3586 | Yield | 0.098 | 0.410 | 0.709 |
| 2259 | 3587 | Yield | 0.098 | 0.274 | 0.709 |
| 2260 | 3588 | Yield | 0.098 | 0.274 | 0.844 |
| 2261 | 3589 | Yield | 0.098 | 0.274 | 0.690 |
| 2263 | 3591 | Yield | 0.092 | 0.279 | 0.656 |
| 2264 | 3592 | Yield | 0.092 | 0.279 | 0.750 |
| 2265 | 3593 | Yield | 0.086 | 0.159 | 0.647 |
| 2266 | 3594 | Yield | 0.086 | 0.159 | 0.706 |
| 2267 | 3595 | Yield | 0.086 | 0.159 | 0.706 |
| 2268 | 3596 | Yield | 0.086 | 0.159 | 0.668 |
| 2269 | 3597 | Yield | 0.086 | 0.159 | 0.767 |
| 2271 | 3599 | Yield | 0.047 | 0.270 | 0.653 |
| 2272 | 3600 | Yield | 0.047 | 0.289 | 0.656 |
| 2274 | 3602 | Yield | 0.047 | 0.280 | 0.658 |
| 2277 | 3605 | Yield | 0.047 | 0.279 | 0.669 |
| 2278 | 3606 | Yield | 0.047 | 0.279 | 0.674 |
| 2280 | N.A. | Yield | 0.047 | 0.264 | 0.681 |
| 2281 | 3608 | Yield | 0.047 | 0.379 | 0.848 |
| 2282 | 3609 | Yield | 0.047 | 0.379 | 0.728 |
| 2285 | 3612 | Yield | 0.047 | 0.301 | 0.696 |
| 2288 | 3615 | Yield | 0.045 | 0.139 | 0.779 |
| 2297 | 3623 | Yield | 0.043 | 0.000 | 0.692 |
| 2298 | 3624 | Yield | 0.043 | 0.339 | 0.655 |
| 2302 | 3628 | Yield | 0.043 | 0.000 | 0.695 |
| 2304 | 3630 | Yield | 0.021 | 0.098 | 0.694 |
| 2306 | 3632 | Yield | 0.021 | 0.171 | 0.675 |
| 2311 | 3637 | Yield | 0.013 | 0.000 | 0.733 |
| 2312 | 3638 | Yield | 0.013 | 0.210 | 0.659 |
| 2317 | 3643 | Yield | 0.000 | 0.000 | 0.642 |
| 2318 | 3644 | Yield | 0.000 | 0.167 | 0.660 |
| 2319 | 3645 | Yield | 0.000 | 0.228 | 0.649 |
| 2323 | 3649 | Yield | 0.000 | 0.000 | 0.687 |
| 2326 | 3652 | Yield | 0.000 | 0.000 | 0.694 |
| 2332 | 3658 | Yield | 0.000 | 0.000 | 1.000 |
| 2333 | 3659 | Yield | 0.000 | 0.000 | 0.655 |
| 2334 | 3660 | Yield | 0.000 | 0.000 | 0.655 |
| 2335 | 3661 | Yield | 0.000 | 0.000 | 0.642 |
| 2336 | 3662 | Yield | 0.000 | 0.453 | 0.656 |
| 2337 | 3663 | Yield | 0.000 | 0.453 | 0.708 |
| 2338 | 3664 | Yield | 0.000 | 0.173 | 0.845 |
| 2339 | 3665 | Yield | 0.000 | 0.000 | 0.785 |
| 2342 | 3668 | Yield | 0.000 | 0.000 | 0.670 |
| 2349 | 3503 | Yield | 0.000 | 0.098 | 0.666 |
| 2350 | 3675 | Yield | 0.000 | 0.000 | 0.647 |
| 2351 | 3676 | Yield | 0.000 | 0.000 | 0.656 |
| 2354 | 3679 | Yield | 0.000 | 0.000 | 0.708 |
| 2356 | 3681 | Yield | 0.000 | 0.000 | 0.642 |
| 2357 | 3682 | Yield | 0.000 | 0.228 | 0.642 |
| 2359 | 3684 | Yield | 0.000 | 0.331 | 0.662 |
| 2361 | 3686 | Yield | 0.000 | 0.000 | 0.642 |
| 2362 | 3687 | Yield | 0.000 | 0.167 | 0.653 |
| 2363 | 3688 | Yield | 0.000 | 0.167 | 0.657 |
| 2364 | 3689 | Yield | 0.000 | 0.167 | 0.660 |
| 2372 | 3697 | Yield | 0.000 | 0.000 | 0.720 |
| 2373 | N.A. | Yield | 0.000 | 0.000 | 0.642 |
| 2374 | 3698 | Yield | 0.000 | 0.339 | 0.745 |
| 2375 | 3699 | Yield | 0.000 | 0.339 | 0.843 |
| 2376 | 3700 | Yield | 0.000 | 0.000 | 0.705 |
| 2377 | 3701 | Yield | 0.000 | 0.000 | 0.678 |
| 2378 | N.A. | Yield | 0.000 | 0.000 | 0.678 |
| 2379 | N.A. | Yield | 0.000 | 0.000 | 0.678 |
| 2380 | 3702 | Yield | 0.000 | 0.229 | 0.756 |
| 2381 | 3703 | Yield | 0.000 | 0.229 | 0.693 |
| 2382 | 3704 | Yield | 0.000 | 0.485 | 0.861 |
| 2383 | 3705 | Yield | 0.000 | 0.485 | 0.844 |
| 2386 | 3708 | Yield | 0.000 | 0.247 | 0.662 |
| 2387 | 3709 | Yield | 0.000 | 0.339 | 0.680 |
| 2388 | 3710 | Yield | 0.000 | 0.339 | 0.648 |
| 2389 | 3711 | Yield | 0.000 | 0.339 | 0.671 |
| 2390 | 3712 | Yield | 0.000 | 0.339 | 0.659 |
| 2391 | 3713 | Yield | 0.000 | 0.339 | 0.659 |
| 2392 | 3714 | Yield | 0.000 | 0.371 | 0.696 |
| 2396 | 3718 | Yield | 0.000 | 0.000 | 0.765 |
| 2397 | 3719 | Yield | 0.000 | 0.000 | 0.744 |
| 2398 | 3720 | Yield | 0.000 | 0.000 | 0.744 |
| 2399 | N.A. | Yield | 0.000 | 0.000 | 0.744 |
| 2400 | 3721 | Yield | 0.000 | 0.000 | 0.690 |
| 2401 | 3722 | Yield | 0.000 | 0.000 | 0.654 |
| 2402 | 3723 | Yield | 0.000 | 0.357 | 0.651 |
| 2403 | 3724 | Yield | 0.000 | 0.357 | 0.651 |
| 2404 | 3725 | Yield | 0.000 | 0.357 | 0.692 |
| 2405 | 3726 | Yield | 0.000 | 0.357 | 0.692 |
| 2406 | 3727 | Yield | 0.000 | 0.357 | 0.692 |
| 2407 | 3728 | Yield | 0.000 | 0.357 | 0.692 |
| 2408 | 3729 | Yield | 0.000 | 0.000 | 0.667 |
| 2409 | N.A. | Yield | 0.000 | 0.000 | 0.684 |
| 2410 | N.A. | Yield | 0.000 | 0.000 | 0.684 |
| 2411 | 3730 | Yield | 0.000 | 0.000 | 0.728 |
| 2426 | 3740 | Yield | 0.000 | 0.000 | 0.646 |
| 2428 | 3742 | Yield | 0.000 | 0.279 | 0.655 |
| 2434 | 3747 | Yield | 0.000 | 0.000 | 0.720 |
| 2435 | 3748 | Yield | 0.000 | 0.000 | 0.765 |
| 2436 | 3749 | Yield | 0.000 | 0.307 | 0.692 |
| 2437 | 3750 | Yield | 0.000 | 0.307 | 0.692 |
| 2438 | 3751 | Yield | 0.000 | 0.307 | 0.692 |
| 2439 | 3752 | Yield | 0.000 | 0.307 | 0.684 |
| 2440 | 3753 | Yield | 0.000 | 0.000 | 0.676 |
| 2441 | 3754 | Yield | 0.000 | 0.000 | 0.667 |
| 2445 | 3758 | Yield | 0.000 | 0.000 | 0.642 |
| 2447 | 3760 | Yield | 0.000 | 0.000 | 0.649 |
| 2448 | 3761 | Yield | 0.000 | 0.000 | 0.722 |
| 2449 | N.A. | Yield | 0.000 | 0.000 | 0.672 |
| 2450 | 3762 | Yield | 0.000 | 0.171 | 0.751 |
| 2451 | 3763 | Yield | 0.000 | 0.171 | 0.656 |
| 2452 | 3764 | Yield | 0.000 | 0.171 | 0.656 |
| 2453 | 3765 | Yield | 0.000 | 0.171 | 0.724 |
| 2458 | 3770 | Yield | 0.000 | 0.000 | 0.673 |
| 2459 | 3771 | Yield | 0.000 | 0.000 | 0.694 |
| 2460 | 3772 | Yield | 0.000 | 0.000 | 0.694 |
| 2461 | 3773 | Yield | 0.000 | 0.000 | 0.696 |
| 2462 | 3774 | Yield | 0.000 | 0.409 | 0.659 |
| 2463 | 3775 | Yield | 0.000 | 0.210 | 0.665 |
| 2464 | 3776 | Yield | 0.000 | 0.210 | 0.665 |
| 2465 | 3777 | Yield | 0.000 | 0.210 | 0.705 |
| 2466 | 3778 | Yield | 0.000 | 0.437 | 0.650 |
| 2467 | 3779 | Yield | 0.000 | 0.309 | 0.686 |
| 2469 | 3781 | Yield | 0.000 | 0.378 | 0.722 |
| 2477 | 3789 | Yield | 0.000 | 0.000 | 0.729 |
| 2478 | 3790 | Yield | 0.000 | 0.000 | 0.855 |
| 2479 | 3791 | Yield | 0.000 | 0.000 | 0.843 |
| 2480 | 3792 | Yield | 0.000 | 0.422 | 0.721 |
| 2481 | 3793 | Yield | 0.000 | 0.116 | 1.000 |
| 2482 | 3794 | Yield | 0.000 | 0.116 | 0.666 |
| 2483 | 3795 | Yield | 0.000 | 0.116 | 0.666 |
| 2484 | 3796 | Yield | 0.000 | 0.116 | 0.666 |
| 2485 | 3797 | Yield | 0.000 | 0.116 | 0.767 |
| 2486 | 3798 | Yield | 0.000 | 0.116 | 0.707 |
| 2487 | N.A. | Yield | 0.000 | 0.247 | 0.691 |
| 2488 | 3550 | Yield | 0.000 | 0.247 | 0.675 |
| 2489 | 3799 | Yield | 0.000 | 0.475 | 0.665 |
| 2490 | 3800 | Yield | 0.000 | 0.000 | 0.643 |
| 2491 | 3801 | Yield | 0.000 | 0.000 | 0.643 |

### EXAMPLES

[0110] The following are non-limiting examples intended to illustrate the various embodiments.

### Example 1

### Genome-Wide Survey and Identification of MicroRNAs, Pre-Cursor Genes and Targets

[0111] MicroRNAs (miRNAs) are small non-coding RNAs that serve as regulators of gene expression and diverse biological functions in plants. Maize genome sequences were analyzed for B73 inbred and source gene candidates were classified and their predicted target regulated genes. Databases were searched to identify miRNA precursor genes that have predicted hairpin structures and/or related to one or more of about 4,698 plant mature miRNAs from miRBase and other sources. Additional miRNA precursors were identified by aligning all predicted miRNA hairpin sequences in plants from miRBase to the B73 psuedomolecules sequences, yielding at least 8,535 putative miRNA loci.

[0112] Maize small RNA sequencing reads from a profiling experiment were used to filter out predicted miRNA precursor loci having less than 10 sequence reads support thereby classifying them as computationally predicted but unexpressed precursor candidates. A software tool was developed to fetch the exact mature miRNA sequences from the B73 genome based on the predicted miRNA gene coordinates and the reference mature miRNA sequences from miRBase. A total of 321 maize miRNAs precursors were obtained from miRBase, and retained for analysis even if some did not have 10 sequencing reads from the profiling experiment. After removing overlapping miRNA loci between the two sets, the resulting miRNA precursor set had a total of 1,512 miRNA gene loci corresponding to about 197 unique mature miRNA sequences (core miRNA sequences).

[0113] Following identification of the source miRNA genes, the next step was to identify and prioritize miRNA target genes. Following a comprehensive survey, identification and classification of miRNA source genes in maize using the miRBase resources and other tools, the predicted target genes for these miRNAs were identified using the program miRanda (Enright et al., (2005), Human MicroRNA Targets, PLoS Biol.:e264) for predicting the targets for all 197 unique miRNAs. A total of 192 out of 197 miRNAs were predicted to have targets in the maize genome, averaging 59 targets per miRNA, but ranging from 1 to 1510 (alignment score 160 and energy score −30). These predicted miRNA targets are likely to be enriched for functional partners with the miRNAs, for example, genes that are regulated by the miRNAs.

### Example 2

### miRNA to Target Anti-Correlation Analysis

[0114] Gene which are regulated by miRNAs are expected to exhibit an expression pattern that is anti-correlated to the miRNA. This anti-correlation of expression of a target gene is an indication that the identified miRNA is likely regulating that target gene. It is possible that some genes may be anti-correlated by coincidence may not represent a true target for regulation by the identified microRNA. One way to determine the anti-correlation relationship is to analyze the binding sites on the target gene that is suspected to be anti-correlated with the miRNA expression.

[0115] Experiments were performed to identify gene pairs of miRNAs and their possible targets. One of the approaches to identify the miRNAs and the targets was using anti-correlated gene expression for miRNAs and their candidate genes through separate microarray profiling experiments. By comparing the mRNA profiling results for different microarrays using the same biological samples, and spanning over several tissues, it was determined whether the expression of one or more miRNAs correlated with their candidate target genes through statistical tools. Significant correlations were identified that demonstrated decreasing candidate gene transcript levels while the expression levels of the microRNA candidates increased. Some of these gene pairs also bore sequence similarity of the putative miRNA binding site, a 21-mer, providing further support that these genes may represent a regulated unit, with the miRNA acting as the agent of regulation.

[0116] Empirical determination of miRNA targets was also performed. To empirically determine miRNA-mRNA counter-correlated pairs, 65 samples that were assayed with both the 105K mRNA microarray and the 44K miRNA microarray were examined. The 65 samples included 18 leaf samples from a circadian study, 18 immature ear samples from a circadian study and 29 kernel samples from a study examining transgenic zein knockdown expression. Only 42,758 probes from the mRNA array were considered to be expressed and used for the subsequent analysis. Correlation was determined by Pearson correlation coefficient and those mRNA-miRNA pairs that exhibited <(−0.9) were considered significant. An example of an anticorrelated gene pair from these experiments are shown in FIG. 1 The anticorrelation of the miRNA and the target gene (transcript) are indicated.

### Example 3

### Identification of Maize miRNA Sequences for Use in Agronomic Traits

[0117] The miRNA targets listed in Table 1 and whose sequences are provided herein to the sequence listing appended herein were analyzed for their significance to impacting one or more agronomic traits using bioinformatics tools. Results from these analyses were used to identify assign an agronomic parameter of importance to one or more of these gene targets as in Table 2. Drought, nitrogen and yield were chosen as three relevant agronomic traits and each target gene's relevance is listed in Table 2. For example, the same gene may appear for all three agronomic traits and some genes may fall under only of the selected traits. Relative trait values provided in Table 2 indicate the likelihood that a particular gene is regulated by a miRNA that impacts an agronomic trait of interest.

[0118] Gene networks were constructed from these gene relationships derived from bioinformatics analysis by linking genes to interaction and regulation partners, metabolic targets, trait component processes, and to other biologically relevant factors. A global gene network was also constructed based on all obtainable biologically relevant information, not limited to these three traits, creating a general or universal background network, against which to compare versus the three trait enriched networks. Relative trait values were developed and assigned to individual genes, based upon bioinformatics analysis. For cross-comparison of all three trait values, the values were all transformed to a 0-to-1 relative scale. For the miRNA target genes, these scores enable comparative analysis within a particular trait association, and across these agronomic traits.

### Example 4

### Gene Regulation with Transgenic MicroRNAs

[0119] One or more microRNA sequences listed in Table 1 and the sequence listing provided herein can be used to construct siRNA (small interfering RNA) vector or a vector that regulates genes in an equivalent manner. The genes may be operably controlled by a variety of plant-expressible promoter sequences to achieve broad or specific tissue-developmental or environmental response expression patterns. Maize plants, other crop plants, or model plants such as Arabidopsis can be transformed with the vector containing the miRNA hairpin construct or a microRNA precursor gene, and the transformants (e.g., at T0 or T1) can be evaluated for improved drought tolerance or NUE or yield increase (e.g., such as through a surrogate parameter such as photosynthetic activity, nutrient uptake, biomass increase).

[0120] When miRNA precursors are expressed, the expressed miRNA precursors are processed by the plants' resident microRNA processing apparatus and produce a mature miRNA sequence with regulatory function. The target genes of this miRNA will be expected to have reduced gene expression, transcript levels, or translation, resulting in reduced functional capacity of the target gene product. For target genes that are net negative regulators of agronomic trait performance, this reduction of their functional expression will lead to increased trait performance and agronomic gain. Some genes are involved in the evolved natural adaptive responses of plants to environmental stresses such as drought and nutrient deprivation, but in an agronomic setting these responses can negatively affect crop performance and yield. For example, some drought related genes contribute to a defensive slow-growing habit and physiology. With this miRNA targeting strategy, these genes can be selectively reduced in expression under these environmental conditions, enabling the plants to manage drought stress while maintaining a high yield capacity.

### Example 5

### Upregulating Plant miRNA Target Genes Through Down-Regulation of a miRNA Precursor Gene

[0121] Some agronomic traits are regulated at least in part by microRNAs, Some of these miRNA regulations are the result of long-evolved mechanisms to adapt to environmental stresses such as drought and nutrient limitations, such as nitrogen. The microRNA precursors may embody some of the tissue-developmental-environmental responsiveness for miRNA-based gene regulation. In situations where the target gene that may contribute to increased agronomic performance is being limited in net functional expression by a miRNA regulation, reduction (in site and location) in the expression of the microRNA precursor can result increased expression of the target gene and lead to increased agronomic trait performance. The reduction in the microRNA precursor expression may include targeting the miRNA expression by another siRNA construct, or by targeted mutagenesis, such as homing endonuclease-based site-directed changes that introduce functional changes in the expression and/or direct alteration of the core miRNA site.

### Example 6

### Use of miRNA Precursor Genes

[0122] The miRNA precursor genes can be upregulated through many ways—e.g., by expressing the precursor gene under the control of a plant expressible regulatory element or by upregulating the endogenous precursor gene through engineering a plant expressible regulatory element into the plant genome.

[0123] Similarly, the miRNA precursor gene loci can be mutagenized to either decrease or increase the expression of the precursor gene, e.g., by targeting the endogenous promoter element. miRNA genes can also serve as templates to construct artificial miRNA vector constructs to express an artificial miRNA transcript.

[0124] The precursor gene sequences can also be used as markers for marker-assisted breeding selection or to screen a population of maize plants for alleles of the precursor genes. For example, variations within the precursor sequences can result in SNPs that are used as markers or haplotypes for germplasm selection and breeding.

[0125] The miRNA sequences or the miRNA precursor gene sequences or the target gene sequences disclosed herein can be used as a template to design an artificial or a synthetic interfering RNA construct including an artificial miRNA or siRNA construct or synthetic polynucleotides encoding an interfering RNA thereof. As known in the art, these artificial nucleic acid sequences can contain one or more mismatches compared to the template and may also contain stabilizing nucleotide analogs for use as topical or other exogenous applications, where stability of nucleic acids are desirable.

### Example 7

### Use of Target Genes Disclosed in Tables 1 and 2

[0126] The target genes disclosed herein have been selected to contribute to one or more agronomic traits based on the identification of miRNAs and associated precursor genes. The target genes disclosed herein can be overexpressed constitutively, suppressed for example through RNA silencing/ The target genes can also be expressed as a synthetic version of the gene that is not directly targeted by an endogenous miRNA, thereby desensitizing the transgene copy from being subject to endogenous regulation. Desensitization can also be performed through mutagenesis for example to eliminate a potential miRNA binding site or altering the binding specificity to a closely related gene homolog. Any promoter/vector combination can be used with the target genes.

[0127] In addition, the target gene sequences can also be used as markers for marker-assisted breeding selection or to screen a population of maize plants for alleles of the target genes. For example, variations within the target gene sequences can result in SNPs that are used as markers or haplotypes for germplasm selection and breeding.

### Transformation of Plants

[0128] Described in this example are methods one may use for introduction of a polynucleotide or polypeptide into a plant cell.

### A. Maize Particle-Mediated DNA Delivery

[0129] A DNA construct can be introduced into maize cells capable of growth on suitable maize culture medium. Such competent cells can be from maize suspension culture, callus culture on solid medium, freshly isolated immature embryos or meristem cells. Immature embryos of the Hi-II genotype can be used as the target cells. Ears are harvested at approximately 10 days post-pollination, and 1.2-1.5 mm immature embryos are isolated from the kernels, and placed scutellum-side down on maize culture medium.

[0130] The immature embryos are bombarded from 18-72 hours after being harvested from the ear. Between 6 and 18 hours prior to bombardment, the immature embryos are placed on medium with additional osmoticum (MS basal medium, Musashige and Skoog, 1962, Physiol. Plant 15:473-497, with 0.25 M sorbitol). The embryos on the high-osmotic medium are used as the bombardment target, and are left on this medium for an additional 18 hours after bombardment.

[0131] For particle bombardment, plasmid DNA (described above) is precipitated onto 1.8 mm tungsten particles using standard CaCl2-spermidine chemistry (see, for example, Klein et al., 1987, Nature 327:70-73). Each plate is bombarded once at 600 PSI, using a DuPont Helium Gun (Lowe et al., 1995, Bio/Technol 13:677-682). For typical media formulations used for maize immature embryo isolation, callus initiation, callus proliferation and regeneration of plants, see Armstrong, C., 1994, In “The Maize Handbook”, M. Freeling and V. Walbot, eds. Springer Verlag, NY, pp 663-671.

[0132] Within 1-7 days after particle bombardment, the embryos are moved onto N6-based culture medium containing 3 mg/I of the selective agent bialaphos. Embryos, and later callus, are transferred to fresh selection plates every 2 weeks. The calli developing from the immature embryos are screened for the desired phenotype. After 6-8 weeks, transformed calli are recovered.

### B. Soybean Transformation

[0133] Soybean embryogenic suspension cultures are maintained in 35 ml liquid media SB196 or SB172 in 250 ml Erlenmeyer flasks on a rotary shaker, 150 rpm, 26 C with cool white fluorescent lights on 16:8 hr day/night photoperiod at light intensity of 30-35 uE/m2s. Cultures are subcultured every two weeks by inoculating approximately 35 mg of tissue into 35 ml of fresh liquid media. Alternatively, cultures are initiated and maintained in 6-well Costar plates.

[0134] SB 172 media is prepared as follows: (per liter), 1 bottle Murashige and Skoog Medium (Duchefa # M 0240), 1 ml B5 vitamins 1000× stock, 1 ml 2,4-D stock (Gibco 11215-019), 60 g sucrose, 2 g MES, 0.667 g L-Asparagine anhydrous (GibcoBRL 11013-026), pH 5.7. SB 196 media is prepared as follows: (per liter) 10 ml MS FeEDTA, 10 ml MS Sulfate, 10 ml FN-Lite Halides, 10 ml FN-Lite P,B,Mo, 1 ml B5 vitamins 1000× stock, 1 ml 2,4-D, (Gibco 11215-019), 2.83 g KNO3, 0.463 g (NH4)2SO4, 2 g MES, 1 g Asparagine Anhydrous, Powder (Gibco 11013-026), 10 g Sucrose, pH 5.8. 2,4-D stock concentration 10 mg/ml is prepared as follows: 2,4-D is solubilized in 0.1 N NaOH, filter-sterilized, and stored at −20° C. B5 vitamins 1000× stock is prepared as follows: (per 100 ml)—store aliquots at −20° C., 10 g myo-inositol, 100 mg nicotinic acid, 100 mg pyridoxine HCl, 1 g thiamin.

[0135] Soybean embryogenic suspension cultures are transformed with various plasmids by the method of particle gun bombardment (Klein et al., 1987 Nature 327:70. To prepare tissue for bombardment, approximately two flasks of suspension culture tissue that has had approximately 1 to 2 weeks to recover since its most recent subculture is placed in a sterile 60×20 mm petri dish containing 1 sterile filter paper in the bottom to help absorb moisture. Tissue (i.e. suspension clusters approximately 3-5 mm in size) is spread evenly across each petri plate. Residual liquid is removed from the tissue with a pipette, or allowed to evaporate to remove excess moisture prior to bombardment. Per experiment, 4-6 plates of tissue are bombarded. Each plate is made from two flasks.

[0136] To prepare gold particles for bombardment, 30 mg gold is washed in ethanol, centrifuged and resuspended in 0.5 ml of sterile water. For each plasmid combination (treatments) to be used for bombardment, a separate micro-centrifuge tube is prepared, starting with 50 μl of the gold particles prepared above. Into each tube, the following are also added; 5 μl of plasmid DNA (at 1 μg/μl), 50 μl CaCl2, and 20 μl 0.1 M spermidine. This mixture is agitated on a vortex shaker for 3 minutes, and then centrifuged using a microcentrifuge set at 14,000 RPM for 10 seconds. The supernatant is decanted and the gold particles with attached, precipitated DNA are washed twice with 400 μl aliquots of ethanol (with a brief centrifugation as above between each washing). The final volume of 100% ethanol per each tube is adjusted to 40 μl, and this particle/DNA suspension is kept on ice until being used for bombardment.

[0137] Immediately before applying the particle/DNA suspension, the tube is briefly dipped into a sonicator bath to disperse the particles, and then 5 μL of DNA prep is pipetted onto each flying disk and allowed to dry. The flying disk is then placed into the DuPont Biolistics PDS1000/HE. Using the DuPont Biolistic PDS1000/HE instrument for particle-mediated DNA delivery into soybean suspension clusters, the following settings are used. The membrane rupture pressure is 1100 psi. The chamber is evacuated to a vacuum of 27-28 inches of mercury. The tissue is placed approximately 3.5 inches from the retaining/stopping screen (3rd shelf from the bottom). Each plate is bombarded twice, and the tissue clusters are rearranged using a sterile spatula between shots.

[0138] Following bombardment, the tissue is re-suspended in liquid culture medium, each plate being divided between 2 flasks with fresh SB196 or SB172 media and cultured as described above. Four to seven days post-bombardment, the medium is replaced with fresh medium containing a selection agent. The selection media is refreshed weekly for 4 weeks and once again at 6 weeks. Weekly replacement after 4 weeks may be necessary if cell density and media turbidity is high.

[0139] Four to eight weeks post-bombardment, green, transformed tissue may be observed growing from untransformed, necrotic embryogenic clusters. Isolated, green tissue is removed and inoculated into 6-well microtiter plates with liquid medium to generate clonally-propagated, transformed embryogenic suspension cultures.

[0140] Each embryogenic cluster is placed into one well of a Costar 6-well plate with 5 mls fresh SB196 media with selection agent. Cultures are maintained for 2-6 weeks with fresh media changes every 2 weeks. When enough tissue is available, a portion of surviving transformed clones are subcultured to a second 6-well plate as a back-up to protect against contamination.

[0141] To promote in vitro maturation, transformed embryogenic clusters are removed from liquid SB196 and placed on solid agar media, SB 166, for 2 weeks. Tissue clumps of 2-4 mm size are plated at a tissue density of 10 to 15 clusters per plate. Plates are incubated in diffuse, low light (<10 μE) at 26+/−1° C. After two weeks, clusters are subcultured to SB 103 media for 3-4 weeks.

[0142] SB 166 is prepared as follows: (per liter), 1 pkg. MS salts (Gibco/BRL—Cat#11117-017), 1 ml B5 vitamins 1000× stock, 60 g maltose, 750 mg MgCl2 hexahydrate, 5 g activated charcoal, pH 5.7, 2 g gelrite. SB 103 media is prepared as follows: (per liter), 1 pkg. MS salts (Gibco/BRL—Cat#11117-017), 1 ml B5 vitamins 1000× stock, 60 g maltose, 750 mg MgCl2 hexahydrate, pH 5.7, 2 g gelrite. After 5-6 week maturation, individual embryos are desiccated by placing embryos into a 100×15 petri dish with a 1 cm2 portion of the SB103 media to create a chamber with enough humidity to promote partial desiccation, but not death.

[0143] Approximately 25 embryos are desiccated per plate. Plates are sealed with several layers of parafilm and again are placed in a lower light condition. The duration of the desiccation step is best determined empirically, and depends on size and quantity of embryos placed per plate. For example, small embryos or few embryos/plate require a shorter drying period, while large embryos or many embryos/plate require a longer drying period. It is best to check on the embryos after about 3 days, but proper desiccation will most likely take 5 to 7 days. Embryos will decrease in size during this process.

[0144] Desiccated embryos are planted in SB 71-1 or MSO medium where they are left to germinate under the same culture conditions described for the suspension cultures. When the plantlets have two fully-expanded trifoliate leaves, germinated and rooted embryos are transferred to sterile soil and watered with MS fertilizer. Plants are grown to maturity for seed collection and analysis. Healthy, fertile transgenic plants are grown in the greenhouse.

[0145] SB 71-1 is prepared as follows: 1 bottle Gamborg's B5 salts w/sucrose (Gibco/BRL—Cat#21153-036), 10 g sucrose, 750 mg MgCl2 hexahydrate, pH 5.7, 2 g gelrite. MSO media is prepared as follows: 1 pkg Murashige and Skoog salts (Gibco 11117-066), 1 ml B5 vitamins 1000× stock, 30 g sucrose, pH 5.8, 2 g Gelrite.

### C. Transformation of Maize Using Agrobacterium

[0146] Agrobacterium-mediated transformation of maize is performed essentially as described by Zhao et al., in Meth. Mol. Biol. 318:315-323 (2006) (see also Zhao et al., Mol. Breed. 8:323-333 (2001) and U.S. Pat. No. 5,981,840 issued Nov. 9, 1999, incorporated herein by reference). The transformation process involves bacterium inoculation, co-cultivation, resting, selection and plant regeneration.

### 1. Immature Embryo Preparation:

[0147] Immature maize embryos are dissected from caryopses and placed in a 2 mL microtube containing 2 mL PHI-A medium.

### 2. Agrobacterium Infection and Co-Cultivation of Immature Embryos:

### 2.1 Infection Step:

[0148] PHI-A medium of (1) is removed with 1 mL micropipettor, and 1 mL of Agrobacterium suspension is added. The tube is gently inverted to mix. The mixture is incubated for 5 min at room temperature.

### 2.2 Co-Culture Step:

[0149] The Agrobacterium suspension is removed from the infection step with a 1 mL micropipettor. Using a sterile spatula the embryos are scraped from the tube and transferred to a plate of PHI-B medium in a 100×15 mm Petri dish. The embryos are oriented with the embryonic axis down on the surface of the medium. Plates with the embryos are cultured at 20° C., in darkness, for three days. L-Cysteine can be used in the co-cultivation phase. With the standard binary vector, the co-cultivation medium supplied with 100-400 mg/L L-cysteine is useful for recovering stable transgenic events.

### 3. Selection of Putative Transgenic Events:

[0150] To each plate of PHI-D medium in a 100×15 mm Petri dish, 10 embryos are transferred, maintaining orientation and the dishes are sealed with parafilm. The plates are incubated in darkness at 28° C. Actively growing putative events, as pale yellow embryonic tissue, are expected to be visible in six to eight weeks. Embryos that produce no events may be brown and necrotic, and little friable tissue growth is evident. Putative transgenic embryonic tissue is subcultured to fresh PHI-D plates at two-three week intervals, depending on growth rate. The events are recorded.

### 4. Regeneration of T0 Plants:

[0151] Embryonic tissue propagated on PHI-D medium is subcultured to PHI-E medium (somatic embryo maturation medium), in 100×25 mm Petri dishes and incubated at 28° C., in darkness, until somatic embryos mature, for about ten to eighteen days. Individual, matured somatic embryos with well-defined scutellum and coleoptile are transferred to PHI-F embryo germination medium and incubated at 28° C. in the light (about 80 μE from cool white or equivalent fluorescent lamps). In seven to ten days, regenerated plants, about 10 cm tall, are potted in horticultural mix and hardened-off using standard horticultural methods.
[0152] Media for Plant Transformation:
[0153] 1. PHI-A: 4 g/L CHU basal salts, 1.0 mL/L 1000× Eriksson's vitamin mix, 0.5 mg/L thiamin HCl, 1.5 mg/L 2,4-D, 0.69 g/L L-proline, 68.5 g/L sucrose, 36 g/L glucose, pH 5.2. Add 100 μM acetosyringone (filter-sterilized).
[0154] 2. PHI-B: PHI-A without glucose, increase 2,4-D to 2 mg/L, reduce sucrose to 30 g/L and supplemented with 0.85 mg/L silver nitrate (filter-sterilized), 3.0 g/L Gelrite®, 100 μM acetosyringone (filter-sterilized), pH 5.8.
[0155] 3. PHI-C: PHI-B without Gelrite® and acetosyringonee, reduce 2,4-D to 1.5 mg/L and supplemented with 8.0 g/L agar, 0.5 g/L 2-[N-morpholino]ethane-sulfonic acid (MES) buffer, 100 mg/L carbenicillin (filter-sterilized).
[0156] 4. PHI-D: PHI-C supplemented with 3 mg/L bialaphos (filter-sterilized).
[0157] 5. PHI-E: 4.3 g/L of Murashige and Skoog (MS) salts, (Gibco, BRL 11117-074), 0.5 mg/L nicotinic acid, 0.1 mg/L thiamine HCl, 0.5 mg/L pyridoxine HCl, 2.0 mg/L glycine, 0.1 g/L myo-inositol, 0.5 mg/L zeatin (Sigma, Cat. No. Z-0164), 1 mg/L indole acetic acid (IAA), 26.4 μg/L abscisic acid (ABA), 60 g/L sucrose, 3 mg/L bialaphos (filter-sterilized), 100 mg/L carbenicillin (filter-sterilized), 8 g/L agar, pH 5.6.
[0158] 6. PHI-F: PHI-E without zeatin, IAA, ABA; reduce sucrose to 40 g/L; replacing agar with 1.5 g/L Gelrite®; pH 5.6.

[0159] Plants can be regenerated from the transgenic callus by first transferring clusters of tissue to N6 medium supplemented with 0.2 mg per liter of 2,4-D. After two weeks the tissue can be transferred to regeneration medium (Fromm et al., Bio/Technology 8:833-839 (1990)).

[0160] Transgenic T0 plants can be regenerated and their phenotype determined. T1 seed can be collected.

[0161] Furthermore, a recombinant DNA construct containing a validated Arabidopsis gene can be introduced into a maize inbred line either by direct transformation or introgression from a separately transformed line.

[0162] Transgenic plants, either inbred or hybrid, can undergo more vigorous field-based experiments to study expression effects

The application's sequence listing, which the Patent Office published only in electronic form, follows.

SEQUENCE LISTING (3804 sequences)

SEQ ID NO: 1 - DNA, 22 bp, Zea mays
aaaatgggagcagagcaggttt

SEQ ID NO: 2 - DNA, 19 bp, Zea mays
aaacctggctctgatacca

SEQ ID NO: 3 - DNA, 20 bp, Zea mays
aaagaagaagaagaagaaga

SEQ ID NO: 4 - DNA, 21 bp, Zea mays
aacaataggaatgggaggcat

SEQ ID NO: 5 - DNA, 21 bp, Zea mays
aacacatgtggattgaggtca

SEQ ID NO: 6 - DNA, 18 bp, Zea mays
aacagtctccttggctga

SEQ ID NO: 7 - DNA, 20 bp, Zea mays
aaccaggctctgataccaga

SEQ ID NO: 8 - DNA, 19 bp, Zea mays
aagatctgtggcgccgaac

SEQ ID NO: 9 - DNA, 19 bp, Zea mays
aagatctgtggcgccgacc

SEQ ID NO: 10 - DNA, 19 bp, Zea mays
aagatctgtggcgccgaga

SEQ ID NO: 11 - DNA, 19 bp, Zea mays
aagatctgtggcgccgagc

SEQ ID NO: 12 - DNA, 19 bp, Zea mays
aagatctgtggcgccgagt

SEQ ID NO: 13 - DNA, 21 bp, Zea mays
aagctcaggagggatagcgcc

SEQ ID NO: 14 - DNA, 19 bp, Zea mays
acgatctgtggcgccgagc

SEQ ID NO: 15 - DNA, 19 bp, Zea mays
agaataaaaataataatat

SEQ ID NO: 16 - DNA, 20 bp, Zea mays
agaatcttgatgatgctgca

SEQ ID NO: 17 - DNA, 20 bp, Zea mays
agactacaattatctgatca

SEQ ID NO: 18 - DNA, 20 bp, Zea mays
agagaagaagaagaagaagg

SEQ ID NO: 19 - DNA, 21 bp, Zea mays
agagcgtccttcagtccactc

SEQ ID NO: 20 - DNA, 21 bp, Zea mays
agagttggaggaaagcaaacc

SEQ ID NO: 21 - DNA, 18 bp, Zea mays
agcagtctccttggcttc

SEQ ID NO: 22 - DNA, 20 bp, Zea mays
agccaaggatgacttgccga

SEQ ID NO: 23 - DNA, 20 bp, Zea mays
agccaaggatgacttgccgg

SEQ ID NO: 24 - DNA, 20 bp, Zea mays
agccaaggatgacttgccta

SEQ ID NO: 25 - DNA, 20 bp, Zea mays
agccaaggatgacttgcctg

SEQ ID NO: 26 - DNA, 21 bp, Zea mays
aggaagaaccggtaataagca

SEQ ID NO: 27 - DNA, 21 bp, Zea mays
aggattagagggacttgaacc

SEQ ID NO: 28 - DNA, 21 bp, Zea mays
aggcagtggcttggttaaggg

SEQ ID NO: 29 - DNA, 21 bp, Zea mays
atagccaaggatgacttgcct

SEQ ID NO: 30 - DNA, 19 bp, Zea mays
atgatctgtggcgccgagc

SEQ ID NO: 31 - DNA, 22 bp, Zea mays
atggaatatatgacaaaggtgg

SEQ ID NO: 32 - DNA, 24 bp, Zea mays
atggttcaagaaagcccatggaaa

SEQ ID NO: 33 - DNA, 19 bp, Zea mays
caacctggctctgatacaa

SEQ ID NO: 34 - DNA, 19 bp, Zea mays
caacctggctctgatacca

SEQ ID NO: 35 - DNA, 19 bp, Zea mays
caacctggctctgataccc

SEQ ID NO: 36 - DNA, 20 bp, Zea mays
caagaagaagaagaagaaga

SEQ ID NO: 37 - DNA, 20 bp, Zea mays
caagaagaagaagaagaagg

SEQ ID NO: 38 - DNA, 20 bp, Zea mays
caccaggctctgataccaat

SEQ ID NO: 39 - DNA, 21 bp, Zea mays
cacgtgcgctccttctccaac

SEQ ID NO: 40 - DNA, 21 bp, Zea mays
cacgtgcgctccttctccagc

SEQ ID NO: 41 - DNA, 21 bp, Zea mays
cacgtgctccccttctccacc

SEQ ID NO: 42 - DNA, 20 bp, Zea mays
cacgtggtctccttctccat

SEQ ID NO: 43 - DNA, 19 bp, Zea mays
cagatctgtggcgccgacc

SEQ ID NO: 44 - DNA, 19 bp, Zea mays
cagatctgtggcgccgagc

SEQ ID NO: 45 - DNA, 21 bp, Zea mays
cagccaaggatgacttgccgg

SEQ ID NO: 46 - DNA, 21 bp, Zea mays
cagctcctgcagcatctgttc

SEQ ID NO: 47 - DNA, 18 bp, Zea mays
caggggtgtgggacccac

SEQ ID NO: 48 - DNA, 18 bp, Zea mays
caggggtgtgggacccca

SEQ ID NO: 49 - DNA, 21 bp, Zea mays
catgtgtccgccctctccacc

SEQ ID NO: 50 - DNA, 21 bp, Zea mays
ccagcgctgcactcaattacg

SEQ ID NO: 51 - DNA, 18 bp, Zea mays
cccagtctccttggctac

SEQ ID NO: 52 - DNA, 20 bp, Zea mays
cccgccttgcaccaagtgaa

SEQ ID NO: 53 - DNA, 19 bp, Zea mays
ccggagatgaaggagccga

SEQ ID NO: 54 - DNA, 21 bp, Zea mays
cctgtgcctgcctcttccatt

SEQ ID NO: 55 - DNA, 21 bp, Zea mays
cgctatctatcctgagctcca

SEQ ID NO: 56 - DNA, 19 bp, Zea mays
cgggagatgaaggagccat

SEQ ID NO: 57 - DNA, 19 bp, Zea mays
ctacctggctctgatacca

SEQ ID NO: 58 - DNA, 22 bp, Zea mays
ctattccccagcggagtcgcca

SEQ ID NO: 59 - DNA, 21 bp, Zea mays
ctcaggagagatgacaccgcg

SEQ ID NO: 60 - DNA, 18 bp, Zea mays
ctcagtctccttggctga

SEQ ID NO: 61 - DNA, 19 bp, Zea mays
ctcagtctctttggctata

SEQ ID NO: 62 - DNA, 22 bp, Zea mays
ctccaaagggatcgcattgatc

SEQ ID NO: 63 - DNA, 21 bp, Zea mays
ctgacagaagagagtgagcac

SEQ ID NO: 64 - DNA, 21 bp, Zea mays
ctgcactgcctcttccctggc

SEQ ID NO: 65 - DNA, 19 bp, Zea mays
ctggagatgaaggagccgg

SEQ ID NO: 66 - DNA, 20 bp, Zea mays
cttggattgaagggagctcc

SEQ ID NO: 67 - DNA, 22 bp, Zea mays
gaaatgggagcagagcaggttt

SEQ ID NO: 68 - DNA, 19 bp, Zea mays
gaacctggctctgatacca

SEQ ID NO: 69 - DNA, 20 bp, Zea mays
gaagaagaagaagaagaaac

SEQ ID NO: 70 - DNA, 20 bp, Zea mays
gaagaagaagaagaagaaga

SEQ ID NO: 71 - DNA, 20 bp, Zea mays
gaagaagaagaagaagaagc

SEQ ID NO: 72 - DNA, 21 bp, Zea mays
gaagctgccagcatgatctaa

SEQ ID NO: 73 - DNA, 21 bp, Zea mays
gaagctgccagcatgatctag

SEQ ID NO: 74 - DNA, 21 bp, Zea mays
gaagctgccagcatgatctga

SEQ ID NO: 75 - DNA, 21 bp, Zea mays
gaagctgccagcatgatctgg

SEQ ID NO: 76 - DNA, 20 bp, Zea mays
gaatcttgatgatgctgcat

SEQ ID NO: 77 - DNA, 19 bp, Zea mays
gagatctgtggcgccgagc

SEQ ID NO: 78 - DNA, 21 bp, Zea mays
gagctcccttcgatccaatcc

SEQ ID NO: 79 - DNA, 20 bp, Zea mays
gagctctcttcagtccactc

SEQ ID NO: 80 - DNA, 21 bp, Zea mays
gaggtgagccgagccaatatc

SEQ ID NO: 81 - DNA, 22 bp, Zea mays
gatcatgctgtgcagtttcatc

SEQ ID NO: 82 - DNA, 19 bp, Zea mays
gatcatgttgcagcttcat

SEQ ID NO: 83 - DNA, 22 bp, Zea mays
gatcgtgctgcgcagtttcacc

SEQ ID NO: 84 - DNA, 21 bp, Zea mays
gcagccaaggatgacttgccg

SEQ ID NO: 85 - DNA, 21 bp, Zea mays
gcctggctccctgtatgccac

SEQ ID NO: 86 - DNA, 21 bp, Zea mays
gcctggctccctgtatgccgc

SEQ ID NO: 87 - DNA, 21 bp, Zea mays
gcgtgcatggtgccaagcata

SEQ ID NO: 88 - DNA, 21 bp, Zea mays
gctcaccctctatctgtcagt

SEQ ID NO: 89 - DNA, 22 bp, Zea mays
gctcactgctctatctgtcacc

SEQ ID NO: 90 - DNA, 22 bp, Zea mays
gctcactgctctatctgtcatc

SEQ ID NO: 91 - DNA, 22 bp, Zea mays
gctcactgctctttctgtcatc

SEQ ID NO: 92 - DNA, 22 bp, Zea mays
gctcacttctctctctgtcagt

SEQ ID NO: 93 - DNA, 19 bp, Zea mays
gctcatgttgcagcttcaa

SEQ ID NO: 94 - DNA, 22 bp, Zea mays
gctcgcttctctttctgtcagc

SEQ ID NO: 95 - DNA, 21 bp, Zea mays
gctgtaccctctctcttcttc

SEQ ID NO: 96 - DNA, 19 bp, Zea mays
ggacagtctcaggtagaca

SEQ ID NO: 97 - DNA, 24 bp, Zea mays
ggacccaacgcgactgacggataa

SEQ ID NO: 98 - DNA, 21 bp, Zea mays
ggatattggtgcggttcaatc

SEQ ID NO: 99 - DNA, 21 bp, Zea mays
ggattgagccgcgtcaatatc

SEQ ID NO: 100 - DNA, 21 bp, Zea mays
ggcaagtcatctggggctacg

SEQ ID NO: 101 - DNA, 19 bp, Zea mays
ggcaggccttctggctaag

SEQ ID NO: 102 - DNA, 20 bp, Zea mays
ggcaggtcttcttggctagc

SEQ ID NO: 103 - DNA, 18 bp, Zea mays
ggcagtctccttggctag

SEQ ID NO: 104 - DNA, 18 bp, Zea mays
ggcagtctccttggctga

SEQ ID NO: 105 - DNA, 23 bp, Zea mays
ggcatcgggggcgcaacgcccct

SEQ ID NO: 106 - DNA, 20 bp, Zea mays
ggccgggggacggaccagga

SEQ ID NO: 107 - DNA, 20 bp, Zea mays
ggccgggggacggaccggga

SEQ ID NO: 108 - DNA, 20 bp, Zea mays
ggccgggggacggatcggga

SEQ ID NO: 109 - DNA, 20 bp, Zea mays
ggccgggggacggcccggga

SEQ ID NO: 110 - DNA, 21 bp, Zea mays
gggcaaccccccgttggcagg

SEQ ID NO: 111 - DNA, 22 bp, Zea mays
gggcaacttctcctttggcaga

SEQ ID NO: 112 - DNA, 21 bp, Zea mays
gggcgcagtggtttatcgatc

SEQ ID NO: 113 - DNA, 21 bp, Zea mays
gggcttctctttcttggcagg

SEQ ID NO: 114 - DNA, 21 bp, Zea mays
gggcttggtgcagctcgggaa

SEQ ID NO: 115 - DNA, 21 bp, Zea mays
ggggcggactgggaacacatg

SEQ ID NO: 116 - DNA, 19 bp, Zea mays
ggggggggggggggaaaaa

SEQ ID NO: 117 - DNA, 22 bp, Zea mays
gggtgtcatctcgcctgaagca

SEQ ID NO: 118 - DNA, 21 bp, Zea mays
ggtcaagaaagctgtgggaag

SEQ ID NO: 119 - DNA, 23 bp, Zea mays
ggtcatgctgctgcagcctcact

SEQ ID NO: 120 - DNA, 20 bp, Zea mays
ggtcatgctgtagtttcatc

SEQ ID NO: 121 - DNA, 21 bp, Zea mays
gtagccaaggatgacttgcct

SEQ ID NO: 122 - DNA, 22 bp, Zea mays
gtcagtgcaatccctttggaat

SEQ ID NO: 123 - DNA, 21 bp, Zea mays
gtgaagtgtttgggggaactc

SEQ ID NO: 124 - DNA, 22 bp, Zea mays
gtgaagtgtttgggggaactct

SEQ ID NO: 125 - DNA, 21 bp, Zea mays
gtgagccgaaccaatatcact

SEQ ID NO: 126 - DNA, 21 bp, Zea mays
gtgcagttctcctctggcacg

SEQ ID NO: 127 - DNA, 21 bp, Zea mays
gtgcggctctcctctggcatg

SEQ ID NO: 128 - DNA, 21 bp, Zea mays
gtgctcccttcaaaccaataa

SEQ ID NO: 129 - DNA, 21 bp, Zea mays
gtgctcccttcacaccaataa

SEQ ID NO: 130 - DNA, 19 bp, Zea mays
gtggagatgaaggagccga

SEQ ID NO: 131 - DNA, 21 bp, Zea mays
gtgtggctctcctctggcatg

SEQ ID NO: 132 - DNA, 21 bp, Zea mays
gttcaataaagctgtgggaaa

SEQ ID NO: 133 - DNA, 22 bp, Zea mays
gttcccttcaagcacttcacat

SEQ ID NO: 134 - DNA, 22 bp, Zea mays
gttccttccaaacacttcacca

SEQ ID NO: 135 - DNA, 22 bp, Zea mays
gttctatgcaagcacttcacga

SEQ ID NO: 136 - DNA, 22 bp, Zea mays
gttctcttcaagcacttcacga

SEQ ID NO: 137 - DNA, 21 bp, Zea mays
gttggtgatctcggaccaggc

SEQ ID NO: 138 - DNA, 19 bp, Zea mays
tagatctgtggcgccgagt

SEQ ID NO: 139 - DNA, 21 bp, Zea mays
tagccaagaatggcttgccta

SEQ ID NO: 140 - DNA, 21 bp, Zea mays
tagccagggatgatttgcctg

SEQ ID NO: 141 - DNA, 19 bp, Zea mays
tatcatgttgcagcttctc

SEQ ID NO: 142 - DNA, 21 bp, Zea mays
tattgacgcggttcaattcga

SEQ ID NO: 143 - DNA, 21 bp, Zea mays
tattggtgaggttcaatccga

SEQ ID NO: 144 - DNA, 21 bp, Zea mays
tcattgagcgcagcgttgatg

SEQ ID NO: 145 - DNA, 22 bp, Zea mays
tccaaagggatcgcattgatcc

SEQ ID NO: 146 - DNA, 20 bp, Zea mays
tccacagctttcttgaactt

SEQ ID NO: 147 - DNA, 20 bp, Zea mays
tcgcaccatcaagattcaaa

SEQ ID NO: 148 - DNA, 21 bp, Zea mays
tcgcttggtgcagatcgggac

SEQ ID NO: 149 - DNA, 21 bp, Zea mays
tcggaccaggcttcaatccct

SEQ ID NO: 150 - DNA, 19 bp, Zea mays
tcggaccaggcttcattcc

SEQ ID NO: 151 - DNA, 20 bp, Zea mays
tcggaccaggcttcattccc

SEQ ID NO: 152 - DNA, 21 bp, Zea mays
tcggaccaggcttcattcccc

SEQ ID NO: 153 - DNA, 21 bp, Zea mays
tcggaccaggcttcattcctc

SEQ ID NO: 154 - DNA, 22 bp, Zea mays
tgaagctgccagcatgatctgg

SEQ ID NO: 155 - DNA, 20 bp, Zea mays
tgacagaagagagtgagcac

SEQ ID NO: 156 - DNA, 21 bp, Zea mays
tgacagaagagagtgagcacg

SEQ ID NO: 157 - DNA, 21 bp, Zea mays
tgagccgtgccaatatcacaa

SEQ ID NO: 158 - DNA, 21 bp, Zea mays
tgagccgtgccaatatcacgt

SEQ ID NO: 159 - DNA, 21 bp, Zea mays
tgattgagccgtgccaatatc

SEQ ID NO: 160 - DNA, 18 bp, Zea mays
tgcagtctccttggctta

SEQ ID NO: 161 - DNA, 21 bp, Zea mays
tgcagttgttgtctcaagctt

SEQ ID NO: 162 - DNA, 19 bp, Zea mays
tgccaaaggagaattgccc

SEQ ID NO: 163 - DNA, 21 bp, Zea mays
tgccaaaggagagctgccctg

SEQ ID NO: 164 - DNA, 21 bp, Zea mays
tgccaaaggagagctgtcctg

SEQ ID NO: 165 - DNA, 21 bp, Zea mays
tgccaaaggagagttgccctg

SEQ ID NO: 166 - DNA, 20 bp, Zea mays
tgcctggctccctgtatgcc

SEQ ID NO: 167 - DNA, 20 bp, Zea mays
tgcctggctccctgtatggc

SEQ ID NO: 168 - DNA, 23 bp, Zea mays
tgctctctgctctcactgtcatc

SEQ ID NO: 169 - DNA, 21 bp, Zea mays
tggaaggggcatgcagaggag

SEQ ID NO: 170 - DNA, 21 bp, Zea mays
tggagaagaagggcacatgca

SEQ ID NO: 171 - DNA, 20 bp, Zea mays
tggagaagcagggcacgtgc

SEQ ID NO: 172 - DNA, 21 bp, Zea mays
tggagaagcagggcacgtgca

SEQ ID NO: 173 - DNA, 20 bp, Zea mays
tggcgctagaaggagggcac

SEQ ID NO: 174 - DNA, 20 bp, Zea mays
tggcgctagaaggagggcca

SEQ ID NO: 175 - DNA, 20 bp, Zea mays
tggcgctagaaggagggctc

SEQ ID NO: 176 - DNA, 19 bp, Zea mays
tgggagatgaaggagccat

SEQ ID NO: 177 - DNA, 19 bp, Zea mays
tgggagatgaaggagccgt

SEQ ID NO: 178 - DNA, 19 bp, Zea mays
tgggagatgaaggagcctt

SEQ ID NO: 179 - DNA, 21 bp, Zea mays
tgtgttctcaggtcgcccccg

SEQ ID NO: 180 - DNA, 21 bp, Zea mays
tgttggcacggttcaatcaaa

SEQ ID NO: 181 - DNA, 20 bp, Zea mays
ttagaagaagaagaagaaga

SEQ ID NO: 182 - DNA, 21 bp, Zea mays
ttagatgaccatcagcaaaca

SEQ ID NO: 183 - DNA, 22 bp, Zea mays
ttcagtttcctctaatatctca

SEQ ID NO: 184 - DNA, 22 bp, Zea mays
ttccacaggctttcttgaactg

SEQ ID NO: 185 - DNA, 22 bp, Zea mays
ttcctaatgcctcccattccta

SEQ ID NO: 186 - DNA, 22 bp, Zea mays
ttcctgatgcctcctattccta

SEQ ID NO: 187 - DNA, 22 bp, Zea mays
ttcctgatgcctctcattccta

SEQ ID NO: 188 - DNA, 22 bp, Zea mays
ttcctgatgtctcccattccta

SEQ ID NO: 189 - DNA, 21 bp, Zea mays
ttggactgaagggtgctccct

SEQ ID NO: 190 - DNA, 20 bp, Zea mays
ttggcattctgtccacctcc

SEQ ID NO: 191 - DNA, 21 bp, Zea mays
tttggagtgaagggagctctg

SEQ ID NO: 192 - DNA, 22 bp, Zea mays
tttggatctgctattttggtat

SEQ ID NO: 193 - DNA, 21 bp, Zea mays
tttggattgaagggagctcga

SEQ ID NO: 194 - DNA, 20 bp, Zea mays
tttggattgaagggagctct

SEQ ID NO: 195 - DNA, 21 bp, Zea mays
tttggattgaagggagctctg

SEQ ID NO: 196 - DNA, 22 bp, Zea mays
tttgttttcctctaatatctca

SEQ ID NO: 197 - DNA, 22 bp, Zea mays
tttgttttcctctaatatctta

SEQ ID NO: 198 - DNA, 294 bp, Zea mays
gcttgaggttgacttgccgaagctacagaagccgcagggtggttgtctatgtattgtgggacataaggcggatgaaacgaagcagtatgcataacctgcttcgactgagcttgttgagatgcagcttcggctagttccttttgcttctggattgtaacatggcacgtcctagtggtgtggcccttgccctctccacagaataggcaaaacagtctccttggctgatctccgaatcttccgccgaagcccctggcgcctctgcctcttggagctggtggccgaaaggaagtttgt

SEQ ID NO: 199 - DNA, 294 bp, Zea mays
gcttgaggttgacttgccgaagctacagaagccgcagggtggttgtctatgtattgtgggacataaggcggatgaaacgaagcagtatgcataacctgcttcgactgagcttgttgagatgcagcttcggctagttccttttgcttctggattgtaacatggcacgtcctagtggtgtggcccttgccctctccacagaataggcaaaacagtctccttggctgatctccgaatcttccgccgaagcccctggctcctctgcctcttggagctggtggccgaaaggaagtttgt

SEQ ID NO: 200 - DNA, 294 bp, Zea mays
gcttgaggttgacttgccgaagctacagaagccgcagggtggttgtctatgtattgtgggacataaggcggatgaaacgaagcagtatgcataacctgcttcgactgagcttgttgagatgcagcttcggccagttccttttgcttctggattgtaacatggcacgtcctagtggtgtggcccttgccctctccacagaataggcaaaacagtctccttggctgatctccgaatcttccgccgaagcccctggcgcctctgcctcttggagctggtggccgaaagaaagtttgt

SEQ ID NO: 201 - DNA, 294 bp, Zea mays
gcttgaggttgacttgccgaagctacagaagccgcagggtggttgtctatgtattgtgggacataaggcggatgaaacgaagcagtatgcaaaacctgcttcgactgagcttgttgagatgcagcttcggctagttccttttgcttctggattgtaacatggcacgtcctagtggtgtggcccttgccctctccacagaataggcaaaacagtctccttggctgatctccgaatcttccgccgaagcccctggcgcctctgcctcttggagctggtggccgaaaggaagtttgt

SEQ ID NO: 202 - DNA, 294 bp, Zea mays
gcttgaggttgacttgccgaagctacagaagccgcagggtggttgtctatgtattgtgggacataaggcggatgaaacgaagcagtatgcataacctgcttcgactgagcttgttgagatgcagcttcggctagttccttttgcttctggattgtaacatggcacgtcctagtggtgtggcccttgccctctccacagaataggcaaaacagtctccttggctgatctccgaatcttccgccgaagcccctggcgcctctgcctcttggagctggtggccgaaagaaagtttgt

SEQ ID NO: 203 - DNA, 294 bp, Zea mays
gcttgaggttgacttgccgaagctacagaagccgcagggtggttgtctatgtattgtgggacgtaaggcggatgaaacgaagcagtatgcataacctgcttcgactgagcttgttgagatgcagcttcggctagttccttttgcttctggattgtaacatggcacgtcctagtggtgtggcccttgccctctccacagaataggcaaaacagtctccttggctgatctccgaatcttccgccgaagcccctggcgcctctgcctcttggagctggtggccgaaagaaagtttgt

SEQ ID NO: 204 - DNA, 292 bp, Zea mays
aataagggcctgcctctgatagccaaggatgacttgcctatgtcctttgtttacaaaggatcagaattgtggacctttgtgttggttcgtaggcagtctccttggctagcctgagtggcccctattgctcatgctaggctcaatcgagactctttgacttgctgcacacaattagacacaggagcctcctcgacctgtgcatgggtgcatacaattaccgtgtgattggttgcccagctctcaacgcctaggctcctcacgagtgttgactgcgcctgcatttctgattggt

SEQ ID NO: 205 - DNA, 292 bp, Zea mays
cttgcctatgtcctttgtttacaaaggacctgaatgtgtggaccattgagaggttcataggcagtctccttggctagcctgagtggcccctattgctcatgctaggcttaatcgagactctttgacttggtgcacgcaattagacacaggagtctcctcgacttgtgcatgggcgtgcatgcaattagacacgaccttgtcatatgtagctgtgtttcagtgtccatgcatgctccattcctagcattttcttgaaaggccaatatagcttggcagtttctctggaaagaat

SEQ ID NO: 206 - DNA, 156 bp, Zea mays
ggttttcgttccgtggctaactgacagaagagagtgagcacacagcgggcagactgcatcgatcgatctgcatccgagacggcgcacgtacgaatgatgatgcagctgctgctgcgtgctcacttctctctctgtcagtcctctagctgctacggc

SEQ ID NO: 207 - DNA, 238 bp, Zea mays
gacggtctggtcttaaggcggtgctcccttcacaccaataaacggtcgatctgatgggtggtacagctgctcgttcatggttcccactgtcccatctcatcagagagagagaagatcatgagagagcgagagatgcttgagatgggcttgtggtttgcatgaccgaggagctgcctcgtccccttcgttgaccgctgtttggagtgaagggagttctgcatcttgctcccatgacttt

SEQ ID NO: 208 - DNA, 185 bp, Zea mays
tgagaggagatgaggtcttctccgccagcagcgcgaccgattttataggcctccgtagctcggcgccaagatctgtggcgccgagctacgaggccgcatcgacgccgcgtcatccgtaagacgcaggtagccgttagtgccacgtcagagctcggcgccatagcctatggcgccgagatgtgtta

SEQ ID NO: 209 - DNA, 123 bp, Zea mays
acacaaccgagctcggcgccaagatctgtggcgccgagctcggtgccacgtcgacgccacgcgtctgggttgtgccaacgcaacacgacctcggcgtcatagcctatggcgccgagctgtgtt

SEQ ID NO: 210 - DNA, 273 bp, Zea mays
gagaatgtctaagagcagtgggaatggaaacatgaaggaaagcatgaactatgttcttttttctgaatgttttcctgatgtctcccattcctacggttcttaggtgctccttcctcttcctttggcctgtgaaattagttctagtgaagaaaacattatacacccacatttaagtttaaatggtgaggccttgagagtgggtcaggaagaggaagaaacgagtgtctaagagcagtgggcatgggaacataggggaaagccaaactttcttta

SEQ ID NO: 211 - DNA, 102 bp, Zea mays
aggaagaagacgacatggcgtggtattgtttcggctcatgtccttcttgactggatgtgatgtgagccgaaccaatatcactcatgtattcttcattctgaa

SEQ ID NO: 212 - DNA, 124 bp, Zea mays
tggccgcgagctagacggggtattgacgcggttcaattcgagagctcgagccctagcagaggccagggggggtggggctctgctctctgattgagccgtgccaatatcacgtcccactcgccct

SEQ ID NO: 213 - DNA, 135 bp, Zea mays
gcaggaagctagtggaggactccaaagggatcgcattgatctaacctgccgatcgacgccgacgtacgtacgtgcccgaggacaagcagatcagtcagtgcaatccctttggaattctccacttagcgcctccag

SEQ ID NO: 214 - DNA, 124 bp, Zea mays
aaacctacgacctagccacgggatattggcgcggttcaatcagaaagcttgcgctccaggcccgaggggctccactctttgattgagccgtgccaatatcacgtcccggccagctttattttcc

SEQ ID NO: 215 - DNA, 120 bp, Zea mays
gcgggctcgcgcgcgcgcggtgacagaagagagtgagcacacggccgggcgtgacggcacgtgccgtcgcggccgcgtgctcactgctctttctgtcatccgctggtccgggcctctcaa

SEQ ID NO: 216 - DNA, 263 bp, Zea mays
gaaaggtgcgcgggcatgctttccacaggctttcttgaactgtgaactcgtgggcgtggtggtggtggtgctggtgctgggtgtgtgggacggaatgattggctcctcccagtcccagtcccagtcccacccaccaattctcttccccccgaccggccgtgaattgaattgaatcgaatcgcatcgctgagcttccccccggctcgctcacgcgacctgttgatggttcaagaaagcccatggaaaccatgcagcctccctcc

SEQ ID NO: 217 - DNA, 278 bp, Zea mays
atttatctatctcttgactcgaaatgggagcagagcaggtttgaaaaaggatcttagagtgtctagggttgggccaggagggtctcttaaccccttcttttttctgcccatcggagttatttcccaaggacttgccgtggtaagggggagaagggggaagaagcacacttgaagagcgcagtacaacggggagttgtatgctgcgttcgggaaggatgaatcgctcccgaaaaggagtctattgattctctcccaattggttggatcgtaggggcgat

SEQ ID NO: 218 - DNA, 209 bp, Zea mays
cgcgacacacgcacctgcacgtatagcagcgggctttaggtctcttgggccaacactcccaaaaagctagccttataggggttgtaccctcaaccatataaaccatgctattcccaacactctccccctcacacattgtgagccgagatttgtctgagaatgcactgggccaacctggctctgataccaaatgttggaaccggaccgcc

SEQ ID NO: 219 - DNA, 303 bp, Zea mays
gtcttgagaatgcactgggccaacctggctctgataccaattgttggaaccggaccgtccacacatggcgtgtccgtcggggccgcccgcacacacggcgcgcccacccagcctgacgggccgcgacacacgcgcccgcacgtatagcagcgggctttaggtctcttgggccaacactcccccaaaaaagctagcctgatagggggttgcaccctcaaccatataaaccatgcttttccactctcaccagacaatgtgggactattcccaacaggcggcaggtgctgctgctgaggcacctcc

SEQ ID NO: 220 - DNA, 241 bp, Zea mays
cgcgacacacgcgcccgcacgtatagcagcgggctttaggtctcttgggccaacactcccccaaaaaactagcctgatagggggttgcaccctcaaccttataaaccatgctaccacaccctcaccacacaatgtgggactattcccaacaatctccccctcacacattgtgagccaagatttgtctgaaaatgcattgggcctacctggctctgataccaattgttggaaccggaccgcc

SEQ ID NO: 221 - DNA, 242 bp, Zea mays
cgcgacacacgcgcccgcacgtatagcagcgggctttaggtctcttgggccaacactcccccaaaaagctagcctaatagggggttgcaccctcaaccatataaaccatgcttttccactctcaccagacaatgtgggactattcccaacaatctccccctcacacattgtgagccgagatttgtcttgagaatgcactgggccaacctggctctgataccaattgttggaaccggaaccgc

SEQ ID NO: 222 - DNA, 238 bp, Zea mays
tgacttaataaagggccattgtgaagtgtttgggtgaactcttagcatcatgaagcatttagttataataatataagttatccatgtgaataccatatgggatacacctttgaacaatgtttggtgttaccatgagttcccttcaagcacttcacatgaggcaccattcaaatgacaactccatttaagattatgtgtaatgtgaagtgtttgggggaactcttggtggtactcaaca

SEQ ID NO: 223 - DNA, 193 bp, Zea mays
gagccttatgctctaccaactgggctaggcaagatttgtgcttacagctttccaacaaaactattaaaacacaaccgagctcggcgccaagatctgtggcgccgagctcggtgccacgtcggcgccacggcatccaggtgtgccagcgtagcacgtacctcgccgccataggctatgacgccgagctgtgtta

SEQ ID NO: 224 - DNA, 270 bp, Zea mays
ggcgggggctatcggcgagctcggcgggcggcgaccggggcactctcgccgagcgcgggcggcggcggaggtaggtaggcgcggcggcgggctaaggaacggcggcagcgggcgtcggttccgtgaaacagagaacaaacgaagaggaaagtgaggtcacggttaagtttcctagctcggcgccaagatctgtggcgccgagctaggtgtgccacgcggacttccacgtcacgaagctcggcgccacagcctgtggcgccgagctgtgtt

SEQ ID NO: 225 - DNA, 337 bp, Zea mays
gcgccggtcgagcggcgacctcggcggcgagctcggcgggctgcgggcgggcggcgcgctcgccgggcgcgctcggcgggctgcgggcgggcggctagctcggcggcggcgggctggcggcggcgggctggcggcggcgggctggcaggcggcgagcggcgaactcggccgtaggaaaatgaagccgcgagcgaaacagagaagaaacgaagaggaaaggcgtttcggttaagttccctagctcggcgccaagatctgtggcgccgagctaggtgtgccacgcgggctgccacgtcacgaagctcggcgccataggctatggcgccgagctgtgtta

SEQ ID NO: 226 - DNA, 348 bp, Zea mays
atcatatgaactatatatcctaggagcaacaatcaaaaccaataatcgaaaaattacaacacaatatacaaaacgaatcagtgagacactataccttggtatacaaagtattccaactcgaatctagccgttttttaagaagatttgaatggagggaaagttgagaaatgaggagggtgcacctctcgactagcagaactgtcgatttataggactttctagctcggcgccaagatctgtggcgccgagctaggaggccgtgtcggcgccacgctagtcctagccgccgtgagccgccaccaccacgccagagctcggcgccattggctatggtgccgacatgtgtta

SEQ ID NO: 227 - DNA, 114 bp, Zea mays
ggaattcgtagctcggcgccaagatctgtggcgccgagctacgaggccgcgccgccaccacgtcagagccaggtcagccctaggcgcaagtagccgttgctgccacgtcacagc

SEQ ID NO: 228 - DNA, 95 bp, Zea mays
ggaattcgtagctcggcgccaagatctgtggcgccgagctacgaggccgcgccgccgccacgtcagcgccaggtcagccctggacgcagctagcc

SEQ ID NO: 229 - DNA, 285 bp, Zea mays
gcgccgggcgggcggcgagctcggcgggcgagctcggcgggctgcgggcgggcggcgagctcggcggcggcgggctggcggcgagctcggcggcggcggcggtatgagcggcggcgggcgtaggaaacgaaagccgagcgaaacagagaagaaacgaagaggaaagggggtttcggttaagtttcctagctcggcgccaagatctgtggcgccgagctaggtgtgccacgcgggctgccacgtcatgaagctcggcgccatagccgatggcgccgagctgtgtta

SEQ ID NO: 230 - DNA, 148 bp, Zea mays
gcatcccgtagctcggcgccaagatctgtggcgccgagctacgaggccacgtcgccaccacgtcagtgctaggtcagccctaggcgaaggtagccgttgctgccacgtcagacttcggcgccataggctgtggcgccaagctgtgtta

SEQ ID NO: 231 - DNA, 123 bp, Zea mays
acacaaccgagctcggcgccaagatctgtggcgccgagctcggtgccacgtcgacgccacgcgtctgggttgtgccaacgcaacacgacctcggtgccatagcctatggcgccgagctgtgtt

SEQ ID NO: 232 - DNA, 370 bp, Zea mays
tttgtgccaacgtatgtaattcgcaccatcaaatatattggttttttttaaatgagtagtggctagataaaaaaatataggtgagaaataaatttgaacggacacaccagcgacataaacaaaaaaaaccaaataaaaatgcaaactgtggggtttgaacccacgaccacaaggttagaagccttgtgctccaccaagtgggctagctgggctttgtgttcatgtctgtaacaaatatattaataacacaaccgagctcggcgccaagatctgtggcgccgagctcggtgccacgtcgacgccacgcgtctggggttgatccaacgcaacacgacctcggcgccatagcctatggcgccgagctgtgtta

SEQ ID NO: 233 - DNA, 105 bp, Zea mays
acacaaccgagctcggcgccaagatctgtggcgccgagctcggtgccacgtcaacgccacggcgtccgggttgtgccgacgcatcacgtacctcggcgccataac

SEQ ID NO: 234 - DNA, 351 bp, Zea mays
gcgccggtcgagcggcgacctcggcggcgagctcggcgggctgcgggcgggcggcgcgctcgccgggcgcgctcggcgggctgcgggcgggcggctagctcggcggcggcgggctggcggcgacgggctggcggcggcgggctggcggcggcgggctggcaggcggcgagcggcgaactcggccgtaggaaaatgaagccgcgagcgaaacagagaagaaacgaagaggaaaggcgtttcggttaagttccctagctcggcgccaagatctgtggcgccgagctaggtgtgccacgcgggctgccacgtcacgaagctcggcgccataggctatggcgccgagctgtgtta

SEQ ID NO: 235 - DNA, 134 bp, Zea mays
ggcattcgtacctcggcgccaagatctgtggcgccgagctacgaggccgcgccgccgccacgtcggagccaggtaagccctggacgcaactagccgttgcggccacgtcagagctcggcgccataggctgtggc

SEQ ID NO: 236 - DNA, 106 bp, Zea mays
tggtataagggggtcggcgccagatctgtggcgccgaccccactgacaggattttcgccgccgacaagggggtcggtgccaagatctatggcgccgaccccctgga

SEQ ID NO: 237 - DNA, 392 bp, Zea mays
gcggtgcgcggtggcgggcgtgcggcggccggagcgggcggcggggcgtctcgcggcggcggctcggctagcggcgagggagcgtggaggctggaaacagagaagaaacgcagagaagaaacgtgcctcgcggttaagtcctagctcggcgccaagatctgtggcgccgagctaggtgccacgcggacatccacgtcacccctagccgccatggccacgtcatctcggcgccataggttatggcgccgagctaagggtccaaaattgagattaaaattttttaggtctaaacgtgattttaatcgtgataaagggctaaaatgtaaaaagttcggtcctcacgatgacatgtggacacggagctccaggatcctctcccacgacgactcgcc

SEQ ID NO: 238 - DNA, 182 bp, Zea mays
agaagaggtgggtgcagctctcggccaagagaacgatcgatttataggacttactagctcggcgccaagatctgtggcgccgagctagaaagccacgtcatcgtcacggcaaccctggccgccgctggccgccgaagccacgttagagttcgtcgccataacctatggtgccgagtaaaagg

SEQ ID NO: 239 - DNA, 148 bp, Zea mays
ggaattcgtagctcggcgctaagatctgtggcgccgagctacgaggccgtgccgccgccacgtcagagccagctaagccctagacgcaactagccgttgcggccacgtcacagctcggcgccataggctgtggcgcacagctcggcgc

SEQ ID NO: 240 - DNA, 554 bp, Zea mays
  misc_feature (330)..(429): n is a, c, g, or t
cggcggagctcgggcggagctcgggccgagctcgagggcggagctcgcggcggcgtgaagagggcggagctcgcggcggcggccagcggagctcggggcggccggcgtgaagagctcgagggcggagctcgcggcggcgccggagctggggcaagcggcggcggcgtgagttgtggacggcaggcggcgacggcttgatttcgaatgagcagagaagacaagaaacgcgcagagagaaggctgtttgcggatttttcctagctcggcgccaagatctgtggcgccgagctaggtgccacgcaggacagccacgtcacgaagctcgggcgnnnnnnnnnnnnnnnnnnnnnnnnnnnnnnnnnnnnnnnnnnnnnnnnnnnnnnnnnnnnnnnnnnnnnnnnnnnnnnnnnnnnnnnnnnnnnnnnnnnntccttatccatataataccatatccatacacatacttacctccaccatatgtcccaaatcaaatgtggggcatgccaccatatccatttgggatgccacagtatcccgcctggggggcaccccaa

SEQ ID NO: 241 - DNA, 148 bp, Zea mays
ggaattcgtagctcggcgccaagatctgtggcgccgagctacgaggccgcgccgccgccacgtcagagccaggtcagccctggacgcaactagccgttgcggccacgtcacagctcggcgccataggctgtggcgccgagctgtgtta

SEQ ID NO: 242 - DNA, 148 bp, Zea mays
ggcatccgtagctcgccgccaagatctgtggcgccgagctacgaggccgcgtcgccaccacgtcgatgccaggtcagccctaggcgaaggtagccgttgctgccacgtcagacctcggcgccataggctgtttcgcctctgtgttacc

SEQ ID NO: 243 - DNA, 114 bp, Zea mays
ggaattcgtagctcggcgccaagatctgtggcgccgagctacgaggccgcgccgccgccacatcggagtcaggtcagccctaggcgcaagtagccgttgctgccacgtcatagc

SEQ ID NO: 244 - DNA, 329 bp, Zea mays
ggcgggcggggcgggcgacctcggcgtacctcgccggagctgggaccgagggcggggaggccggagagaaggcggggcggccgccggagctgggcggacggggtcgccggagagaagggcggggcggcggcgatttccgagcggcggcgggtggcttgcgcgggtggcttgcgagatttccaaacaacagagaagaaacgcacagagagaaaggtgtgttgcggatatttcctagctcggcgccaagatctgtggcgccgagctaggtgacacgcgggctgccacgtcacgtagttcggcgccataggccgtggcgccgagctgtgtta

SEQ ID NO: 245 - DNA, 134 bp, Zea mays
ggaattcgtagctcggcgccaagatctgtggcgccgagctacgaggccgcgccgccaccacgtcatagccaggtcagccctgaccgtaactagccgttgcggccacgtcagagctcggcgccataggctgtggc

SEQ ID NO: 246 - DNA, 172 bp, Zea mays
ggcgtaggaaacgaaaacggtcgagcgaaacagagaagaaacgaagaggaaagggggtttcggttaagtttcctagctcggcgccaagatctgtggcgccgagctaggtgtgccacgcgggctgccacgtcatgaagctcggcgccataggctatggcgccgagctgtgtta

SEQ ID NO: 247 - DNA, 105 bp, Zea mays
aaaagaggtggacacaactctcggccagaagaacggccgatttataggacttcctagctcggcgccaagatctgtggcgccgagctagaaagccacgtccgcgcc

SEQ ID NO: 248 - DNA, 148 bp, Zea mays
ggaattcgtagctcggcgccaagatctgtggcgccgagctacgaggccgcgccgccgccacgtcagagacaggtcagccctggacgcaactagccgttgcggccacgtcacagctcggcgccataggctgtggcgccgagctgtgtta

SEQ ID NO: 249 - DNA, 106 bp, Zea mays
ttttttcctaactcggcaccaagatctgtggcgccgagctaggtgccacgcgggactgccacgtcccgaagctcggcgccacagtctgtggcgccgagctgtgtta

SEQ ID NO: 250 - DNA, 105 bp, Zea mays
acacaaccgagctcggcgccaagatctgtggcgccgagctcggtgccacgtcgacgccacggcgtccgggttgtgccgacgcatcacgtacctcggcgccataac

SEQ ID NO: 251 - DNA, 195 bp, Zea mays
tgagaggaaatgtgctgctctcggccagcagcgcggccggttttataggcctccgtagctcggcgccaagatctgtggcgccgagcaacgaggccgcgtcggcgccgcgtcaatgccatgttagccctaggcgcagggagccgttactaccacgtcacagctcggcgccataggctgtggcgccgagatgtgtaa

SEQ ID NO: 252 - DNA, 134 bp, Zea mays
ggcattcgtacctcggcgccaagatctgtggcgccgagctacgaggccgcgccgcccccacgtcggagccaggtaagccctggacgcaactagccgttgcggccacgtcagagctcggcgccataggctgtggc

SEQ ID NO: 253 - DNA, 104 bp, Zea mays
ttatttcctagctcggcgccaagatctgtggcgccgagctaggtgccacgcaggctgccaggtcacgatgctcggcgccacagcctgtggcgccgagctttgtt

SEQ ID NO: 254 - DNA, 363 bp, Zea mays
tgaacagcaggccattcgtgtcgcgacgacaaagccagcacgcagtaggccagcaacagggaaggcacgtatgtcagcttctcgtcatcagcggaaaacgaaccttagatctgtggcgccgagtcgtattatctcggagcacagtttgtggcaccgagaaaaggatctaaaaataagattaagtcatataagggtctaaattttaacatttttcaaaaaatgttaaaatacaaaaaattggagtttccaaccacatgactttggaaaggttgggaacataaatatctagacaaaacatatacagacatacagtagaggaggcgaaaggatggagccacagaacgaacgaacaagtaccagtgc

SEQ ID NO: 255 - DNA, 148 bp, Zea mays
ggagtccgtagctcggcgccaagatctgtggcgccgagctacgaggccgcgtcgccgccacatcgatgacaggtcagccctgggcgcaggtagccgttgctgccgcgtcatacctcggcgccataggctgtggcgccgagctgtgtta

SEQ ID NO: 256 - DNA, 106 bp, Zea mays
ttttttcctagctcggcgccaagatctgtggcgccgagctaggtgccacgcgggactgccacgtcagggagctcggcgccataggctgtggcgccgagctgtgtta

SEQ ID NO: 257 - DNA, 148 bp, Zea mays
ggcattcgtagctcggcgccaagatctgtggcgccgagctacgaggccgcgccgccgccacgtcagagccaggtaagccctggacgcaactagccgttgcggccacgtcacagctcggcgccataggctgtggcgccgagctgtgtta

SEQ ID NO: 258 - DNA, 180 bp, Zea mays
tgctaacggcggcggtgggctcggcgcgaaaactgaagaacagacgaaacgggcagagagaaaggcgtcgggcggatatttcctagctcggcgccaagatctgtggcgccgagctaggtgacacacgggatgacacgtcacgaagctcggcgccataggctgtggcgccgagctgtgtta

SEQ ID NO: 259 - DNA, 148 bp, Zea mays
ggaattcgtagctcggcgctaagatctgtggcgccgagctacgaggccgcgccgccgccacgtcagcgccaggttagccctggacgcagctagccgttgcggccacgtcacagctcggcgccataggctgtggcgccgagctgtgtta

SEQ ID NO: 260 - DNA, 321 bp, Zea mays
ggccatcgtgttgtttgtcgtcggcgggcgagctcggcgggcgccgggcgggcggcgagctcggcgggctgcgggcgggcggcgagctcggctggcggcgggcgggcggcgagctcggctggcggcggcggcggcggtatgcgcggcggcgggcgtaggaaacgaaagcggcgagcgaaacagagaagaaacgaagaggaaagggggttcggttaagtttcctagctcggcgccaagatctgtggcgccgagctaggtgtgccacgcgggctgccacgtcatgaagctcggcgccatagccgatggcgccgagctagctaa

SEQ ID NO: 261 - DNA, 195 bp, Zea mays
tgagaggaaatgtgctgctctcggccagcagcgcggccgtttttataggcgtacgtagctcggcgccaagatctgtggcgccgagctacgaggccgcatcggcgtcgcgtcagtgtcatgtcagtcctagacgcagggagccgttgctgccacgccacacctcggcaccataggctgtggcgccgagctgtgtta

SEQ ID NO: 262 - DNA, 124 bp, Zea mays
acacaaccgagctcggcgccaagatctgtggcgccgagctcggttccacgtcgacgccacgcgtctgggttgtgccaacgcaacacgacctcggcgccatagcctatggcgccgagctgtgtta

SEQ ID NO: 263 - DNA, 359 bp, Zea mays
ggaatcataactgataacaatatgcgcaccaatcaaaactaattaatcgaaaccatacaacgcaatatacgtaacaaacgaatcagtgagacaccataccttggtcttcaagatatacagatcaaataaaagttttccaactcgaatatgatgattggagcacctctcggcggtatggataaagatgaaaacgagccgggcgtagctctcggccaggaaagagccgatttataggacttcctagctcggcgccaagatctgtggcgccgagctaggtgccacgtgagcgccgcgtcagccctcgccagccagcgagtcacgtacctcggcgccataggctgtggcgccgaggtaggcgc

SEQ ID NO: 264 - DNA, 373 bp, Zea mays
ggcgttcaatccgttcgggttcgtgacggacaacccctccagccgcagcgccatccagctgcccgcggttcccgccgaggacggcaatgtcggccagatgctctacgtaatgccttatatgcctcgctttgtctacttgacttcttcgtcttctgattacagagcagggaaccatatatagaagtcttgtgctctaccaactgagctagatgggctttgtgtttatatctccaaccaatatgttaataatacaatcgagctcggcgccacgatctgtggcgccgagcttggtgccacgtcgacgccacgcgtctgagttgtgccaacacaacacgtacctcggcgccatagcctatggcgctgagctgtgtga

SEQ ID NO: 265 - DNA, 186 bp, Zea mays
gatatattcttgagacccgtgtgaagtgtttggaggaactcttgataccaataagtttttccccaaatataatagctggttgcttcccggagttccttccaaacacttcaccagctaggccatgcacaagatgaacccacattaggctagtgaagtgtttggaggaactctaggtggcactccgac

SEQ ID NO: 266 - DNA, 230 bp, Zea mays
gcttcgtactgagagcttttgtgaagtgtttgggggaactcttggtgtcacaaatcatttggcggatcttggtcaagtgtgtgacagaagaaattatttaaggacgtggatccatataccttgaaagaattaggtttggtgtcttcaggagttctcttcaagcacttcacgaggcatcacactgagagcttttgtgaagtgtttgggggaactcttggtgtcacaaatca

SEQ ID NO: 267 - DNA, 241 bp, Zea mays
ggtccctaatcattaacaattgtgttgctttgttcttgatgtatagcattcgagaacaaggaccaacattggcgcccaccgtggggaactcacttccatagttgtgatgatggcttcgcacaataaccaagctgtagcaccttcggccacgaagctggtgctcccaatcataggtggttcaagctctgaaccagccaacaacaagaagaagaagaagaaggaagcacaaagaagagtgtag

SEQ ID NO: 268 - DNA, 229 bp, Zea mays
tgccatttatgtcagcagacgaagaagaagaagaagaagcctattttgatgatcgcgagcagtttgccccgcctccctaccatggggatccgggtcaatcatcctctcaccctccgccccaggatccttctagcagtgctcctctcccggatcagtctggggaagaacactttgcctctcacctggcgcaccacttctttgctcctcatcagcctcctcctaattggtg

SEQ ID NO: 269 - DNA, 285 bp, Zea mays
catttatgtcaggagacgacgaagaagaagaagaagaagcctactttgatgatcgcgagcagtttgccccgcctccctaccaaggggatccgggtcaattatcctctcaccctccgccccaggatccttctggaagtgctcctcccccggatcagtctcgggaagaacactttgcctctcacctggcgcaccatttcttcgctccgcatcagcctcctcctaactggtgatctttgtgttggtggctctctccttttttggttcttgttgccaaaaagggggaga

SEQ ID NO: 270 - DNA, 274 bp, Zea mays
gcccgcttggtccatgggatttcgacatttttctctatgtgccggaacatttctgctgatgtacatgagctggcacggcgtcagcgggagatgacgacaatcttcgtcgtcaagcttccactatgggtatgccctttcgcccctcgctcgcctgacgtgcctctccatcctcctctcccgaagatcaatgagtggcaccagcaggcctacgaggtgccatttatgtcaacagacgaagaagaagaagaagaagcctacgttgatgatcgcgagc

SEQ ID NO: 271 - DNA, 193 bp, Zea mays
caacctccccctcgcgccagggctccatcctacaacctaaatggctctatgcgcagcagagggtagggcgattcgagtgtggttccctaccggagatgaaggagccgagaaggttgttcacacaaacaggacggtgcacggcggagcgcccgcgctggtgctccggtcaccacttgattcggccaacggtgca

SEQ ID NO: 272 - DNA, 226 bp, Zea mays
ctcattgggagtaaaaggggttcagtttcctctaatatctcatcttaaatggcccatcatctcctgagatgtttgtctgcatatacctgaaatgcagtcacccaaagtgagtactggaggaatcattctgtaagagatacaatccatgttggtcccatcttatttgttcctcccatatctgagctcggttgaattgagtgatactgagttgttgactgctgttagt

SEQ ID NO: 273 - DNA, 294 bp, Zea mays
gcttgaggttgacttgccgaagctacagaagccgcagggtggttgtctatgtattgtgggacataaggcggatgaaacgaagcagtatgcataacctgcttcgactgagcttgttgagatgcagcttcagctagttccttttgcttctggattgtaacatggcacgtcctagtggtgtggcccttgccctctccacagaataggcaaaacagtctccttggctgatctccgaatcttccgccgaagcccctggcgcctctgcctcttggagctggtggccgaaaggaagtttgt

SEQ ID NO: 274 - DNA, 294 bp, Zea mays
gcttgaggttgacttgccgaagctacagaagccgcagggtggttgtctatgtattgtgggacataaggcggatgaaacgaagcagtatgcataacctgcttcgactgagcttgttgagacgcagcttcggctagttccttttgcttctggattgtaacatggcacgtcctagtggtgtggcccttgccctctccacagaataggcaaaacagtctccttggctgatctccgaatcttccgccgaagcccctggcgcctctgcctcttggagctggtggccgaaaggaagtttgt

SEQ ID NO: 275 - DNA, 294 bp, Zea mays
gcttgaggttgacttgccgaagctacagaagccgcagggtggttgtctatgtattgtgggacataaggcggatgaaacgaagctgtatgcataacctgcttcgactgagcttgttgagatgcagcttcggctagttccttttgcttctggattgtaacatggcacgtcctagtggtgtggcccttgccctctccacagaataggcaaaacagtctccttggctgatctccgaatcttccgccgaagcccctggcgcctctgcctcttggagctggtggccgaaaggaagtttgt

SEQ ID NO: 276 - DNA, 294 bp, Zea mays
gcttgaggttgacttgccgaagctacagaagccgcagggtggttgtctatgtattgtgggacataaggcggatgaaacgaagcagtatgcataacctgcttcgactgagcttgttgagatgcagcttcggctagttccttttgcttctggattgtaacatggcacgtcctagtggtgtggcccttgccctctccacagaataggcaaaacagtctccttggctgatctccgaatcttccgccgaagcccctggcgcctctgcctcttggagctgatggccgaaagaaagtttgt

SEQ ID NO: 277 - DNA, 343 bp, Zea mays
gcttgaggttgacttgccgaagctacagaagccgcagggtggttgtctatgtattgtgggacataaggcggatgaaacgaagcggtatgcataacctgcttcgactgagcttgttgagatgcagcttcggctagttccttttgcttctggattgtaacatggcacgtcctagtggtgtggcccttgccctctccacagaataggcaaaacagtctccttggctgatctccaaatcttccgccgaagcccctggcgcctctgcctcttggagccggtggccgaaaggaagtttgttgttgccccgaagcctgtgaggagcactgcggcctgttttgctgactcc

SEQ ID NO: 278 - DNA, 294 bp, Zea mays
gcttgaggttgacttgccgaagctacagaagccgcagggtggttgtctatgtattgtgggacataaggcggatgaaacgaagcagtatgcataacctgcttcgactgagcttgttgagatgcagcttcggctagttccttttgcttctggattgtaacatggcacgtcctagtggtgtggcccttgccctctccacagaataggcaaaacagtctccttggctgatctccaaatcttccgccgaagcccctggcgcctctgcctcttggagctggtggccgaaagaaagtttgt

SEQ ID NO: 279 - DNA, 294 bp, Zea mays
tgttgaggttgacttgccgaagctacagaagccgcagggtggttgtctacgtattgtgggacataaggcggatgaaacgaagcagtatgcataacctgcttcgactgagcttgttgagatgcagcttcggctagttccttttgcttctggattgtaacatggcacgtcctagtggtgtggcccttgccctctccacagaataggcaaaacagtctccttggctgatctccgaatcttccgccgaagcccctagcgcctctgcctcttggagctggtggccgaaaggaagtttgt

SEQ ID NO: 280 - DNA, 249 bp, Zea mays
tctatgtattgtgggacataaggcggatggaacgaagcagtatgcaaaacctgcttcgactgagcttgttgagatgcagcttcggctagttccttttgcttctggattgtaacatggcacgtcctagtggtgtggcccttgccctctccacagaataggcaaaacagtctccttggctgatctccgaatcttccgccgaagcccctggcgcctctgcctcttggagctggtggccgaaaggaagtttgt

SEQ ID NO: 281 - DNA, 399 bp, Zea mays
gcttgaggttgacttgccgaagctacagaagccgcagggtggttgtctatgtattgtgggacataaggcggatgaaatgaagcagtatgcaaaacctgcttcgactgagcttgttgagatgcagcttcggctagttccttttgcttctgtattgtaacatggcacgtcctagtggtgtggcccttgccctctccacagaataggcaaaacagtctccttggctgatctccgaatcttccgccgaagcccctggtcatctcagaaaatctgaaggcctcctcccttctttggcgaaagtcattgtcggcacgaatgtactcatccatcttttggagcaatttctccaaggtctgaggaggcttccgagcaaagtattgagctgcaggtccaggacgaagc

SEQ ID NO: 282 - DNA, 294 bp, Zea mays
gcttgaggttgacttgcggaagctacggaagctgcagggtggttgtctatgtattgtgggatataaggcggatgacacgaagcagtatgcatgacctgcttcggctgagcttgttgagatgcagcttcggcaatttccttttgcttctggattgtaatgtggcacgacctagtggtatggcccttgccttctccacagaacaagcaaaacagtctccttggctgatctccgaatcttccgccgaagcccctggcgcctctgcctcttggagctggtggccggaaggaagtttgt

SEQ ID NO: 283 - DNA, 343 bp, Zea mays
gcttgaggttgacttgccgaagctacagaagccgcagggtggttgtctatgtattgtgggacataaggcggatgaaatgaagcagtatgcaaaacctgcttcgactgagcttgttgagatgcagcttcggctagttccttttgcttctggattgtaacatggcacgtcctagtggtgtggcccttgccctctccacagaataggcaaaacagtctccttggctgatctccgaatcttccgccgaagcccctggcgcctctgcctcttggagttggtggccgaaaggaagtttgttgttgccccgaagcctgtgaggagcactgcggcctgttttgctgactcc

SEQ ID NO: 284 - DNA, 285 bp, Zea mays
tgacttgcggaagctacggaagctgcagggtgattgtctatgtattgtgggatataaggcggatgacacgaagcagtatgcatgacctgcttcggctgagcttgttgagatgcagcttcggcaatttccttttgcttctggattgtaatgtggcacgacctagtggtatggcccttgccttctccacagaacaagcaaaacagtctccttggctgatctccgaatcttccgccgaagcccctggcgcctctgcctcttggagctggtggccggaaggaagtttgt

SEQ ID NO: 285 - DNA, 294 bp, Zea mays
gcttgaggttgacttgccgaagctacagaagccgcagggtggttgtctatgtattgtgggacataaggcggatgaaatgaagcagtatgcaaaacctgcttcgactgagcttgttgagatgcagcttcggctagttccttttgcttctgtattgtaacatggcacgtcctagtggtgtggcccttgccctctccacagaataggcaaaacagtctccttggctgatctccgaatcttccgccgaagcccctggcgcctctgcctcttggagctggtggccgaaaggaagtttgt

SEQ ID NO: 286 - DNA, 294 bp, Zea mays
gcttgaggttgacttgccgaagctacagaagctgcagggtggttgtccatgtattgtgggatataaggcggatgatacgaagcggtatgcatgacctgcttcggctgagcttgttgagatgcagcttcggctatttccttttgcttctggattgtaacatggcacgtcctagtggtatggcccttgccttctccacagaacaagcaaaacagtctccttggctgatctccgaatcttccgccgaagcccctggcgcctctgcctcttggagctggtggccggaaggaagtttgt

SEQ ID NO: 287 - DNA, 294 bp, Zea mays
gcttgaggttgacttgccgaagctacagaagccgcagggtggttgtctatgtattgtgggacataaggcggatgaaacgaagcggtatgcataacctgcttcgactgagcttgttgagatgcagcttcggctagttccttttgcttctggattgtaacatggcacgtcctagtggtgtggcccttgccctctccacagaataggcaaaacagtctccttggctgatctccgaatcttccgccgaagcccctggcgcctctgcctcttggagctggtggccgaaaggaagtttgt

SEQ ID NO: 288 - DNA, 294 bp, Zea mays
gcttgaggttgacttgccgaagctacagaagccgcagggtggttgtctatgtattgtgggacataaggcggatgaaacgaagcagtatgcataacctgcttcgactgggcttgttgagatgcagcttcggctagttccttttgcttctggattgtaacatggcacgtcctagtggtgtggcccttgccctctccacagaataggcaaaacagtctccttggctgatctccgaatcttccgccgaagcccctggcgcctctgcctcttggagctggtggccgaaagaaagtttgt

SEQ ID NO: 289 - DNA, 294 bp, Zea mays
gcttgaggttgacttgccgaagctacagaagccgcagggtggttgtctatgtattgtgggacataaggtggatgaaacgaagcagtatgcaaaacctgcttcgactgagcttgttgagatgcagcttcggctagttccttttgcttctggattgtaacatggcacgtcctagtggtgtggcccttgccctctccacagaataggcaaaacagtctccttggctgatctccgaatcttccgccgaagcccctggcgcctctgcctcttggagctggtggccgaaaggaagtttgt

SEQ ID NO: 290 - DNA, 239 bp, Zea mays
ctgtgaagatgcggactacctgcacctggacagaaagaccctatgaagctttactgttccctgggattggctttgggcttttcctgcgcagcttaggtggaaggcgaagaaggcccccttccgggggggcccgagccatcagtgagataccactctggaagagctcggattctaaccttgtgtcagacccgcgggccaagggacagtctcaggtagacagtttctatggggcgtaggcc

SEQ ID NO: 291 - DNA, 153 bp, Zea mays
gatatgtgtcatttgaagtgaggattagagggacttgaaccattcatagcttgttcggttatgtctggatcgaagagggttggaaggtcctttctagttaaaattaaatagaaagagattgaatccctttaacctcctatccagatgtgacca

SEQ ID NO: 292 - DNA, 266 bp, Zea mays
aggaaggagacgacatggcgtggtattgtttcggctcatgtccttcttcgatcgagtcttgccgttggatttggatgtgatgtgagccgaaccaatatcactcatgtactcttcattcccaaggaaggtccagagacgttacgggctcggtaagggttctgatcatgctgaatggttcttaattagtcccgtgccatgccagtagaacaaggttaggctgatctttctgatattttggttctgatctgtgtttattcgatctctgt

SEQ ID NO: 293 - DNA, 116 bp, Zea mays
gctaggacaatgccgggaggtattggcgtgcctcaatccgaaggcgtggctgactggcgcggcagccatgttcttggattgagccgcgtcaatatctccccttgcttgtctcgcat

SEQ ID NO: 294 - DNA, 99 bp, Zea mays
ggttggctgagagagtgcgatgttggcacggttcaatcaaatcgccggccgggttgacttgttgattgagccgtgccaatatcacaaccttctctagcc

SEQ ID NO: 295 - DNA, 129 bp, Zea mays
agaaatggaatagtagctatgatgttggctcggctcactcagacgacgtacgcgcgcgagatcatgtgctatgccgctgctgtttctgattgagccgtgccaatatcttagtactcttccatgcatacg

SEQ ID NO: 296 - DNA, 138 bp, Zea mays
tgtcagacccgcgggccaagggacagtctcaggtagacagtttctatggggcgtaggcctcccaaaaggtaacggaggcgtgcaaaggtttcctcgggcaggtttacatagttacggttcatttacattaccatctaa

SEQ ID NO: 297 - DNA, 476 bp, Zea mays
ctgtgaagatgtggactacctgcacctggacagaaagaccttatgaagctttactgttccctgggattggttttgggcttttcctgtgcagcttaggtggaaggcgaagaaggcccccttccggggggtcatgccatcagtgatataccactctggaagagctcggattctaaccttgtgtcagaccctcgggccaagggacagtctcaggtagacagtttctatggggagtaggcctcccaaaagttaacggatgcatgcaatggtttcctcaggccatacaaacattggtcctcgagtgcaaaggaagaagggagcttgactgcaagattcacccgttgagcagagacgaaagtcggcccatttaaataggtgtcaagtggaagtgcagtgatgtatgcagctgaggcatcctaacgaacgagcgatttgaaccttgttcctacatgacctgatcaaatcgatcaggcacttgt

SEQ ID NO: 298 - DNA, 277 bp, Zea mays
atttatctatctcttgactcaaaatgggagcagagcaggtttgaaaaaggatcttagagtgtctagggttgggccaggagggtctcttaaccccttctttttctgtccatcggagttatttcccaaggacttgccgtggtaagggggagaagggggaagaagcacacttgaagagcgcagtacaacggggagttgtatgctgcgttcgggaaggatgaatcgctcccgaaaaggagtctattgattctctcccaattggttggatcgtaggggcgat

SEQ ID NO: 299 - DNA, 202 bp, Zea mays
gagcacgagcgaggtgtggctggaagaagcagccggggcctgtgtgctatatacccctcgcaagctctcctcactcctctcctgtgcctgcctcttccattccttctgctacgccattatatgtttgcaagcgtcagaagtgcatgcttctgcgcagttgccctgtgatgaggcaaccaacagccaaacatcgctggcattc

SEQ ID NO: 300 - DNA, 167 bp, Zea mays
gagacgatccaagtgaaggagaaggaagccattgctctatgtggaatgttctaggcctcttcgtacatgcatggctccggcctcgtgcaacaacatcggcaccctactgctcgcacttgttgggatctcggaccaggcttcattcccctcagaggtagcttttgtac

SEQ ID NO: 301 - DNA, 152 bp, Zea mays
aagctacttgcttctgagtggaatgttgtctggttcaaggtcttgctttccgatttgaggatgatccatgcttgcatgtgtagttttttttgttcctcagatctacaagatctcggaccaggcttcattcccctcaggaatagcttcaaaat

SEQ ID NO: 302 - DNA, 233 bp, Zea mays
ccaagaaatagagatgagaggatgagagggggtccgggcgggttgagagcgagggacctggtgggagaagggggaaagatatgaagctacttgcttttgagtgaaatgttgtctggttcaaggtcttgctttgcgatttgaggatgatccatgcttgcatgtgttgttttttattcctcggatatgcaagatctcggaccaggcttcattcccctcaggaatagcttcaaaat

SEQ ID NO: 303 - DNA, 321 bp, Zea mays
gaaggtgtagtgtgaaagcagcaaagaagctcggctcggtgtagctgctagaaaggggattgcttgtggacttgacgccattgcctgccacaaggcagcatcatttgctgcagagctgtacaagaaagagagagagaaaaccacggccgcgatcgtcgtcggtcctcttcctccggcctccgtgttctttctaagtcgttgtaacgatcgtcttgttgaggggaatgtcgtctggcgcgagaccgtaccagacgacgtgctctctcggtcgtcggacggtctcggaccaggcttcattccccccaacagctcagtccatca

SEQ ID NO: 304 - DNA, 113 bp, Zea mays
tagcttcatgtctgtcgaggggaatgacgtccggtccgaacgagccacggctgctgctgcgccgccgcgggcttcggaccaggcttcattccccgtgactcatggagacggca

SEQ ID NO: 305 - DNA, 158 bp, Zea mays
cctctcctgcgaggggagagtgggagatgaaggagccttgcatcgatgtcaccgccggaggagcgctcgccttcttcgcgcaccgccgcaatagccgccctcggacccctcgcctcgctcttccttgttcctcccattttccctcccttccccatgtc

SEQ ID NO: 306 - DNA, 140 bp, Zea mays
gccaggggcgggatcgatatgcctggctccctgtatgccactcgcatggctgccaactcatcatgcatacactgctagctagtcgttggctccactgcggatggcgtgcgtggagccaagcatgaccgatcatctcctcc

SEQ ID NO: 307 - DNA, 209 bp, Zea mays
agcggcgtgtttgtgcagggtggagaagcaggacacgtgagcgaccatccagttccactcccgctggctcgctgctggagctcccggcggcttggtgagtttgggtggtcgttcatgtgtccgccctctccaccgagcaccggcacatcccacccctctgtttctttctccatcgagcgcagggacacagcagttagcctccactccat

SEQ ID NO: 308 - DNA, 263 bp, Zea mays
tataaaaaaatattgatgaaagttatattttggagaccgtgttgttgtcctaaataacaactaaatgcgtacacaatgggtgtcttaaatagctagctgatgtggagcttagagaagaataaaaataataatatatctcacccctagtacttggtcccacacgtaatacactcagtttaatacgtgaaatctcgtatctatttgctgtctctagctattctcgtttttcccatattttctattcacataggaaagagagtgaa

SEQ ID NO: 309 - DNA, 263 bp, Zea mays
cacgctaatctgcccagttcacatcgtgatcatgagcatttgttctcttcccccgcaaagcaacaaatcggacaccgagcgcatccagaaaaggcgaagatgtgaagagagatggttcacacacggcatgcactacgcacctccgcaatcatgccgctccagtgcagcgccgccgccgctggccgggaccagcgcctgcggttcgaccttgatgacgtcgtgcagctcctgcagcatctgttcgaggctcgccgcgttctgat

SEQ ID NO: 310 - DNA, 210 bp, Zea mays
acacaaccgagctcggcgccaagatctgtggcgccgagctcggttccacgtcgacgccacgcgtctgggttgtgccaacgcaacacgacctcggcggttttgcttcagaactatttcatctgtagcggatgaggagggaactctgcatcgcatcgtggatccaccggagagaaagtcttcctcaaagatctccgagaaaatcggagcaaa

SEQ ID NO: 311 - DNA, 185 bp, Zea mays
tgagaagagatgaggtcttctcggccagcagcgcggccggttttataggcctccgtagctcggcgctaagatctgtggcgccgagctacgaggccgcgtcggcgccacgtcagctctaagacgcagatagccgctagtgccacgtcagagctcggcgccataggctatggcgccgagctgtgtta

SEQ ID NO: 312 - DNA, 134 bp, Zea mays
ggaattcgtagctcggcgccaagatctgtggcgccgagctacgaggccgcgccgccgccacgtcatagccaggtcagccctgaccgtaactagccgttgcggccacgtcagagctcggcgccataggctgtggc

SEQ ID NO: 313 - DNA, 172 bp, Zea mays
aggaaccgaaatgaaaacggtcgagcgaaacagagaagaaacgaagaggaaagggggtttcggttaagtttcctagctcggcgccaagatctgtggcgccgagctaggtgtgccacgcgggctgccacgtcatgaagctcggcgccataggctatggcgccgagctgtgtta

SEQ ID NO: 314 - DNA, 207 bp, Zea mays
caacctcatggtttaaaaccttgtgctccaccaactgaactatatagatttgtgctatttttttgcagcaaaacagttgataacacaaccaagctcggcgccaagatctgtggcgccgagctcggtgccacgtcaacgccacggcgtccggtttgtgccaacgcagcacgtacctcggcgtcataacttatggcgccgagcaaaggg

SEQ ID NO: 315 - DNA, 126 bp, Zea mays
acacaaccgagctcggcgccaagatctgtggcgccgagctcggtgtgccacgtcgacgccacgcgtctgggttgtgccaacgcaacacgacctcggcgccatagcctatggcgccgagctgtgtta

SEQ ID NO: 316 - DNA, 125 bp, Zea mays
acacaaccgagctcggcgccaagatctgtggcgccgagctcggtgccacgtcaacgacacggcggccgggttgtgccaacgtagcacgtacctcggcgccataacctatggcgccgagctgtctt

SEQ ID NO: 317 - DNA, 324 bp, Zea mays
cagccctaggtgtgtgggagtcggccgacagtgtgggagctaggcgcggcgtggcggtgttagggccgggcgcggcggcacgccgtggaggcgcggaggcgacacgacactggggctccgagggtggcgtcgggacggcggcgtgtgggcggttgagtgatatgagaaagatgggagagaaggtcggtggccgggccttaattcctagctcggcgccatgatctgtggcgccgagctagagagccacgtggctgccacgtcagccctggccgccttggctacgtcagagctcggcgccgtaggctatggcgccgagctgtgtta

SEQ ID NO: 318 - DNA, 124 bp, Zea mays
acacaaccgagctcggcgccaagatctgtggcgccgagctcggttccacgtcgacgccacgcgtctgggttgtgccaacgcaacacgacctcggcgccatagcctaaggcgccgagctgtgtta

SEQ ID NO: 319 - DNA, 180 bp, Zea mays
tgctaacggcggcggtgggctcggcgcgaaaactgaaaaacagacgaaacgggcagagaggaaggcgtcgggcggatatttcctagctcggcgccaagatctgtggcgccgagctaggtgccacgcgggatgacacgtcacgaagctcggcgccataggctgtggcgccgagctgtgtta

SEQ ID NO: 320 - DNA, 149 bp, Zea mays
ggcattcgtagctcggcgccaagatctgtggcgccgagctatgaggccgcgccgccgccacgtcggagccaggtaagccctggacgcaactagccgttgcggccacgtcagaagctcggcgccataggctgtggcgccgagctgtgtta

SEQ ID NO: 321 - DNA, 127 bp, Zea mays
ttaagtcctagctcggcgccaagatctgtggcgccgagctaggcgccacgcggtcatccacgtcatccctgcccgccatggccacgtcatagctcggcgccataggctgtggcgccgagctgtgtta

SEQ ID NO: 322 - DNA, 231 bp, Zea mays
tgtgatgaaatgagctgctctcggccagccgcgtgggcgtttttataggaattcgtagctcggcgccaagatctgtggcgccgagctacgaggccgcgccgccaccacgtcagagccaggtcagccctagacgcaactagccgttgctgccacgtcatagctcggcgccataggatgtggcgccgagctgtgttagctcggcgccacaggctatggcgccgagctaagggt

SEQ ID NO: 323 - DNA, 333 bp, Zea mays
gcgggagctccgcggcgagctcggcggccacggctggcggggcgctcgcggcgagctcggcgggcggggcgctctcggcgagctcggcgggcggcgggcggggcgctctcgccgagcgctggcggcggcggcggcggtaggcgcggcggcgggcgtaggaaacggcggcagcgggcgtcggtcgagtgaaacagagaacaaacgaagaggaaagggggttacggttaagtttcctagctcggcgccaagatctgtggcgccgagctaggtgtgccacgcggactgccacgtcacgaagctcggcgccataggctgtggcgccgagctgtgtta

SEQ ID NO: 324 - DNA, 134 bp, Zea mays
ggcattcgtagctcggcgccaagatctgtggcgccgagctacgaggccgcgccgccgccacgtcagagccaggtaagccctggacgcaactagccgttgcggccacgtcagagctcggcgccataggctgtggc

SEQ ID NO: 325 - DNA, 128 bp, Zea mays
ttaagtcctagctcggcgccaagatctgtggcgccgagctaggcgccacgcggacggccacgtcatcgctggaaggcttggccacgtcatagctcggcgccataggacagctcggcgccacaggctat

SEQ ID NO: 326 - DNA, 106 bp, Zea mays
ttttttcctagctcggcgccaagatctgtggcgccgagctaggtgccacgcaggactgccacgtcagggagctcggcgccataggctgtggcgccgagctgtgtta

SEQ ID NO: 327 - DNA, 148 bp, Zea mays
ggcattcgtacctcggcgccaagatctgtggcgccgagctacgaggccgcgccgccgccacgtcagagccaggtaagccctggacgcaactagccgttgcggccacgtcacagctcggcgtcataggctgtggcgccgagctgtgtta

SEQ ID NO: 328 - DNA, 124 bp, Zea mays
acacaaccgagctcggcgccaagatctgtggcgccgagctcggttccacgtcgacgccacgcgtctgggttgtgccaacgcaacacgacctcggcgccatagcctatagcgccgagctgtgtta

SEQ ID NO: 329 - DNA, 124 bp, Zea mays
gtggaaccgagctcggcgccaagatctgtggcgccgagctcggttccacgtcgacgccacgcgtctgggttgtgccaacgcaacacgacctcggcgccatagcctatggcgccgagctgtgtta

SEQ ID NO: 330 - DNA, 124 bp, Zea mays
cacaacccgagctcggcgccaagatctgtggcgccgagctcggttccacgtcgacgccacgcgtctgggttgtgccaacgcaacacgacctcggcgccatagcctatggcgccgagctgtgtta

SEQ ID NO: 331 - DNA, 124 bp, Zea mays
acacaaccgagctcggcgccaagatctgtggcgccgagctcggttccacgtcgacgccacgcgtctgggttgtgccaacgcaacacgacctcggcgccatagcctatggcgccgagcaaagggt

SEQ ID NO: 332 - DNA, 95 bp, Zea mays
ggaattcgtagctcggcgccaagatctgtggcgccgagctacgaggccgtgccgccgccacgtcagcgccaggtcagccctggacgcagctagct

SEQ ID NO: 333 - DNA, 351 bp, Zea mays
agctcggggcgagctcgggctctggtggccgcgacctcgggcggtttggagcgggctcggggcgacctcgggcgggcgggcgacctcggccgggcgggcggcagcggcgggcggacctcggacgaccgcgggcggcggcgaccggagacgtggaaggcggcggcgatttgaggagaacacggcggcgcggatgtttggaatgagcgcagagagaagaaacgcgcgcagagagaaagcgtttttcggttttttcctagctcggcgccaagatctgtggcgccgagctaggtgccacgcgggcatgccacgtcaggaagctcggcgccacagcctgtggcgccgagctgtgtt

SEQ ID NO: 334 - DNA, 127 bp, Zea mays
ttaattcctagctcggcgccaagatctgtggcgccgagctaggtgccatgcggacatccacgtcacccctgcccgccatggccacgtcacagcttggcgccataggctgtggcgccgagctgtgtta

SEQ ID NO: 335 - DNA, 148 bp, Zea mays
ggaattcgtagctcggcgccaagatctgtggcgccgagctacgagaccgcgccgccaccacatcggagccaggttagccctagacgcaagtagccattgctgccacgtcatagctcggcgccacaggctgtggcgccgagctatgtta

SEQ ID NO: 336 - DNA, 207 bp, Zea mays
caacctcatggttcaaaaacttgtgctccaccaactgagctagatagatttgtgctatctctttgcagcaaaacagtagataacacaaccgagctcggcgccaagatctgtggcgccgagctcggtgccacgtcaacgccacggcgtccgggttgtgccaacgcagcacgtacctcggcgccataacctatggcgccgagttgtgtt

SEQ ID NO: 337 - DNA, 148 bp, Zea mays
ggaattcgtagctcggcgccaagatctgtggcgccgagctacgaggccgcgccgccgccacgtcagagccaggtcagccctggacgcaagtagccgttgcgaccacgtcacagctcggcgccataggctgtggcgccgagctgtgtta

SEQ ID NO: 338 - DNA, 114 bp, Zea mays
atttatcctacctcggcgccaagatctgtggcgccgagctagaggccacattagcccttgctcgccaacacagtaggtacctcggcgccacagcctatggcaccgagacgtgtt

SEQ ID NO: 339 - DNA, 105 bp, Zea mays
tttttccctagctcggcgccaagatctgtggcgccgagctaggtgccacgcgggactgccacgtcacgaagctcggcgccacagcgtgtggcgccgagctgtgtt

SEQ ID NO: 340 - DNA, 148 bp, Zea mays
ggaatttgtagctcggcgccaagatctgtggcgccgagctacgaggccgcgccgccgccacgtcagagccaggtcagccctggacgcagctagccgttgcggccacgtcacagcttggcgccataggctgtggcgccgagctgtgtta

SEQ ID NO: 341 - DNA, 136 bp, Zea mays
acacaaccgagctcggcgccaagatctgtggcgccgagctcgatgccacgtcggccaggtgtgccaggtgtgccagcgtagcacgtacctcggcgccaagatctgtggcgccgagcaaagggtctaaaattgctat

SEQ ID NO: 342 - DNA, 126 bp, Zea mays
acacaaccgagctcggcgccaagatctgtggcgccgagctcggtgccacgtcggccaggtgtgccagcgtagcacgtacctcgcgccaagatctgtggcgccgagctgtgttacctcggcgccata

SEQ ID NO: 343 - DNA, 338 bp, Zea mays
ggtcgggcggcgtcgcgcgctcgggcgacgcgctcggggggggggggggcgcggcagaggggcgcgcgctcggggggtgcggcggcgggtggcgcgctcgggcggtgcggcggcggtgaggagaggcggcgcggtggcggtgaggaggagaggcggcgcggtgagaagtaacacagtgagcagagaatcacggtgaaaactgcccgcgcgactaaatcctagctcggcgccaagatctgtggcgccgagctaggtgccacgcgggctgccacatcagcccaggccgccaccgccacgtcagagctcggcgccatagcctatggcggtgagatgtgtta

SEQ ID NO: 344 - DNA, 194 bp, Zea mays
tgagaggcgatgagctcttctcggccagcagcgcgaccggttttataggcctccgtagctcggcgccaagatctgtggcgccgagctacgaggccgcatcggggccgcgtcgatgctaggtcagcctaggcgcatggaggcgttagtgccacgtcacatctcggcgccataggctatggcgtcgaggtaagtat

SEQ ID NO: 345 - DNA, 332 bp, Zea mays
tccgggcggcggcggcgagctccgggcgcccgagcccggccggcgacagggagcggggcgggcggccggcggcgacagggagcggggcgggcggccggcggcgagcccggccggcggcgagctgggcgggcggtgttggtttttgcggtcggagaaacgcgcacagagaagaaacgcgaacagagaagccagagaagaaacgcgcagagaagaaacggcggcggtggatatttcctagctcggcgccaagatctgtggcgccgagctaggtgccacgcaatctgccacgtcacagagctcggcgccacaggctgtggcgccgagatgtgtta

SEQ ID NO: 346 - DNA, 95 bp, Zea mays
ggcatccgtagctcggcgccaagatctgtggcgccgagctacgaggacatgtcaccaccacgtcggtgccaggtcagccctaggcgaaggtagcc

SEQ ID NO: 347 - DNA, 127 bp, Zea mays
ttaagtcctagctcggcgccaagatctgtggcgccgagctaggtgccacgcccgcagccacgtcagctcccgcagccatggccacgtcacacctcggcgccacagtctgtggcgcccgagcatcggg

SEQ ID NO: 348 - DNA, 193 bp, Zea mays
tcgaatggcgagcggcggcttgcgggcaaacagagaagaaacagagaagaaacggagaccccgcggttaagtcctagctcggcgccaagatctgtggcgccgagctaggcgccacgcggacagccacgtcaacgctggcagccttggccacgtcatagctcggcgccataggctgtggcgccgagctgtgtta

SEQ ID NO: 349 - DNA, 134 bp, Zea mays
ggaattcgtagctcggcgccaagatctgtggcgccgagctacgaggccgcgccgccgccacgtcatagccaggtcagccctgaccgtaactagccgttgcggccacgtcagagctcggcgccataggctatggc

SEQ ID NO: 350 - DNA, 172 bp, Zea mays
ggcgtaggaaacggaaacggtcgagcgaaacagagaacaaacgaagaggaaagggggtttcagttaagtttcctagctcggcgccaagatctgtggcgccgagctaggtgtgccacgcgggctgccacgtcatgaagctcggcgccataggctgtggcgccgagctgtgtta

SEQ ID NO: 351 - DNA, 330 bp, Zea mays
ctcggggcgacctcgggctctggcggccgcgacctcgggcggtggggagcgagctcggggcgacctcgggcgggcgggcggcggcggcgggcggacctcgggcgaccgcgggcggcggcgagccggagacgtggaaggcggcggcgatttgtgactgcggcggcgcggttgtttggaatgagcgcagagagaagaaacgcgcgcagagagaaagcatttttcggttttttcctagctcggcgccaagatctgtggcgccgagctaggtgccacgcgggactgccacgtcaggaagctcggcgccacaggctgtggcgccgagctgtgtta

SEQ ID NO: 352 - DNA, 369 bp, Zea mays
cccactgcacgcaaaaatgattgagtcgacacgacacacacagttctccacgtttccctgcctgtcgtcgtctcgcctttgcgagaaataaatttaagcggacacaccaacgacataaacaaaaaaaaaacaaaaaaaatgcaaactatggggcttgaacccacgaccacatggttagaagccttgtgctctaccaagtgggctagatgggctttgtgctcatgtctgcaacaaatattttaataacacaaccgagctcggcgccaagatctgtggcgccgagctcggttccacgtcgacgccacgcgtctgggttgtgccaacgcaacaagacctcggcgccatagcctatggcgccgagctgtgtta

SEQ ID NO: 353 - DNA, 124 bp, Zea mays
acacaaccgagctcggcgccaagatctgtggcgccgagctcggttccacgtcgacgccacgcgtctgggttgtgccaacgcaacaagacctcggcgccatagcctatggcgccgagctgtgtta

SEQ ID NO: 354 - DNA, 195 bp, Zea mays
tgagaggaaatgtgctgctctcggccagcagcgcggccggttttataggcctccgtagctcggcgccaagatctgtggcgccgagctacgaggccgcatcgccgccacgtcgatgccaggtcagccctaggcgcaggtagccattactgctacgtcacaggtcggcgccataggctgtggcgctgagatgtgtta

SEQ ID NO: 355 - DNA, 106 bp, Zea mays
gtataaagggggttggcgccaagatctgtggcgccgacccccctgacaggatttttgccgccgacaagggggtcggcaccaagatctatggcgccgaccccctgga

SEQ ID NO: 356 - DNA, 95 bp, Zea mays
ggcatccgtagctcggcgccaagatctgtggcgccgagctacgaggtcacgtcgccaccacgtcggtgccaggtcagccctaggcgaagctgcca

SEQ ID NO: 357 - DNA, 125 bp, Zea mays
acacaaccgagctcggcgccacgatctgtggcgccgagctcgttgccacgtcggcgccacgacgttcgggtgtgccagcgtagcacgtacctcggcgccataggctatggcgccgagctgtgtta

SEQ ID NO: 358 - DNA, 354 bp, Zea mays
tcgcgtccaccacggcctagtgggtgcacaatcgatctgtattcttcagtgcaaatttatatgtgtcatcagagcttgtgacaaagacaaaaaaaattggacggacacaaaaagtattgaaatgcaaactatgggacttgaacccaggaccacaaggtgaggagccttgtgctctaccaactagactagacaagatttgtggttatagctttccaacaaaattatttaaacacaatcgagctcggcgccaagatctgtggcgccgagctcggtgccacgtctgcgccacgacgtccgggtgtgccagcgtaacacgtacctcggcgccataggctatggcaccgagctgtgtta

SEQ ID NO: 359 - DNA, 124 bp, Zea mays
acacaaccgagctcggcgccaagatctgtggcgccgagctcggtgccacgtcgacgccacgcgtctgggttgtgccaacgcaacacgacctcggcgccatagcctatggcgccgagctgtgtta

SEQ ID NO: 360 - DNA, 138 bp, Zea mays
tttttataggcatttgtagctcggcgccaagatctgtggcgtcgagctttcgtagctcggcgccaagatctgtggcgccgagctacgaggccgcgtcgccccacgtcggtgccaggtcagccctaggcgcaagtagcc

SEQ ID NO: 361 - DNA, 123 bp, Zea mays
acacaaccgagctcggcgccaagatctgtggcgccgagctcggtgccacgtcgacgccacgcgtctgggttgtgccaacgcaacacgacctcggcgccatagcttatggcgccgagctgtgtt

SEQ ID NO: 362 - DNA, 142 bp, Zea mays
gtttttcctagctcgacgccaagatctgtggcgccgagctaggtgccacgcgggactgccacgtcacgaaactcggcgccacaggttgtggcgccgagctgtgttacctcggcgccacaggctgtggcgccgagcttcgggt

SEQ ID NO: 363 - DNA, 349 bp, Zea mays
ctcggggcgagctcgggctctggcggccgcgacctcgggcggtttggagcgggctcggggcgacctcgggcgggcgggcgacctcggccgggcgggcggcggcggcgggcggacctcggacgaccgcgggcggcggcgaccggagacgtggaaggcggcggcgatttgaggagaacgcggcggcgcggatgtttggaatgagcgcagagagaagaaacgcgcgcagagagaaagcgtttttcggttttttcctagctcggcgccaagatctgtggcgccgagctaggtgccacgcgggactgccacgtcaggaagctcggcgccacagcctgtggcgccgagctgtgtt

SEQ ID NO: 364 - DNA, 114 bp, Zea mays
ggaattcgtagctcggcgccaagatctgtggcgccgagctacgaggccgcgccgccaccacgttggagccaggtcagccctaggcgcaagtagccgttgctgccacgtcatagc

SEQ ID NO: 365 - DNA, 352 bp, Zea mays
tccgggcgacggctgcgagctccgagcggcagagctcgctcggctgagctccgggcggcagggagcgggtttgggcgagcggggcggggaactccgggcggcagggagcggggcgggcgaccggcggcgagccgggccggagctgggcgggcggcggcgatttcgacggaacggcggcggtggtttttgcggcggtagaagtgacgcgaacagagaagaaacgcgcagagagaaagggagtttgcgggtatttcctagctcggcgtcaagatctgtggcgccgagctaggtgccacgcagactgccacgtcacacagctcggcgccacagactatggcgccgagctgtgtta

SEQ ID NO: 366 - DNA, 95 bp, Zea mays
ggaattcgtagctcggcgccaagatctgtggcgccgagctacgaggccgcgacgccgccacgtcagcgccaggtcagccctgaccgtaactagcc

SEQ ID NO: 367 - DNA, 172 bp, Zea mays
ggcgtaggaaacgaaaacggtcgagcgaaacagagaagaaacgaagaggaaagggggtttcggttaagtttcctagctcggcgccaagatctgtggcgccgagctaggtgtgccacgcgggctgccgcgtcatgaagctcggcgccataggctagctcggcgccatagccta

SEQ ID NO: 368 - DNA, 148 bp, Zea mays
ggaattcgtagctcggcgccaagatctgtggcgccgagctacgaggccgcgccgccgccacgtcagagccaggtaagccctagacgcaactagccgttgcggccacgtcacagctcggcgccataggctgtggcgccgagctgtgtta

SEQ ID NO: 369 - DNA, 312 bp, Zea mays
cgagctccggacggccgagctccgggcggccgagctcgcgagccggggcggcgccggcgaaatccgttggcgagccggtgcagggagctgggcgggcggccggcggcgagccgggacggcgaacgggcggtgcggtcgggaacggcggcggtgaagttttgcgcagagagaactgagagattcgcgcagagagaatgagatttcgcggatatttcctagctcggcgccaagatctgtggcgccgagctaggtgccacgacgactgccacgtctcctagctcagcgccatagcctatggcgccgagctaaggg

SEQ ID NO: 370 - DNA, 127 bp, Zea mays
ttaagtcctagctcggcgccaagatctgtggcgccgagctaggtgccacgcccgcagccacgtcagccctggcagccatggccacgtcaacactcagcgccataggctatggcgccgagatgtgtta

SEQ ID NO: 371 - DNA, 194 bp, Zea mays
tgagaggaattgtgctgctctcggccagcagcgcggctattttataggcctccgtagctcggcgccaagatctgtggcgccgagctacgaggccgcgtcgccgccacatcgatgctaggtcaaccctaggcgcaggtagccgttgctgccacgtcatacctcggcgccataggctgtggcgccgagctgtgtta

SEQ ID NO: 372 - DNA, 98 bp, Zea mays
ggcatttgtagctcggcgccaagatctgtggcgccgagctacgaggccgcgccgccgccacgtcagagcggccacgtcacagctcggcgccataggct

SEQ ID NO: 373 - DNA, 173 bp, Zea mays
aaagttaagaaaagaggtggtcgcagctctcgaccagcagaacaaccgatttatatgactttctacctcagcgccaagatctgtggcgccgagctagaaatccacgtcgacgtcatggcagccctagccaccgctagccgccgacgccacgtcagagctcgacgctagccgcc

SEQ ID NO: 374 - DNA, 350 bp, Zea mays
ctatactatgcacgatctcctcggccagcgacatagtatagctctgcatgcaaataaagagaaagaccaatatgcatgcaacggcaacggaagacgaagaagctagcgagacataaacaaaaaaaaaacaaaaaaaaaatgcaaactatggggtttgaacccacgaccacatggttagaagccttgtgctctaccaagtgggctagatgggctttgtactcatgtctgcaacaaatatgttaataacacaaccgagctcggcgccaagatctgtggcgccgagctcggtgccacgtcgacgccacggcgtccgggttgtgccgacgcatcacgtacctcggcgccataac

SEQ ID NO: 375 - DNA, 114 bp, Zea mays
aactgagcgagctcggtgccaagatctgtggcgccgagctcggtgccacggcgtccgggtgtgccagcgtagcacgtacctcggcgccataggctatggcgccgagcaaagggt

SEQ ID NO: 376 - DNA, 103 bp, Zea mays
atacaaccaagctcggcgccaagatctgtggcgccgagctcggtgccatgtcggcgtccaggttgtgctagcgcagcaggtacctcgacgccatagcctatgg

SEQ ID NO: 377 - DNA, 124 bp, Zea mays
acacaaccgagctcggcgccaagatctgtggcgccgagctcggttccacgtcgacgccacgcgtccgtgttgtgccaacgcaacacgacctcggcgccatagcctatggcgccgagctgtgtta

SEQ ID NO: 378 - DNA, 314 bp, Zea mays
tttgatcgatttttttttgctacttgtgcacagtcgatcagagcttgtgacaaataaaaaaactggacggacacaaaaaacatgcaaactatgaggcttgaacctaggaccacaagatgagtagccttgtgctttaccaactaagctagacaagctttgtacttatagctatccaacaaaactgttgaaacagaaccgagctcggcgccaagatctgtggcgccgagctcggtgccacgtcggcgccacagcatccgggtgtgccagcgtagcacgtacctcggcgccatagcctatggcgccgagctgtaata

SEQ ID NO: 379 - DNA, 148 bp, Zea mays
ggaattcgtagctcggcgccaagatctgtggcgccgagctacgaggccgcgccgccaccacgttagcgccaggtcagccctagacgcaactagccgttgctgccacgtcatagctcagcgccataggctgtggcgccgagctgtgtta

SEQ ID NO: 380 - DNA, 105 bp, Zea mays
ttatttcctagctcggcgccaagatctgtggcgccgagctaggtgccacgcggactgccatgtcacgatgctcggcgccataggctatggcgccgagctgtgtta

SEQ ID NO: 381 - DNA, 123 bp, Zea mays
acacaaccgagctcggcgccaagatctgtggcgccgagctcggttccacgtcgacgccacgcgtctgggttgtgccaacgcaacacgacctcggcaccatagcctatggcgccgagctgtgtt

SEQ ID NO: 382 - DNA, 124 bp, Zea mays
acacaaccgagctcggcgccaagatctgtggcgccgagctcggttccacgtcgacgccacgcgtctgggttgtgccaacgcaacacgacctcggcgccataggctatggcgccgagcaaagggt

SEQ ID NO: 383 - DNA, 116 bp, Zea mays
ggaattcgtagctcggcgccaagatctgtggcgccgagctacgaggccgcgccgtaactagccgttgctgccacgccatagctcggcgccataggctgtggcgccgagctgcgcca

SEQ ID NO: 384 - DNA, 106 bp, Zea mays
gtttttcctagctcggcgccaagatctgtggcgccgagctaggtgccacgcgggactgccacgtcacgaagctcggcgccataggctatggcgccgagctatgtta

SEQ ID NO: 385 - DNA, 148 bp, Zea mays
ggaattcgtagctcggcgccaagatctgtggcgccgagctacgagggcgcgccgccgccacgtcagagccaggtcagccctagacggaactagccgttgcggccacgtcacagctcggcgccataggctgtggcgccgagctgtgtta

SEQ ID NO: 386 - DNA, 306 bp, Zea mays
gcgagctccgcggcgagctctcggcgagcaaggcgggcggggggctatcggcgagctcggcgggcggcggccggggcactctcgccgagcgcgggcggcggcggaggtaggtaggcgcggcggcgggctaaggaacggcggcagcgggcgtcggttccgtgaaacagagaacaaacgaagaggaaagggaggtcacggttaagtttcctagctcggcgccaagatctgtggcgccgagctaggtgtgccacgcggacttccacgtcacgaagctcggcgccacagcctgtggcgccgagctgtgtt

SEQ ID NO: 387 - DNA, 95 bp, Zea mays
ggaattcgtagctcggcgccaagatctgtggcgccgagctacgaggccgcgccgccaccacgtcagcgccaggtcagccctggacgcagctagcc

SEQ ID NO: 388 - DNA, 116 bp, Zea mays
gttatggcgccgaggtacgtgatgtgtcggcacaacccggacgccgtggcgtcgacgtggcaccgagctcggcgccacagatctgtggcgccgagctcggttgtgttattaacata

SEQ ID NO: 389 - DNA, 125 bp, Zea mays
acacaaccgagctcggcgccaagatctgtggcgccgagctcggtgccacgtcgacgccacggcgtccgggttgtgccgacgcatgacgtacctcggcgccataacctatggcgccgagctgtgtt

SEQ ID NO: 390 - DNA, 333 bp, Zea mays
ctcggggcgagctcgggcactggcggccgcgacctcggccggtttggagcggctcggggcgacctcgggcgggcgggcgacctcggccgggcgggcgccggcggcgggcggcggcgacctacgacgaggaaggcggcggcgatttgaggagaacgcggcgcggcggcgcggatgtttggaatgagcgcagagagaagaaacgcgcggagagagaaagcgtttttcggttttttcctagctcggcgccaagatctgtggcgccgagctaggtgccacgcgtgacagccacgtcacgaagctcggcgccacaggctgtggcgccgagctgtgtta

SEQ ID NO: 391 - DNA, 196 bp, Zea mays
tgggatgaaatgagctgctctcggccagccacgcgggcgttttataggcattcgtagctcggcgccaagatctgtggcgccgagctacgaggccgcgccgccgccacgtcagagccaggtaagccctggacgcaactagccgttgcggccacgtcacagctcggcgccataggagctgtgttaccgccccgcctat

SEQ ID NO: 392 - DNA, 134 bp, Zea mays
ggcattcgtagctcggcgccaagatctgtggcgccgagctacgaggccgcgccgccgccacgtcggagccaggtaagccctggacgcaactagccgttgcggccacgtcagagctcggcgccataggctgtggc

SEQ ID NO: 393 - DNA, 258 bp, Zea mays
ttttttcctagctcggcgccaagatctgtggcgccgagctaggtgccacgcaggactgccacgtcaggaagctcggcgccacagatcttggcgctgagctaggaaaaaaccgaaaaaacgctttctctctgcgcgcgtttcttctctctgcgctcattccaaacatccgcgccgccgcgttctcttcgaatcgccgccgccttccacgtctccggtcgccgtcgcccgcggtcgccgaggtccgcccgccgccgcagc

SEQ ID NO: 394 - DNA, 193 bp, Zea mays
gagccttgtgctctaccaactgggctagacaagatttgtgcttatacctttccaacaaaactgttaaaacacaaccgagctcggcgccaagatctgtggcgccgagctcggtgccacgtcggtgccacggcgtccagatgtgccagcgtagcacgtacctcggcgccataggctatggcgccgagctatgtta

SEQ ID NO: 395 - DNA, 193 bp, Zea mays
gagccttatgctctaccaactgggctagacaagatttgtgcttacagctttccaacaaaactattaaaacgcaaccgagctcggcgccaagatctgtggcgccgagctcggtgccacgtcggcgccacgacatctaggtgtgccagcgtagcacgtacctcggcgccataggctatggcgccgagctgtgtta

SEQ ID NO: 396 - DNA, 148 bp, Zea mays
ggcattcgtagctcggcgccaagatctgtggcgccgagctacgaggccgcgccgccgccacatcagagccaggtaagccctggacgcaactagccgttgcggccacgtcacagctcggcgccataggctgtggcgccgagctgtgtta

SEQ ID NO: 397 - DNA, 332 bp, Zea mays
tccgggcggcggcggcgaactccgggcgcccgagcccggccggcgacagggagcggggcgggcggccggcggcgacagggagcggggcgggcggccggcggcgagcccggccggcggcgagctgggcgggcggtgttggtttttgcggtcggagaaacgcgcacagagaagaaacgcgaacagagaagccagagaagaaacgcgcagagaagaaacggcggcggtggatatttcctagctcggcgccaagatctgtggcgccgagctaggtgccacgcaatctgccacgtcacagagctcggcgccacaggctgtggcgccgagatgtgtta

SEQ ID NO: 398 - DNA, 193 bp, Zea mays
gagaatggcgagcggcggcttgcgggcaaacagagaagaaacagagaagaaacggagaccccgcggttaagtcctagctcggcgccaagatctgtggcgccgagctaggcgccacgcggacggccacgtcatcgctgccagccttggccacgtcatagctcggcgccataggctctggcgccgagctgtgtta

SEQ ID NO: 399 - DNA, 206 bp, Zea mays
caacctcatggttcaaaaccttgtgctccatcaactgagctagatagatttatgctatctctttgcagcaaaacagtagataacacaaccgagctcggcgccaagatctgtggcgccgagctcggtgccacgtcaacgccacggcgtccgggttgtgccaacgcagccgtacctcggcgccataacctatggcgccgagctgtgtt

SEQ ID NO: 400 - DNA, 207 bp, Zea mays
caacctcatggtttaaaaccttgtgctccaccaacaaagctagatagatttatgctatctctttgcagcaaaacagtagataacacaaccgagctcggcgccaagatctgtggcgccgagctcggtgccacgtcaacgccacggcgtccgggttgtgccaacgcagccgtacctcggcgccacaggctatgacgccgagcaaagggt

SEQ ID NO: 401 - DNA, 127 bp, Zea mays
ttaattcctagctcggcgccaagatctgtggcgccgagctaggtgtcacgcggacatccacgtcacccctgcccgccatggccacgtcacagctcggcgccataggctgtggcgccgagctgtgtta

SEQ ID NO: 402 - DNA, 113 bp, Zea mays
ggcatttgtagctcggcgccaagatctgtggcgccgagctaggtgccacgcggacatccacgtcacccctgcccgccatggccacgtcagagctcggcgccataggctgtggc

SEQ ID NO: 403 - DNA, 113 bp, Zea mays
ggcatttgtagctcggcgccaagatctgtggcgccgagctaggtgccacgcggacatccacgtcacccctgcccgccatggccacatcagagctcggcaaaccgtcagaaccc

SEQ ID NO: 404 - DNA, 195 bp, Zea mays
tgagaggaaatgtgctgctctcggccagccgcgtagccgtttttataggcatccgtagctcggcgccaagatctgtggcgccgagctacgaggccgtgtcgccaccacgtcgatgccaggtcagcactaggcgaaggtagccgttgctgccacgtcagacctcggcgccataggctgtggcgccgagctgtgtta

SEQ ID NO: 405 - DNA, 318 bp, Zea mays
gtatctaaactaatatatcataggagcaacaatcgaaattaataatcgaaaaattacaacataatatacaaaacaaatcagtgagacaccataccttgatgtacaaaatattccaactcgaatctagccgtttttaagaagatttgaatggaggcgaagttgagaaatgaggaggacgtccctctcggccagcaggcagggcgatttatagaactttctagctcggcgccaagatctgtggcgccgagttaggaggccgcgtcggcgccacaccagccctagccgtcaccgccacgtcagagctcggcgtcatagcct

SEQ ID NO: 406 - DNA, 199 bp, Zea mays
gaattttcattagtcaaatataggtcgcacatattaattcgaaaatttaattgatgtacaaaatgttacctctccctctgcggcttgaattggattgagccgagaagacaagaaacgcgcagagagaagggtgtttgcggatttttcctagctcggcgccaagatctgtggcgccgagctaggtgccacgcgggactgc

SEQ ID NO: 407 - DNA, 241 bp, Zea mays
cgcgacacacgcgcccgcacgtatagcagcgggctttaggtctcttgggccaacactcccccaaaaagctagcctgtcagggggttgcaccctcaaccatataaaccatgctttctcaccctcaccacacaatgtgggactattcctaacaatctccccctcacacattgtgagccaagatttgtctgagaatgcattgggtcaacctggctctgataccaattgttggaatctactggca

SEQ ID NO: 408 - DNA, 240 bp, Zea mays
cgcgacacacgcgtccgcacgtatagcagcgggctttaggtcttttgggccaacactcccccaaaaagctagcctgataggggttgcaccctcaaccatataaaccatgctttctcaccctcaccacacaatgtggaactattcccaacaatctccgcctcacacattgtgagccgagatttgtctgagaatgcactgggtcaacctggctctgataccaattgttggaaccggaccgcc

SEQ ID NO: 409 - DNA, 243 bp, Zea mays
cgcgacacacgcgcccgcacgtatagcagcgggctttagatctcttgggccaacactccccccaaaaagctagcctgatagggggttgtaccctcaaccatataaatcatgcttttccactctcaccagacaatgtgggactattcccaacaatctccccctcacacattgtgagccgagatttgtcttgagaatgcactgggccaacctggctctgataccaattgttggaaccggaccgcc

SEQ ID NO: 410 - DNA, 240 bp, Zea mays
cgcgacacacgcgcccgcacgtatagcagcgggctttaggtctcttgggccaacactccccccaaaaaactagcctattaggggttgccaccctcaaccatataaaccatgcttttccattctcaccagacaatgtgggactattccaacaatctccccctcacacattgtgagccgagatttgtctgagaatgcactggccaacctggctctgatacaaattgttggaaccagaccgcc

SEQ ID NO: 411 - DNA, 307 bp, Zea mays
cggatgcagatcccaggtagaatcagttcggtagcttcttctgttcactggccatcatttcctttgatttcttctgtttcttagagtctgtcccatcttctggatctgagttggaagcttccatctacctagccatggtattttatgcaacatatacggcgtggatcggaactgcccaagggaacgagtgaagctgccagcatgatctagctctgagtgatcacccgaaaaagaacaatagttctaggtggtcatgccttgctaggtcatgctgctgcagcctcacttcttcccgtcgttgggcata

SEQ ID NO: 412 - DNA, 140 bp, Zea mays
tttgtgcagcacaagaagatgaagctgccagcatgatctgaaaccatacgtgttctttgattcccatctgaagaaagagttggctttcatggagaaccgacggtcagatcatgtggcagtttcattttctcgtggcagca

SEQ ID NO: 413 - DNA, 284 bp, Zea mays
gcgacatatgtgaaggttctgatcatgttgcagcttcatgaccgactaagaggaagctggaagcctaaacctatggcgtactcagtcggatgccatggacggtctggtgttttatcacattccacatgctccttttccgtcggcaaaaaaaagaaggaaatttggctctgatttcagttgaagggggtgtgctcactgaagcggaactagtctcccatcttgaacggttggtgcccggaaaacatttttgggatgctcaaatgaaatcatcgactatgtgggtg

SEQ ID NO: 414 - DNA, 232 bp, Zea mays
tgccatttatgtcagcagacaaagaagaagaagaagaagaagcctattttgatgatcgcgagcagtttgccccgcctccctaccatggggatccgggtcaatcatcctctcaccctccgccctaggatccttctggcagtgctcctcccccggatcagtctagggaagaacactttgcctctcacctggcgcaccacttctttgctcctcatcagcctcctcctaactagtg

SEQ ID NO: 415 - DNA, 294 bp, Zea mays
tgtcagcagacgacgacgacgaagaagaagaagaagaagaagaagaagcctactttgatgatcacgagcagtttgccccgcctctctaccaaggggatccgggtcaatcatcctctcaccctccgccccaggatccttctggaagtgctcctcccccggatcagtctggggaagaacactttgcctctcacctggtgcaccatttcttcgctccgcatcagcctcctcctaactggtgatctttgtgttggtggctctctccttttttggttcttgttgccaaaaagggggaga

SEQ ID NO: 416 - DNA, 515 bp, Zea mays
tgctcgcttggtccatgggattgcggcattttttctatgtgccgaaacatttctgctgatgtacatgagctggcaaggcgtcagtgggagactgacgacaatcttcgtcgtcaagcttccactatgggtatgccctttgcccctcgctcgcctgacgtgcctctccatcctcctcccctgaagatcaatgagtggcaccggcaggcctacgaggtgccatttatgtcagtagacgacgaagaagaagaagaagaagcctacgttgatgatcgcgagcagtttgccccgcctccctaccatggggatccgggtcaatcatcctctcaccctccgcctccctactcgggtcagggatccactcccggtgaccctaggccatccggctctagtcactatcctcctcctccctacccgggtccgagacccattcctggtgacccgcggccatccggctctggttaccatcaccaccctccacctcctcttcatcatcgtacatcttcggcatctgtttt

SEQ ID NO: 417 - DNA, 435 bp, Zea mays
tggcccatgggattgcggcattcttttctatgtgccagaatatttctgctgatgtgcatgagctggcaaggcgttagcgggagactgacgacaatcttcgtcgtcaagcttccactatgggtatgccttttgcccctcgctcgcctgacgtgcctcttcatccgcctctcccggagatcaatgagtggcaccagcaagcctacggggtgccttttatgtcagcagacgaagaagaagaagaagaagaagcttactttgatgatcgtgagcagtttgccccgcctccctaccaaggggatccgggtcaatcctcatctcatcctccgccctaggatccttcaggaagtgctcctcccccggatcagtctggggaagaacactttgcctctcacctggtgcatcatttctttgctctgcatcatcctccgcctttgt

SEQ ID NO: 418 - DNA, 219 bp, Zea mays
agggtatggaacaacccttgaagctcaggagggatagcgcctaggaaaacacatagatcggagccggccgcgaggagaaagaaagagccaagagatatgtgtgatgaataatctacatggatcttggctagcttttgtgttctcctctggaggcgtggttctgtctatcaatctgaagcgctatctatcctgagctccacggcttgttcttaccacacg

SEQ ID NO: 419 - DNA, 211 bp, Zea mays
tctctctctccactacaaacaatcaagcttgttctttgatcatcgatcgctcatgtacggcagttgaggggaatgttgtctggttggagacctaacaccgcgaattaatcatccatgccatggaagcagcatatgcccgcctgcatctatccatgcatgatggtggaaggtttcggaccaggcttcattccccccaactcaacactcagct

SEQ ID NO: 420 - DNA, 153 bp, Zea mays
ttaagctacccacggccccttggctagccgatgtgggactaaagccgaggcactgactatcggcccctgacatcccaccccccttaggaagccccccaaggcaggcatgggccaaccaggctctgataccagatgtcagcgtccaacccccgg

SEQ ID NO: 421 - DNA, 171 bp, Zea mays
gtggtagaccgaactgagcatgcctggctccctgtatgcctgcaggagcgatgtccgagaaacagcgaagagcaccgccgccgttgctcggaccgagtgggttgccgtggaaaatcggattcaacagctggccgtcgaacgggaagtccggatggtggggcacccgcagct

SEQ ID NO: 422 - DNA, 127 bp, Zea mays
aagtaagaggccatctttggtagccagggatgatttgcctgtggttcctgtcgttgccatgccaatgcctgtactgttcgatctacgggcaaatcatccctgctaccggagtgtctcttactcttct

SEQ ID NO: 423 - DNA, 294 bp, Zea mays
gcttgaggttgacttgccgaagctacagaagccgcagggtggttgtctatgtattgtgggacataaggcggatgaaacgaagcagtatgcaaaacctgcttcgattgagcttgttgagatgcagcttcggctagttccttttgcttctggattgtaacatggcacgtcctagtggtgtggcccttgccctctccacagaataggcaaaacagtctccttggctgatctccgaatcttccgccgaagcccctggcgcctctgcctcttggagctggtggccgaaaggaagtttgt

SEQ ID NO: 424 - DNA, 110 bp, Zea mays
agaccaagggtcatgctttcaggcaagaagttctatgcatacccagttcacagttcctgaaaatacaggaagcccagtctccttggctacaggcaaggactctccagtaa

SEQ ID NO: 425 - DNA, 289 bp, Zea mays
tggctcgctggctaaaatttaccagacagtctggtgtgcaccggacatatctggtgggccagacgacaaacgatcgacaacgcgatcgacgtcggccgcgtcagcacaccaacagtcaagaaagggtcaccggacagtccggtgcctacccgaaaaggaaagcgaccaatcaaccgatcttgtgaccgttgcataccagagtgtccggtgcacccacagacagaaggcaatctttagtttccaaaggaagaagcagtctccttggcttcttggggctataaaagaggcc

SEQ ID NO: 426 - DNA, 294 bp, Zea mays
gcttgaggttgacttgccgaagctacagaagctgcagggtggttgtctatgtattgtgggatataaggcggatgatacgaagcagtatgcatgacctgcttcggctgagcttgttgagatgcagcttcggctatttccttttgcttctggattgtaacatggcacgtcctagtggtatggcccttgccttctccacagaacaagcaaaacagtctccttggctgatctccgaatcttccgccgaagcccctggcgcctctgcctcttggagctggtggccggaaggaagtttgt

SEQ ID NO: 427 - DNA, 294 bp, Zea mays
gcttgaggttgacttgccgaagccacagaagccgcagggtggttgtctatgtattgtgggacataaggcggatgaaacgaagcagtatgcataacctgcttcgactgagcttgttgagatgcagcttcggctagttccttttgcttctggattgtaacatggcacgtcctagtggtgtggcccttgccctctccacagaatagacaaaacagtctccttggctgatctccgaatcttccgccgaagcccctggcgcctctgcctcttggagctggtggccgaaagaaagtttgt

SEQ ID NO: 428 - DNA, 294 bp, Zea mays
gcttgaggttgacttgccgaagctacagaagccgcagggtggttgtctatgtattgtgggacataaggcggatgaaatgaagcagtatgcaaaacctgcttcgactgagcttgttgagatgcagcttcggctagttccttttgcttctggattgtaacatggcacgtcctagtggtgtggcccttgccctctccacagaataggcaaaacagtctccttggctgatctccgaatcttccgccgaagcccctggcgcctctgcctcttggagctggtggccgaaaggaagtttgt

SEQ ID NO: 429 - DNA, 294 bp, Zea mays
gcttgaggttgacttgccgaagctacagaagccgcagggtggttgtctatgtattgtggtacataaggcggatgaaacgaagcagtatgcaaaacctgcttcgactgagcttgttgagatgcagcttcggctagttccttttgcttctggattgtaacatggcacgtcctagtggtgtggcccttgccctctccacagaataggcaaaacagtctccttggctgatctccgaaccttccgccgaagcccctggcgcctctgcctcttggagctggtggccgaaaggaagtttgt

SEQ ID NO: 430 - DNA, 294 bp, Zea mays
gcttgaggttgacttgccgaagctacagaagccgcagggtggttgtctatgtattgtgggacataaggcggatgaaacgaagcagtatgcataacctgcttcgactgagcttgttgagatgcagcttcggctagttccttttgcttctggattgtaacatggcacgtcctagtggtgtggcccttgccctctccacagaataggcaaaacagtctccttggctgatctccgaatcttccgccgaagcccctggcgcctctacctcttggagctggtggccgaaagaaagtttgt

SEQ ID NO: 431 - DNA, 294 bp, Zea mays
gcttgaggttgacttgcggaagctacggaagctgcagggtggttgtctatgtattgtgggatataaggcggatgacacgaagcagtatgcatgacctgcttcggctgagcttgttgagatgcagcttcggcaatttccttttgcttctggattgtaatatggcacgacctagtggtatggcccttgccttctccacagaacaagcaaaacagtctccttggctgatctccgaatcttccgccgaagcccctggcgcctctgcctcttggagctggtggccggaaggaagtttgt

SEQ ID NO: 432 - DNA, 294 bp, Zea mays
gcttgaggttgacttgccgaagctacagaagccgcagggtggttgtctatgtattgtgggacataaggcggatgaaacgaagcagtatgcataacctgcttcgactgagcttgttgagatgcagcttcggctagttccttttgcttctggattgtaacatggcacgtcctagtggtgtggcccttgccctctccacagaataggcaaaacagtctccttggctgatctccgaatcttccgccgaagcccctggcgcctctgcctcttggagctggtggctgaaaggaagtttgt

SEQ ID NO: 433 - DNA, 294 bp, Zea mays
gcttgaggttgacttgccgaagctacagaagccgcagggtggttatctatgtattgtgggacataaggcggatgaaacgaagcagtatgcataacctgcttcgactgagcttgttgagatgcagcttcggctagttctttttgcttctggattgtaacatggcacgacctagtggtgtggcccttgccctctccacaaaataggcaaaacagtctccttggctgatctccgaatcttccgccgaagcccctggcgcctctgcctcttggagctggtggccgaaaggaagtttgt

SEQ ID NO: 434 - DNA, 294 bp, Zea mays
gcttgaggttgacttgccgaagctacagaagccgcagggtggttgtctatgtattgtgggacataaggcggatgaaacgaagcagtatgcataacctgcttcgactgagcttgttgagatgcagcttcggctagttctttttgcttctggattgtaacatggcacgacctagtggtgtggcccttgccctctccacagaataggcaaaacagtctccttggctgatctccgaatcttccgccgaagcccctggcgcctctgcctcttggagctggtggccgaaaggaagtttgt

SEQ ID NO: 435 - DNA, 294 bp, Zea mays
gcttgaggttgacttgccgaagctacagaagccgcagggtggttgtctatgtattgtgggacataaggcggatgaaatgaagcagtatgcataacctgcttcgactgagcttgttgagatgcagcttcggctagttccttttgcttctggattgtaacatggcacgtcctagtggtgtggcccttgccctctccacagaataggcaaaacagtctccttggctgatctccgaatcttccgccgaagcccctggcgcctctgcctcttggagctggtggccgaaaggaagtttgt

SEQ ID NO: 436 - DNA, 294 bp, Zea mays
gcttgaggttgacttgccgaagctacagaagccgcagggtggttgtctatgtattgtgggacataaggcggatgaaacgaagcagtatgcataacctgcttcgactgagcttgttgaggtgcagcttcggctagttccttttgcttctggattgtaacatggcacgtcctagtggtgtggcccttgccctctccacagaataggcaaaacagtctccttggctgatctccgaatcttccgccgaagcccctggcgcctctgcctcttggagctggtggccgaaagaaagtttgt

SEQ ID NO: 437 - DNA, 294 bp, Zea mays
gcttgaggttgacttgccgaagctacggaagccgcagggtggttgtctatgtattgtgggacataaggcggatgaaacgaagcagtatgcatgacctgcttcgactgagcttgttgagatgcagcttcggctagttccttttgcttctggattgtaacatggcacgtcctagtggtgtggcccttgccctctccacagaataggcaaaacagtctccttggctgatctccgaatcttccgccgaagcccctggcgcctctgcctcttggagctggtggccgaaagaaagtttgt

SEQ ID NO: 438 - DNA, 294 bp, Zea mays
gcttgaggttgacttgccgaagctacagaagccgcagggtggttgtctatgtattgtgggacataaggcggatgaaacgaagcagtatgcataacctgcttcgactgagcttgttgagatgcagcttcggctagttccttttgcttctggattgtaacatggcacgtcctagtggtgtggcccttgccctctccacagaataggcaaaacagtctccttggctgatctccgaatcttccgccgaagcccctggcgcctctgcctcttggagctggtggccgaaaagaaagtttg

SEQ ID NO: 439 - DNA, 294 bp, Zea mays
gcttgaggttgacttgccgaagctacagaagccgcagggtggttgtctatgtattgtgggacataaggcggatgaaacgaagcagtatgcataacctgcttcgactgaacttgttgagatgcagcttcggctagttccttttgcttctggattgtaacatggcacgtcctagtggtgtggcccttgccctctccacagaataggcaaaacagtctccttggctgatctccgaatcttccgccgaaacccctggcgcctctgcctcttggagctggtggccgaaaggaagtttgt

SEQ ID NO: 440 - DNA, 294 bp, Zea mays
gcttgaggttgacttgccgaagctacagaagccgcagggtggttgtctacgtattgtgggacataaggcggatgaaacgaagcagtatgcataacctgcttcgactgagcttgttgagatgcagcttcggctagttccttttgcttctggattgtaacatggcacgtcctagtggtgtggcccttgccctctccacagaataggcaaaacagtctccttggctgatctccgaatcttccgccgaagcccctggcgcctctgcctcttggagctggtggccgaaaggaagtttgt

SEQ ID NO: 441 - DNA, 294 bp, Zea mays
gcttgaggttgacttgccgaagctacagaagccgcagggtggttgtctatgtattgtgggacataaggcggatgaaacggagcagtatgcataacctgcttcgactgagcttgttgagatgcagcttcggctagttccttttgcttctggattgtaacatggcacgtcctagtggtgtggcccttgccctctccacagaataggcaaaacagtctccttggctgatctccgaatcttccgccgaagcccctggcgcctctgcctcttggagctggtggccgaaaggaagtttgt

SEQ ID NO: 442 - DNA, 294 bp, Zea mays
gcttgaggttgacttgccgaagctacagaagccgcagggtggttgtctatgtattgtgggacataaggcggatgaaacgaagcagtatgcaaaacctgcttcgactgagcttgttgagatgcagcttcggctagttccttttgcttctggattgtaacatggcacgtcctagtggtatggcccttgccctctccacagaataggcaaaacagtctccttggctgatctccgaatcttccgccgaagcccctggcgcctctgcctcttggagctggtggccgaaaggaagtttgt

SEQ ID NO: 443 - DNA, 294 bp, Zea mays
acttgaggttgacttgccgaagctacagaagccgcagggtggttgtctatgtattgtgggacataaggcggatgaaacgaagcagtatgcaaaacctgctttgactgagcttgttgagatgcagcttcggctagttccttttgcttctgaattgtaacatggcacgtcctagtggtgtggcccttgccctctccacagaataggcaaaacagtctccttggctgatctccgaatcttccgccgaagcccctggcacctctgcctcttggagctggtggccgaaaggaagtttgt

SEQ ID NO: 444 - DNA, 294 bp, Zea mays
gcttgaggttgacttgccgaagctacagaagccgcagggtggttgtctatgtattgtgggacataaggcggatgaaatgaagcagtatgcataacctgcttcgactgagcttgttgagatgcagcttcggctagttccttttgcttctggattgtaacatgacacgtcctagtggtgtggcccttgccctctccacagaataggcaaaacagtctccttggctgatctccgaatcttccgccgaagcccctggcgcctctgcctcttggagctggtggccgaaaggaagtttgt

SEQ ID NO: 445 - DNA, 294 bp, Zea mays
gcttgaggttgacttgccgaagctacagaagccgcagggtggttgtctatgtattgtgggacataaggcggatgaaacgaagcagtatgcataacctgcttcgactgagtttgttgagatgcagcttcggctagttccttttgcttctggattgtaacatggcacgtcctagtggtgtggcccttgccctctccacagaataggcaaaacagtctccttggctgatctccgaatcttccgccgaagcccctggcgcctctgcctcttggagctggtggccgaaagaaagtttgt

SEQ ID NO: 446 - DNA, 294 bp, Zea mays
gcttgaggttgacttgccgaagctacagaagccgcagggtggttgtctatgtattgtgggacataaggcggatgaaatgaagcagtatgcaaaacctgcttcgactgagcttgttgagatgcagcttcggctagttccttttgcttctggattgtaacatggcacgtcctagtggtgtgacccttgccctctccacagaataggcaaaacagtctccttggctgatctccgaatcttccgccgaagcccctggcgcctctgcctcttggagctggtggccgaaaggaagtttgt

SEQ ID NO: 447 - DNA, 294 bp, Zea mays
gcttgaggttggcttgccgaagctacagaagccgcagggtggttgtctatgtattgtgggacataaggcggatgaaacgaagcagtatgcataacctgcttcgactgagcttgttgagatgcagcttcggctagttccttttgcttctggattgtaacatggcacgtcctagtggtgtggcccttgccctctccacagaataggcaaaacagtctccttggctgatctccgaatcttccgccgaagcccctggcgcctctgcctcttggagctgatggccgaaagaaagtttgt

SEQ ID NO: 448 - DNA, 294 bp, Zea mays
gcttgaggttgacttgccgaagctacagaagccgcagggtggttgtctatgtattgtgggacataaggcggatgaaacgaagcagtatgcataacctgcttcgactgagcttgttgagatgcagcttcggctagttccttttgcttctggattgtaacatggcacgtcctagtggtgtggcccttgccttctccacagaataggcaaaacagtctccttggctgatctccgaatcttccgccgaagcccctggcgcctctgcctcttggagctggtggccgaaaggaagtttgt

SEQ ID NO: 449 - DNA, 343 bp, Zea mays
gcttgaggttgacttgccgaagctacagaagccgcagggtggttgtctatgtattgtgggacataaggcggatgaaacgaagcagtatgcaaaacctgctttgactgagcttgttgagatgcagcttcggctagttccttttgcttctgaattgtaacatggcacgtcctagtggtgtggcccttgccctctccacagaataggcaaaacagtctccttggctgatctccgaatcttccgccgaagcccctggcacctctgcctcttggggctggtggccgaaaggaagtttgttgttgccccgaagcctgtgaggagcactgcggcctgttttgctgactcc

SEQ ID NO: 450 - DNA, 294 bp, Zea mays
gcttgaggttgacttgccgaagctacagaagccgcagggtggttgtctatgtattgtgggacataaggcggatgaaacgaagcagtatgcataacctgcttcgactgagcttgttgagatgcagcttcggctagttccttttgcttctggattgtaacatggcacgtcctagtggtgtggcccttgccctctccacagaataagcaaaacagtctccttggctgatctccgaatcttccgccgaagcccctggcgcctctgcctcttggagctggtggccgaaaggaagtttgt

SEQ ID NO: 451 - DNA, 343 bp, Zea mays
gcttgaggttgacttgccgaagctacagaagccgcagggtggttgtctatgtattgtgggacataaggcggatgaaacgaagcagtatgcataacctgcttcgactgagcttgttgagatgcagcttcggctagttccttttgcttctggattgtaacatggcacgtcctagtggtgtggcccttgccctctccacagaataggcaaaacagtctccttggctgatctccgaatcttccgccgaagcccctggcgcctctgcttcttggagctggtggccgaaagaaagtttgttgttgccccgaagcctgtgaggagcactgcggcctgttttgctgactcc

SEQ ID NO: 452 - DNA, 252 bp, Zea mays
cttgaaggatacaactcagaagatccggagctgtgggaaatggcgtttgaggaccggaagtgggaggagaataaagtggcagtctccttggctgagcattgtcgtattatgggttacaattacgaagagatttatgatcgtactgtttgagtcgacaaggggcaggtaattgtgttttcacattttaattgtaagcttttgtcaagacaattgtaatcggtcataagtactgtgcttgtttgtgcaaacttt

SEQ ID NO: 453 - DNA, 151 bp, Zea mays
cttctggattgtaacatggcacgtcctagtgatgtggcccttgccctctccacagaataggcaaaacagtctccttggctgatctccgaatcttccgccgaagcccctggcgcctctgcctcttggagctggtggccgaaagaaagtttgt

SEQ ID NO: 454 - DNA, 294 bp, Zea mays
gcttgaggttgacttgccgaagctacagaagccgcagggtggttatctatgtattgtgggacataaggcggatgaaacgaagcagtatgcataacctgcttcgactgagcttgttgagatgcagcttcggctagttctttttgcttctggattgtaacatggcacgacctagtggtgtggcccttgccctctccacaaaataggcaaaacagtctccttggctgatctccgaatcttccgccgaagcccctggcgcctctgcctcttggagctggtggccgaaaagaagtttgt

SEQ ID NO: 455 - DNA, 294 bp, Zea mays
gcttgaggttgacttgccgaagctacagaagctgcagggtggttgtctatgtattgtgggatataaggcggatgatacgaagcagtatgcatgacctgcttcggctgagcttgttgagatgcagcttcggctatttccttttgcttctggattgtaacatggcacgtcctagtggtatggcccttgccttctccacagaacaagcaaaacagtctccttggctgatctccgaatcttccgccgaagcccctggcgcctctgcctcttggagctggtggacggaaggaagtttgt

SEQ ID NO: 456 - DNA, 107 bp, Zea mays
cctctccacagaataggcaaaacagtctccttggctgatctccgaatcttccgccgaagcccctggcgcctctgcctcttggagctggtggccgaaaggaagtttgt

SEQ ID NO: 457 - DNA, 249 bp, Zea mays
tctatgtattgtgggacataaggcagatgaaacgaagcagtatgcataacctgcttcgactgagcttgttgaggtgcagcttcggctagttccttttgcttctggattgtaacatggcacgtcctagtggtgtggcccttgccctctccacagaataggcaaaacagtctccttggctgatctccgaatcttccgccgaagcccctggcgcctctgcctcttggagctggtggccgaaagaaagtttgt

SEQ ID NO: 458 - DNA, 210 bp, Zea mays
gatgattttcttgcaagttgtgcagttgttgtctcaagcttgctgcctccctttgccagaactattgaatgtgaaagcacagttaagtaatgccacgcccagagaatccaaaaggttgctgatataaaaagttgctaataagtggtggaacttttagcggagtaaattgtatgcctttatgaaataactgaagtagatatgttggcatgc

SEQ ID NO: 459 - DNA, 120 bp, Zea mays
tggggaatcgaaaacctacgggatattggtgcggttcaatcagaaagcttgcgctccaaagcccaggggctccactctttgactgagccgtgccaatatcacgtcctcgctttgcttgcc

SEQ ID NO: 460 - DNA, 127 bp, Zea mays
tccaggaagctggtggaggactccaaagggatcgcattgatctattctcacctgccgcctgctgcatgcgatgcgagtcgacgacaagatcagtgcaatccctttggaattttccactcgcgccttc

SEQ ID NO: 461 - DNA, 239 bp, Zea mays
ctgtgaagatgcggactacctgcacctggacagaaagaccctatgaagctttactgttccctgggattggctttgggcttttcctgcgcagcttaggtggaaggcgaagaaggccccctttcgggggggcccgagccatcagtgagataccactctggaagagctcggattctaaccttgtgtcagacccgcgggccaagggacagtctcaggtagacagtttctatggggcgtaggcc

SEQ ID NO: 462 - DNA, 238 bp, Zea mays
ctgtgaagatgcggactacctgcacctggacagaaagatcctatgaagctttactgttccctgggattggctttgggcttttcctccgcagcttaggtggaaggcgaagaaggccccctttcggggggcccgagccatcagtgagataccactctggaagagctcggattctaaccttgtgtcagacccgtgggccaagggacagtctcaggtagacagtttctatggggcgtaggcc

SEQ ID NO: 463 - DNA, 239 bp, Zea mays
ctgtgaagatgcggactacctgcacctggacagaaagaccctatgaagctttactgttccctgggattggctttgggcttttcctgcgcagcataggtggaaggcgaagaaggcccccttccgggggggcccgagccatcagtgagataccactctagaagagctcggattctaaccttgtgtcagacccgcgggccaagggacagtctcaggtagacagtttctatggggcgtaggcc

SEQ ID NO: 464 - DNA, 235 bp, Zea mays
atgaaagtaaaggatatattttaacctgaaacgaccctatgaagctttactgttccatgggattggctttgggcttttcctgcgcagcttaggtggaaggcgaagaaggcccccttccgggggggcccgagccatcagtgagataccactctggaagagctcggattctaaccttgtgtcagacccgcgggccaagggacagtctcaggtagacagtttctatggggcgtaggcc

SEQ ID NO: 465 - DNA, 256 bp, Zea mays
tttttagcagatctagacacctattccccagcggagtcgccaaaagtatgttgacgctttttcggagcgccaatcactcaagaagaaccggcggcggtgccctctgcacaggggcggatggtccgcgcgcaggggccggacggtccgcggcctggtgcgaggcggcggcgctctctggtcagacgcggacggtccgcggcacagggccggacggtccgcgacctggtgcgggaactcgggttccctgcctgacggc

SEQ ID NO: 466 - DNA, 278 bp, Zea mays
atttatctatctcttgactcgaaatgggagcagagcaggtttgaaaaacgatcttagagtgtctagggttgggccaggagggtctcttaaccccttcttttttctgcccatcggagttatttcccaaggacttgccgtggtaagggggagaagggggaagaagcacacttgaagagcgcagtacaacggggagttgtatgctgcgttcgggaaggatgaatcgctcctgaaaaggagtctattgattctctcccaattggttggatcgtaggggcgat

SEQ ID NO: 467 - DNA, 190 bp, Zea mays
gtgagcagaaaacagtgaggtcaagataagagaggaaagaactcattgtttacatgatcaggaaatggaatgcctaagctgtccagtttcagggcttctctttcttggcagggaagcatgagatgccatagctctctgctctcttcaaccctctgccaaaggagagttgccctgtaacaggactcagctt

SEQ ID NO: 468 - DNA, 136 bp, Zea mays
taaacatgattgccgttccgtttgttttcctctaatatctcaccttcactagacagaagatgtacgctaccaacattcatttgtgccatttgaagtgcagatttgaggtaagtaaaccagcctgaaaagcagggac

SEQ ID NO: 469 - DNA, 178 bp, Zea mays
agactatctccaacttcttagccatcctatctctcatctcatctcttattttgaactccactctacgaatagtgtagcatatagtgcaaaagagtgttttgggtgaccatatgggtaacctgttggacacggtcttatgcgggagatgaaggagccatgaagcattttttgttggact

SEQ ID NO: 470 - DNA, 113 bp, Zea mays
aggtgaaagatagggaatatgcctggctccctgtatgccgctcgcatggctaccaccgcctgtggtcgttgcggctggcgtgcgaggtgccaggcatgttttaataattatct

SEQ ID NO: 471 - DNA, 108 bp, Zea mays
agaccggtataaagggggccaagatctgtggcgccgacccccccccagacaggattttcacctctgacagggggtcggcgccaagatctatggcgccgaccccctgga

SEQ ID NO: 472 - DNA, 125 bp, Zea mays
acacaaccaagctcggcgccaagatctgtggcgccgagctcgctgccacgtcgacgccacgcgtccgagttgtgccaatgcagcacgtacctcggcgccatagcctatggcgccgagctgtgtta

SEQ ID NO: 473 - DNA, 377 bp, Zea mays
tgaaccctgtggtcgtgggttcaagccccacagtttgcatttagatttatttttttgtttatatcgctcgtgtgtccgtctaaatttatttctcacccagattttttttatctttatcactactcattttttaaaattattaaatgggctttgtgcagtttctaagtattctgtgcaagtagagataaatacttgttctaccaactgaactagatagactttgtgcttttgtatccaacaaatatattaataacacaatcgagctcggcgccaagatctgtggcgccgagctcgctgccacgtcgacgccacgcgtccgggttgtgccaacgcagcacgtacctcggcgccatagcctatggcgccgagctgtgtta

SEQ ID NO: 474 - DNA, 106 bp, Zea mays
ttttttcctagctcggcgccaagatctgtggcgccgagctaggtgccacgcgggacggccacgtcacgaagctcggcgccataggctatggcgccgagctgtgtta

SEQ ID NO: 475 - DNA, 193 bp, Zea mays
tggcttgcggctgggaaaattgcggcggaaacagagaagaaacggagagaagaacgttacctgcggttaagtcctagctcggcgccaagatctgtggcgccgagctaggcgccacgcggacgaccacgtcatcgctgacagccttggccacgtcatagctcggcgccataggctatgacgtcgagatgtgtta

SEQ ID NO: 476 - DNA, 134 bp, Zea mays
  misc_feature (131)..(134): n is a, c, g, or t
ggcattcgtagctcggcgccaagatctgtggcgccgagctacgaggccgcgccgccgccacgtcagagccaggtaagccctggacgcaactagccgttgcggccacgtcagagctcggcgccataggcttnnnn

SEQ ID NO: 477 - DNA, 344 bp, Zea mays
cggctgagctcggacggagctcgggccgagctcgagggcggacctcgccgcggcgtgaatagggcggagctcgcggcggcgggcagcggagcttggggcggccggcgtgaagagctcgaggcggcgccggagaaggggcaagcggcggcggcgtgagctgtggacgtcgggcggcggcggcgggattttgaatgagcagacaacacaagaaacacgcagagagaagggatgtttacggatttttttctagctcggcgccaagatctgtggcgccgagctaggtgccacgcaggacagccacgtcacgaagctcggcgccatagctgtggcgccgagctgtgtta

SEQ ID NO: 478 - DNA, 327 bp, Zea mays
ggggcggcagtgggcggagctcgggcgcggcagagggcgggcggcgagctcgggcgacgtcgggcggggctcgcggcggcgagccggagctgggccggggcgggcgggcggcggcgagccggagtcctggcaggcggcggcgattgaggacggcggcggcggcgttggtttggaacgagcagaagacaagaaacgcgcgcacagagaaggcggtttgcagttttttcctagctcggcgccaagatctgtggcgccgagctaggtgccacgcgggactgcccacgtcaggaagctcggcgccacagacggtggcgccgagctgtgtta

SEQ ID NO: 479 - DNA, 287 bp, Zea mays
  misc_feature (281)..(287): n is a, c, g, or t
gctgcgggcgggcggcgcgctcggcgggcgcgctcggcaggctgcgggcgggcggcgagctcggcggcggcgggctggcggcgagctcggcgacggcggcggtatgagcggcggcgggcgtaggaaacgaaagcggcgagcgaaacagagaagaaacgaagaggaaagggggtttcggttaagtttcctagctcggcgccaagatctgtggcgccgagctaggtgtgccacgcgggctgccacgtcatgaagctcggcgccatagccgatggcgccgatcnnnnnnn

SEQ ID NO: 480 - DNA, 148 bp, Zea mays
ggaatttgtagctcggcgccaagatctgtggcgccgagctacgaggccgcgccgccaccacgtcagagccaggtcagccctggacgcaactagccgttgctgccacgtcacagctcggcgccataggctgtggcgccgagctgtgtta

SEQ ID NO: 481 - DNA, 299 bp, Zea mays
gggcggagctcgagaggggctcgcggcggcaagccggagctgggccggggcgggcgggcggcggcgagccggagctggggcaggcggcgacgatttgtggacggcggcggcgatttcgtaaacggcggcggcgtgatttggaatgagcagagaagagaagagaagaaacgcgcagagagaaggcagtttgcgggtttttcctagctcggcgccaagatctgtggcgccgagctaggtgccacgcgggactgccacgtcacgaagctcggcgccacaggctgtggcgccgagcttcgggt

SEQ ID NO: 482 - DNA, 287 bp, Zea mays
gtgctccgtgcaagcacatgtcgcgtccctgctccactctactgcagagcaaactgccgagcacaagccacgtcctggccctgctccactccactccactgcagagcagactgccgaccagcgcaccgcgcaagcgaatgcattttagaaaaggacaggcttagacaaccgagctcggcgtcaagatctgtggcgccgagcttggtgccacgtcagctccacggcgtctgggttgtgccagcgtaacaggtacctcggcgccataacctatggcgccgagctgtgtt

SEQ ID NO: 483 - DNA, 158 bp, Zea mays
ggaattcgtagctcggcgccaagatctgtggcgccgagctacgaggccgcgccgccgccacgtcagagccaggtaagccctagacgcaactagccgttgcggccacgtcacagctcggcgcagctcggcgccacggcctatggcgccgagctaagggt

SEQ ID NO: 484 - DNA, 313 bp, Zea mays
cggcggctgcggcggcgaactccgggcggccgagctcgcgagccggggcggcggcggcgaaatccgttggcgagccggtgcagggagctgggcgggcggccggcggcgagccgggacggcgaacgggcggtgcggtcgggaacggcgacggtgaagttttgcgcagagagaactgagagaaacgcgcagagagaatgggatttcgcggatatttcctagctcggcgccaagatctgtggcgccgagctaggtgccacgacgactgccacgtcaccgagctcggcgcgataggctatggcgccgagctaagggt

SEQ ID NO: 485 - DNA, 148 bp, Zea mays
gaaattcgtagctcggcgccaagatctgtggcgccgagctacgaggccgcgccgccgccacgtcagcgtcaggtcagccctggacgcagctagccgttgcggccacgtcacagctcggcgccataggctgtggcgccgagctgtgtta

SEQ ID NO: 486 - DNA, 108 bp, Zea mays
atatttcctagctcggtgccaagatctgtggcgccgagctaggtgccacgtggactgccacgtcacgtagctcggcgccacagatcttggcaccgagctaggaaatat

SEQ ID NO: 487 - DNA, 95 bp, Zea mays
ggaattcgtagctcggcgccaagatctgtggcgccgagctacgaggccgcgccgccgccacgtcagcgccaggtcagccctggacgcagttagcc

SEQ ID NO: 488 - DNA, 106 bp, Zea mays
tttttccctagctcggcgccaagatctgtggcgccgagctaggtgccacgcgggactgccacgtcacgaagctcggcgccacaggctgtggcgccgagctgtgtta

SEQ ID NO: 489 - DNA, 195 bp, Zea mays
tgagaggaaatatggtcttctcggccagcagcacgaccggttttataggcctccgcagctcgacgccaagatctgtggcgccgagctacgaggccgcgtcggtgccacgtcaatgccatgtcagccctaggcgcagggagccgttattgccacgtcacagctcggcgccataggctatggcgtcgagctgtatta

SEQ ID NO: 490 - DNA, 105 bp, Zea mays
acacaaccgagctcggcgccaagatctgtggcgccgagctcggtgccacgtcagcgccacggcgtccgggttgtgccaacgcatcacgtacctcggcgccataac

SEQ ID NO: 491 - DNA, 105 bp, Zea mays
tgagaggaattgtgctgctctcggccagcagcgtggctgttttataggcctccgtagctcggcgccaagatctgtggcgccgagctacgaggccgtgtcgtcgcc

SEQ ID NO: 492 - DNA, 95 bp, Zea mays
ggcattcgtagctcggcgccaagatctgtggcgccgagctacgaggccgcgtcgccaccacgtcggcgccaggtcagccctaggcgcaggtagcc

SEQ ID NO: 493 - DNA, 126 bp, Zea mays
ttaagtcctagctcgacgccaagatctgtggcgccgagctaggtgccacgccctcagccacgttagcgcccgaagccatggccacgtcacacctcggcgccacagcctgtggcgccgagctgtgtt

SEQ ID NO: 494 - DNA, 194 bp, Zea mays
tgagaggaattgtgctgctctcggccagcagcgcgacgattttataggcctccgtagctcggcgccaagatctgtggcgccgagctacgaggccgcgtcgccgccacatcgatgccaggttagccctaggcgcaggtagccgttgttgccacgtcatacctcggcgccataagctgtggcgccgagctgtgtta

SEQ ID NO: 495 - DNA, 354 bp, Zea mays
gcgggcggggcgggcgaagctcggcggacctcgccggagctgggcgtgcgggctgggagggcggggaggccggagagaagggcggccgcgccgccggagctgggcgtgcgtggtggccggagagaaggcggcggggcggcggcgttttcctaacggcggcggggcggcggcgttttcctaacggcggcggtgggcgttgcgcgatttctgaacaacagaggaaacgggcagagagaaaggcgtttggcggatatttcctagctcggcgccaagatctgtggcgccgagctaggtgccacgcgagccgccacgtcacgaagctcggcgccacagcctatggcgccgagctgtgtt

SEQ ID NO: 496 - DNA, 148 bp, Zea mays
ggaattcgtagcacggcgccaagatctgtggcgccgagctacgaggacgcgccgccgccacgtcagagccaggtcagccctggacgcaactagccgttgcggccacgtcacagctcggcgccataggctgtgacgccgagctaagggt

SEQ ID NO: 497 - DNA, 206 bp, Zea mays
caacctcatggtttaaaaccttgtgctccaccaactgagctagatggctttgtgttatttctttgcaacaaaaccgttgataacaccaccgagctcggcgccaagatctgtggcgccgagctcggtgccacgtcaacgccacggcgtcgggttgtgccaacgcagcacgtacctcggcgccataacctatggcgccgagctgtgtt

SEQ ID NO: 498 - DNA, 206 bp, Zea mays
caacctcatggtttaaaactttgtgctccaccaactgagctagatggctttatgttatttctttgcaacaaaactgttgataacacaatcgagctcggcgccaagatctgtggcgccgagctcggtgccacgtcaacgccacggcgtcgggttgtgccaacgtagcatgtacctcggcgccataacctatggcgccgagctatgtt

SEQ ID NO: 499 - DNA, 106 bp, Zea mays
gtttttcctagctcggcgccaagatctgtggcgccgagctaggtgccacgcgggactgccacgtcacgaagctcggcgccataggctatagcgcctacgtttggac

SEQ ID NO: 500 - DNA, 116 bp, Zea mays
ggaatttgtagttcggcgccaagatctgtggcgccgagctacgaggccgggccgcaactagccgttggtgcctcgtcacagctcggcgccataggctatggcgccgagctacggca

SEQ ID NO: 501 - DNA, 95 bp, Zea mays
ggcattcgtagctcggcgccaagatctgtggcgccgagctacgaggccgcgtcgccaccacgtcggcgccatgtcagccctaggcataggtagcc

SEQ ID NO: 502 - DNA, 161 bp, Zea mays
acacatccgagctcggcgccaagatctgtggcgccgagctcggtgccacgtcggcgccacggcgtccaggtgtgccagcgtagcacgtacctcggcgccataggttatggcgccgagctgtgttacctcggcgccataggctatggcgccgagcaaagggt

SEQ ID NO: 503 - DNA, 125 bp, Zea mays
acacaaccgagctcggcgccaagatctgtggcgccgagctcgctgccacgtcgacgccacgcgtccgatttgtgccaacgcagcacgtacctcggcgccatagcctatggcgccgagctgtgtta

SEQ ID NO: 504 - DNA, 125 bp, Zea mays
acacaatcgagttcggcgccaagatctgtggcgccgagctcgctgccacgtcgacgccacgcgtccgggttgtgccaacgcagcacgtacctcggcgccatagcctatggcgccgagcaaagggt

SEQ ID NO: 505 - DNA, 276 bp, Zea mays
tgtgcacggcggcggcggcttcggcgagcagtgcacggcggcgggcggcactggtggcggcgggttgggcagggcggcggcggcgtcgggaggagaaagaagatacacgggaatgggaagaaggagaaagaagaaacgcggcgtaacggttaactcttagctcggcgccaagatctgtggcgccgagctaggtgccacgcgtacaaatacgtcacgtctgtccgccatggacacgtcagcactcggcgccatagcctatggcgccgagctgagtta

SEQ ID NO: 506 - DNA, 124 bp, Zea mays
acacaaccgagctcggcgccaagatctgtggcgccgagctcggttccacgtcgacgccacgcgtcaagacgctgccaacgcaacacgacctcggcgccatagcctatggcgccgagctgtgtta

SEQ ID NO: 507 - DNA, 305 bp, Zea mays
gggagctccgcggcgagctctcggcgagcaaggcgggcgggggctatcggcgagctcggcgggcggcggccggggcgctctcgccgagcgctggcggcggcggaggtaggtaggcgcggcggcgggctaaggaacggcggcagcgggcgtcggttccgtgaaacagagaacaaacgaagaggaaagggaggtcacggttaagtttcctagctcggcgccaagatctgtggcgccgagctaggtgtgccacgcggactgccacgtcatgaagctcggcgccacagcctgtggcgccgagctgtgtt

SEQ ID NO: 508 - DNA, 348 bp, Zea mays
gggcggcggcggcggcgaactccgggcggccgagctccgggcggcggcggggatctccgggcgacggcggggatctccgggcaggcagggagcggggcgggcggccggcggcgagccgggacggcggcgaagcgaacgggcggtgcggtcggagaagtgaacggcggcggtggtattttgcggtcggaggagtgaagcgaactgagaagaaacgcgcagagagaatgggagttcgcgggtatttcctagctcggcgccaagatctgtggcgccgagctaggtgccacgacgactgccacgtcaccgagtgttacctcggcgccacagcctatggcgccgagcttcggg

SEQ ID NO: 509 - DNA, 106 bp, Zea mays
gtttttcctagctcggcgccaagatctgtggcgccgagctaggtgccacgcgggactgccacgtcacgaagctcggcgccatagtctatggcgccgaggtaaatga

SEQ ID NO: 510 - DNA, 105 bp, Zea mays
gtttttcctagctcggcgccaagatctgtggcgccgagctaggtgccacgcgggactgccacgtcacgaagctcggcgccacagcctgtggcgccgagattcggg

SEQ ID NO: 511 - DNA, 95 bp, Zea mays
ggaattcgtagctcggcgccaagatctgtggcgccgagctacgaggccgcgccaccgccacgtcagcgccaggtcagccctagacgcagctagcc

SEQ ID NO: 512 - DNA, 297 bp, Zea mays
ggcctgggccggggcggccgtgcggcggccagccggagctggggcaggcggcggcggcgacccgcagacaaacccgagggcagacggcggcggcgtgattttgtgggcggtggcgagttcgtaaacggcggcggcttgaattggaatgagccgagaagacaagaaacgcgcagagagaaggctgtttgcggatttttcctagctcggcgccaagatctgtggcgccgagctaggtgccacgcgggactgccacgtcacgaaggtcggcaccacaggctgtggcgccgagcaaagggt

SEQ ID NO: 513 - DNA, 94 bp, Zea mays
ggcattcgtagctcggcgccaagatctgtggcgccgagctacgaggccgcgtcgccccacgtcggtgccaggtcagccctaggcgcaagtagcc

SEQ ID NO: 514 - DNA, 209 bp, Zea mays
cgaggcagcggcggcgcggctcgggcggcgatagcggcggcggagaaaacagagactgggcagaaaaccgcggtgaggaggtagccgcgcgatttcatcctagctcggcgccaagatctgtggcgccgagctaggtgccacgtagcctgccgcgtcggtctcgccacgttattgctcggcgccacaccctatgacgccgacatgtgtta

SEQ ID NO: 515 - DNA, 92 bp, Zea mays
acacaaccgagctcggcgccaagatctgtggcgccgagccaagatctgtggcgccgagctcggttccacgtcgacgccacgcgtctggggtg

SEQ ID NO: 516 - DNA, 206 bp, Zea mays
aacctcatggtttaaaaccttgtgctccaccgactgagctaaatagctttgtgctatttatttgcaacaaaacggttgataacacaaccgagctcggcgccaagatctgtggcgccgagctcggtgccacgtcaacgccacggcgtccgggttgtgccaacgtagcacgtaccttggcgccataacctatgttgccgagctgtgtt

SEQ ID NO: 517 - DNA, 206 bp, Zea mays
cgaactcatggttttaaaccttgtgctccaccaactgagctagatagcttcgtgctatttctttgcagcaaaacagttgataacacgaccgagctcggcgccaagatctgtggcgccgagctcggtgccacgtcaacgccacggcgtcgggttgtgccaacgcagcacgtacctcggcgccataacctatggcgccgagctgtgtt

SEQ ID NO: 518 - DNA, 326 bp, Zea mays
acattttagacaatttggtgtcggtcctacatttcaaatagtatacctaatgagttatttaaaaaaaatgagttatttaaaagataaaaaaatatgggtgagttgtagggcttgaacccccaacctcatggtttaaaaccttgtgctacaccaactgagctagatagcttcatgctatttctttgcagcaaaacagttgataacacgaccgagctcggcgccaagatctgtggcgccgagctcggtgccacgtcaacgccacggcgtcgggttgtgccaacgcagcacgtacctcggcgccataacctatggcgccgagctgtgtt

SEQ ID NO: 519 - DNA, 119 bp, Zea mays
ccgcgcgatttcatcctagctcagcgccaagatctgtggcgccgagctaggtgccacgcggcctgtcctagctcggcgccaagatctgtggcgccgagctaggtgccacgcggcctgcc

SEQ ID NO: 520 - DNA, 127 bp, Zea mays
ttaagtcctagctcggcgccaagatctgtggcgccgaactaggtgccacgcggacatccacgtcacccctgcccgccatggccacgtcatagctcggcgccatagcctatggcgccgagatgtgtta

SEQ ID NO: 521 - DNA, 180 bp, Zea mays
tgctaacggcggcggtgggctcggcgcgaaaactgaagaacagacgaaacgggcagagagaaaggcgtcgggcggatatttcctagctcggcgccaagatctgtggcgccgagctaggtgccacgcgggatgacacgtcacgaagctcggcgtcataggctgtggcgccgagctgtgtta

SEQ ID NO: 522 - DNA, 243 bp, Zea mays
aaaaaaaaaaagaacactccacgatccatcgtctctctccccacctctccttagctagcttcctagcgcatatataaatatacaccctgagggctccaaccttcttcgtcctccatcccgacaccgtcccgagagttcccaacgagagaggatcgattggtagagctagctcgatcaaggtgtatcagtgacaaggaccacgctggagaagcagggcacgtgcatgcgcataccatatagcta

SEQ ID NO: 523 - DNA, 241 bp, Zea mays
cgcgacacacgcgcccgcacgtatagcagcgggctttaggtctcttgggccaacactccccaaaaagctagcctgatagggggtttgcaccctcaaccttataaaccatgctaccacaccctcaccacacaatgtgggactattcccaacaatctccccctcacacattgtgagccaagatttgtctgagaatgcactgggccaacctggctctgataccaattgttggaaccggaccgcc

SEQ ID NO: 524 - DNA, 223 bp, Zea mays
cgcgacacacgcgcccgcacgtatagcagcggactttaggtctcttgggccaacactccccctaaaaagctagcctaatagggggttgcaccctcaaccatataaaccatgcttttccactctcaccagacaatgtgagactattcccaacaatagccaagatttgtctgagaatgcactgggccaacctggctctgataccaattgttggaaccggaccgcc

SEQ ID NO: 525 - DNA, 380 bp, Zea mays
gtacgcagttagccccgatggtgattccagacggtaggggcaagtcgcgcacataacagagaaggacgaactaatctcttcagtcatatccgatgtaatctacttcaaccctttataaccaattgatctaatcaaaccatgcatcaagtagatccatctcatgaacctagatccagacctaaaactacagaacctggctctgataccactgtaggattacggggaggctacgctagcgcaaaacaaaattttcaaccccataaaaccaagaactactgcggttataggtcatggaattaccactagacgcgcagagcagcggaagacgtctcgatgtagacgaacgcgtcgagcagtgctgtgcagtcgtcggcgtcctt

SEQ ID NO: 526 - DNA, 238 bp, Zea mays
cacaacacacgcgaccacacgtatagcagcgggctttaggtcttttaggccaacactccctcaaaaagctagcctattaggggttgtactctcaatcttataaaccatgctatcacattctcaccacacaatgtgggactattcccaacaatctctctcacacattgtgagccgagatttgtctgagaatgcactgggccaacctggctctgataccaattgttggaaccggaccgcc

SEQ ID NO: 527 - DNA, 242 bp, Zea mays
cgcgacacacgcgcccgcacgtatagcagcgggctttaggtctcttgggccaacagtccccctaaaaagctagcctaatagggggttgcaccctcaaccatataaaccatgcttttccactctcaccagacaatgtgggactattcccagcaatctccccctcacacattgtgagccaagatttgtctgagaatgcactgggccaacctggctctgataccaattgttagaaccggaccgcc

SEQ ID NO: 528 - DNA, 458 bp, Zea mays
cgcgacacacgtgcccgcacgtatagcagcgggctttaggtctcttgggccaacactccccccaaaaagctagcctgataggtggttgcaccctcaaccatataaaccatgcttttccactctcaccagacaatgtgggactattcccaacaatctccccctcacacattgtgagccgtgttgtctgagaatgcactgggccaacctggctctgataccaattgttggaaccggaccgtcgacacatggcgtgtccgttggggtcgcccgcacacacgacgcacccacccaaactgtcgggccgcgacacacgcgcccgcatgtatagcagcgggctttaggtctcttgggccaacactccccccaaaaagctagcctgataggttgttgcactctcaccatataaaccattttgttgtttatgtatggtgctcaagttgtacaagaactccccggac

SEQ ID NO: 529 - DNA, 167 bp, Zea mays
gcattgtttcaagagcttttgtgaagtgtttgggggaactcttgtctcaaatcatttgcatgtgctagatgtttgtcatgtgtcatgtgatacgagttgaaggctatacaacattttgtgttactaggagttccctacaagcacgtctcgataccttggcttaataa

SEQ ID NO: 530 - DNA, 124 bp, Zea mays
caatgtctggtgttaccatgagttcccttcaagcacttcacatgaggcaccattcaataacacatttcaagattaggtgcatgtgaagtgtttgggggaactcttggtggcacaacatccatat

SEQ ID NO: 531 - DNA, 125 bp, Zea mays
caatgtcgggtgttactatgagttcccttcaagcacttcacatgaggcaccattcaaataacacatttcaagattaggtgcatgtgaagtgtttgggggaactctttgagagcacctagaggggg

SEQ ID NO: 532 - DNA, 110 bp, Zea mays
caacgttttgtgttactaggagttccctacaagcacttcacgataccttggcttaataaaggccagttgtgaagtgtttgggggaactcttggtatcatgaagcattttg

SEQ ID NO: 533 - DNA, 125 bp, Zea mays
caatgtctggtgttaccatgagttcccttcaagcacttcacatgaggcaccattcaaataacacatttcaagattaggtgcatgtgaagtgtttgggggaactcttggtggcacaacatccatac

SEQ ID NO: 534 - DNA, 115 bp, Zea mays
caacgttttgtgttactaggagttccctacaagcacttcacaataccttggctcaataaattaaaggccagttgtgaagtgtttgggggaactcttggtatcatgaagcatttag

SEQ ID NO: 535 - DNA, 150 bp, Zea mays
attggttggttgtcacctggagttctcctcaaaccacttcagttgctgcacctagctagtttaatggcactgtgcttgcgtgcaagcggccggagctgtgtgtagctagtgaagtgtttgggggaactctgggtgtcaatcagcaatttg

SEQ ID NO: 536 - DNA, 228 bp, Zea mays
ttggtgttcttatgagttctgtggaagcacttcatgagatactcttcttagagcttttgtcaagtgttcaatgtagctctcgatgccactaattatttgctagatgttggtcaaatgcacgccacaagaaattatttaaggatgacgtggcatgttttgtaagaactaggtttgatgtccctaggagttctatgcaagcacttcacgaggcattgtttcaagagcttt

SEQ ID NO: 537 - DNA, 253 bp, Zea mays
tcccatgcccactgctcttagaccctctcttcctcttccatgctcactctcaaattcaacccatccaaataggagcataatttggatgcacagtaagccaaaaggaaaaggatgaagtgcttaagaacaataggaatgggaggcatcgggaaacaccgaaccaagcttccacctcggtttctggaggaggaaaccaacaggatgggctttcctccatgttcccattcccactgctcttaggccctctcttccc

SEQ ID NO: 538 - DNA, 222 bp, Zea mays
actaaccaaggatgccagacagagaagaagaagaagaaggcccctctagccctaccttcccccagaaccgatgactggtccgacgaagaagatgtatccctagccagcctcgatgatcttctcaaggcatttggggataccttagacaaggaactcgctagcacctcgaagaacgccctcgtgtagtttttttttctgtagtagtcttatgcttgtaatgtg

SEQ ID NO: 539 - DNA, 135 bp, Zea mays
tatgaggtagagaacgggatgcagccaaggatgacttgccggctcctggaacctggaggcgtctcagcttgctgtgctgtggcttagaacttagtcggcaagtctgtccttggctacacctagttctcttcctct

SEQ ID NO: 540 - DNA, 152 bp, Zea mays
ggcgataagagtctgtccagatagccaaggatgacttgcctgtggcttcttggcttggcttggctcgggcaaaaccttgtgcacgttttattgctcgcctcgtggcctcgatcacaggcagtctccttggctagtccgggcgggccccttat

SEQ ID NO: 541 - DNA, 178 bp, Zea mays
gatgcaaggcagttccggcgggggcgaactgagaacacatgagaataatgagatgagattgctcgcctcgcggtacggttcgtgctggcctggaccaccgtcgtcgccgttcatcttgtacgcataataatgctgcatgtgttctcaggtcgcccccgcagggccttccttgctgctg

SEQ ID NO: 542 - DNA, 224 bp, Zea mays
aaaggtgcgcgggcatgctttccacaggctttcttgaactgtgaactcgtgggtggtggtggtatgtcggatggaatgcttggctcctcccagctagcaattctcttcccccatgcaccggccgtgaattgagctgcggagcttccccgcagcctcgctctcggccggctctacctgttgatggttcaagaaagcccatggaaaccatgcagcctcccctcttg

SEQ ID NO: 543 - DNA, 287 bp, Zea mays
gaaagattctaagagcactaggaataggaacatgaaggaaagcattattgtgcatggagatttaggcctgatgttttcctgatgcctcctattcctaaggctcttaggttctccttccctttccttatggcttgcgaaatcaatgttaatcagatcaaaagagatggggtcagggtacactatgctggttgcaagcaagcaagagaaagaatgagagagggactgagaacagtggctagtgggaaactgggaatgggaacatggaggaaagctaagttaaatttctt

SEQ ID NO: 544 - DNA, 123 bp, Zea mays
tccggcgggcgcgcgcgcggtgacagaagagagtgagcacacggccggtgtgacggcaccggcgcggatgtgccgtcgcggccgcgtgctcactgctctctctgtcatccgctggcacaccct

SEQ ID NO: 545 - DNA, 285 bp, Zea mays
tcagtttgtgtaaacgtgttgccccctctctctctctctctcttcgtgtccagttcttgttgcgtctgctttgtactgttgcagcggtggtcgacggcgggatgggcggatgaggggcctggctgctagatggtgtggctgacagaagagagtgagcacgcatcggccagactgcatctatatacggctgccccaaagcgacggatcgatggatgcctagcctaggcctaggcgcagctgctgttgcgtgctcacttctctttctgtcagctctctctctcatcc

SEQ ID NO: 546 - DNA, 149 bp, Zea mays
caaactgttgctggacttgtccagagctcacctctgccataggctgtgaggatgagccaggtcccgatggggatggtgaaatcaccggggcttgatactggacgtatggggcttggtgcagctcgggaactgttctggatggacctgga

SEQ ID NO: 547 - DNA, 294 bp, Zea mays
gcttgaggttgacttgccgaagctacagaagccgcagggtggttgtctatgtattgtgggacataaggcggatgaaacgaagcagtatgcaaaacctgctttgactgagcttgttgagatgcagcttcggctagttccttttgcttctggattgtaacatggcacgtcctagtggtgtggcccttgccctctccacagaatagacaaaacagtctccttggctgatctccgaatcttccgccgaagcccctggcgcctctgcctcttggagctggtggccgaaaggaagtttgt

SEQ ID NO: 548 - DNA, 294 bp, Zea mays
gcttgaggttgacttgctgaagctacagaagccgcagggtggttgtctatgtattgtgggacataaggcggatgaaacgaagcagtatgcataacctgcttcgactgagcttgttgagatgcagcttcggctagttccttttgcttctggattgtaacatggcacgtcctagtggtgtggcccttgccctctccacagaataggcaaaacagtctccttggctgatctccgaatcttccgccgaagcccctggcgcctctgcctcttggagctggtggccgaaagaaagtttgt

SEQ ID NO: 549 - DNA, 107 bp, Zea mays
ctcttccacagaataggcaaaacagtctccttggctgatctccgaatcttccgccgaagcccctggcgcctctgcctcttggagctggtggccgaaaggaagtttgt

SEQ ID NO: 550 - DNA, 294 bp, Zea mays
cttgaggttgacttgcccgaagctacagaagccgcagggtggttgtctatgtattgtgggacataaggcggatgaaacgaagcagtatgcataacctgcttcgactgagcttgttgaggtgcagcttcggctagttccttttgcttctggattgtaacatggcacgtcctagtggtgtggcccttgccctctccacagaataggcaaaacagtctccttggctgatctccgaatcttccgccgaagcccctggcgcctctgcctcttggagctggtggccgaaagaaagtttgt

SEQ ID NO: 551 - DNA, 294 bp, Zea mays
gcttgaggttgacttgcagaagctacggaggctgcagggtggttgtctatgtattgtgggatataaggcggatgacacgaagcagtatgcatgacctgcttcggctgagcttgttgagatgcagcttcggcaatttccttttgcttctggattgtaatgtggcacgacctagtggtgtggcccttgccttctccacagaacaagcaaaacagtctccttggctgatctccgaatcttccgccgaagcccctggcgcctctgcctcttggagctggtggccggaaggaagtttgt

SEQ ID NO: 552 - DNA, 294 bp, Zea mays
tgctgaggttgacttgccgaagctacagaagccgcagggtggttgtctatgtattgtgggacataaggcggatgaaacgaagcagtatgcataacctgcttcgactgagcttgttgagatgcagcttcggctagttccttttgcttctggattgtaacatggcacgtcctagtggtgtggcccttgccctctccacagaataggcaaaacagtctccttggctgatctccgaatcttccgccgaagcccctggcgcctctgcctcttggaactggtggccgaaagaaagtttgt

SEQ ID NO: 553 - DNA, 294 bp, Zea mays
gcttgaggttgacttgccgaagctacagaagccgcagggtggttgtctatgtattgtgggacataaggtggatgaaacgaagcagtatgcaaaacctgcttcgactgagcttgttgagatgcagcttcggctagttccttttgcttctgaattgtaacatggcacgtcctagtggtgtggcccttgccctctccacagaataggcaaaacagtctccttggctgatctccgaatcttccgccgaagcccctggcgcctctgcctcttggagctggtggccgaaaggaagtttgt

SEQ ID NO: 554 - DNA, 294 bp, Zea mays
gcttgaggttgacttgccgaagctacagaagccgtagggtggttgtctatgtattgtgggacataaggcggatgaaacgaagcagtatgcaaaacctgcttcgactgagcttgttgagatgcagcttcggctagttccttttgcttctggattgtaacatggcacgtcctagtggtgtggcccttgccctctccacagaataggcaaaacagtctccttggctgatctccgaatcttccgccgaagcccctggcgcctctgcctcttggagctggtggccgaaaggaagtttgt

SEQ ID NO: 555 - DNA, 343 bp, Zea mays
gcttgaggttgacttgccgaagctacagaagccgcagggtggttgtctatgtattgtgggacataaggcggatgaaacgaagcagtatgcataacctgcttcgactgagcttgttgagatgcagcttcggctagttccttttgcttctggattgtaacatggcacgtcctagtggtgtggcccttgccctctccacagaataggcaaaacagtctccttggctgatctccgaatcttccgccgaagcccctggcgcctctgcctcttggagcgggtggccgaaaggaagtttgttgttgccccgaagcctgtgaggagcactgcggcctgttttgctgactcc

SEQ ID NO: 556 - DNA, 294 bp, Zea mays
gcttgaggttgacttgccgaagctacagaagccgcagggtggttgtctatgtattgtgggacataaggcggatgaaacgaagcagtatgcataacctgcttcgactgagcttgttgagatgcagcttcggctagttccttttgcttctggattgtaacatggcacgtcctagtggtgtggcccttgccctctccacagaataggcaaaacagtctccttggctgatctccgaatcttccgccgaagcccctggtgcctctgcctcttggagctggtggccgaaaggaagtttgt

SEQ ID NO: 557 - DNA, 297 bp, Zea mays
gcttgagaatggcttgccgaagcgacagaggtcgtaggctattgattgcctacgtactctaggacgtagggagaatagcatgaagccgtatgtagaacctgcttcggctgattctgtcgtgcttcaacttcggcaatctctttctgcttctgaattgtgacttggcacgttcttgtggtgtggcctttgtcttcgccgcagaacaaacaaaacagtctccttggctgatctccatatcttcctctgaagcttctgccccctctgcctcttggagctggtggcctgaaggagctttgt

SEQ ID NO: 558 - DNA, 294 bp, Zea mays
gcttgaggttgacttgccgaagctacagaagccgcagggtggttgtctatgtattgtgggacataaggcggatgaaacgaagcagtatgcataacctgcttcgactgagcttgttgagatgcagcttcggctagttccttttgcttctggattgtaacatggcacgtcctagtggtgtggcccttgccctctccacagaataggcaaaacagtctccttggctgatctccgaatcttccgccgaagcccctggctcctctgcctcttggagctggtggccgaaagaaagtttgt

SEQ ID NO: 559 - DNA, 294 bp, Zea mays
gcttgaggttgacttgccgaagctacagaagccgcagggtggttgtctatgtattgtgggacataaggcggatgaaacgaagcagtatgcataacctgcttcgactgagcttgttgagatgcagcttcggctagttccttttgcttctggattgtaacatggcacgtcctagtgttgtggcccttgccctctccacagaataggcaaaacagtctccttggctgatctccgaatcttccgccgaagcccctggcgcctctgcctcttggagctggtggccgaaagaaagtttgt

SEQ ID NO: 560 - DNA, 294 bp, Zea mays
gcttgaggttgacttgccgaagctacagaagccgcagggtggttgtctatgtattgtgggacataaggcggatgaaacgaagcagtatgcataacctgcttcgactgagcttgttgagatgcagcttcggctagttccttttgcttctggattgtaacatggcacgtcctagtggtgtggcccttgccctctccacagaataggcaaaacagtctccttggctgatctccgaatcttccgctgaagcccctggcgcctctgcctcttggagctggtggccgaaaggaagtttgt

SEQ ID NO: 561 - DNA, 151 bp, Zea mays
cttctgtattgtaacatggcacgtcctagtagtgtggcccttgccctctccacagaataggcaaaacagtctccttggctgatctccgaatcttccgccgaagcccctggcgcctctgcctcttggagctggtggccgaaaggaagtttgt

SEQ ID NO: 562 - DNA, 107 bp, Zea mays
cctctccacagaataggcaaaacagtctccttggctgatctccgaatcttccgccgaagcccctggcgcctctgcctcttggagctggtggccgaaagaaagtttgt

SEQ ID NO: 563 - DNA, 107 bp, Zea mays
ttctcacaggaataaggcaaaacagtctccttggctgatctccgaatcttccgccgaagcccctggcgcctctgcctcttggagctggtggccgaaagaaagtttgt

SEQ ID NO: 564 - DNA, 294 bp, Zea mays
gcttgaggttgacttgccgaagctatagaagccgcagggtggttgtctatgtattgtgggacataaggcggatgaaatgaagcagtatgcaaaacctgcttcgactgagcttgttgagatgcagcttcggctagttccttttgcttctgtattgtaacatggcacgtcctagtggtgtggcccttgccctctccacagaataggcaaaacagtctccttggctgatctccgaatcttccgccgaagcccctggcgcctctgcctcttggagctggtggccgaaaggaagtttgt

SEQ ID NO: 565 - DNA, 294 bp, Zea mays
gcttgaggttgacttgccgaagctacagaagccgcagggtggttgtctatgtattgtgggacataaggcggatgaaacgaagcagtatgcaaaacctgcttcgattgagcttgttgagatgcagcttcggctagttccttttgcttctggattgtaacatggcacgtcctagtggtgtggcccttgccctctccacagaatagacaaaacagtctccttggctgatctccgaatcttccgccgaagcccctggcgcctctgcctcttggagctggtggccgaaaggaagtttgt

SEQ ID NO: 566 - DNA, 294 bp, Zea mays
gcttgaggttgacttgccgaagctacagaagccgcagggtggttgtctatgtattgtgggacataaggcggatgaaacgaagcagtatgcaaaacctgctttgactgagcttgttgagatgcggcttcggctagttccttttgcttctggattgtaacatggcacgtcctagtggtgtggcccttgccctctccacagaatagacaaaacagtctccttggctgatctccgaatcttccgccgaagcccctggcgcctctgcctcttggagctggtggccgaaaggaagtttgt

SEQ ID NO: 567 - DNA, 294 bp, Zea mays
gcttgaggttgacttgccgaagctacagaagccgcagggtggttgtctatgtattgtgggacataaggcggatgaaacgaagcagtatgcataacctgcttcgactgagcttgttgagatgcagcttcggctagttccttttgcttctggattgtaacatgacacgtcctagtggtgtggcccttgccctctccacagaataggcaaaacagtctccttggctgatctccgaatcttccgccgaagcccctggcgcctctgcctcttggagctggtggccgaaaggaagtttgt

SEQ ID NO: 568 - DNA, 204 bp, Zea mays
ttcatgttttctctggaagagagctctcttcagtccactctgaaatggctgtagggtttcattagctgccgactcatccattcacctgccaagaaccatggacaggtctggtcttggtagccgagtgggtggcgcgggagctaaaatcaagctctacgctgtttgtggttggactgaagggtgctcccttttgtttgctcaaac

SEQ ID NO: 569 - DNA, 214 bp, Zea mays
acgacgatggctggatggaagagagcgtccttcagtccactcaggggcggtgctagggtcgaattagctgccgactcattcacccacatgccaagcaaacggccatggaaaccagctttgcagatgagtgaatgaagcgggaggtaaaagcttcgatctcgcaccgtctttgcttggactgaagggtgctccctcctccctcgctccttgttta

SEQ ID NO: 570 - DNA, 238 bp, Zea mays
ttgtgaagatgcggactacctgcacctggacagaaagaccctatgaagctttattgttccctgggattggctttgggcttttcctgtgtagcttaggtggaaggcgaagaaggcccccttccgggggggccgagccatcagtgagataccactctggaagagctcggattctaaccttgtgtcagatccgtgggccaagggacagtctcaggtagacagtttctatggggcgtaggcc

SEQ ID NO: 571 - DNA, 278 bp, Zea mays
atttatctatctcttgactcgaaatgggagcagagcaggtttggaaaaggatcttagagtgtctagggttgggccaggagggtctcttaaccccttcttttttctgcccataggagttatttcccaaggacttgccgtggtaagggggagaagggggaagaagcacacttgaagagcgcagtacaacggggagttgtatgctgcgttcgagaaggatgaatcgctcccgaaaaggagtctattgattctctcccaattggttggatcgtaggggcgat

SEQ ID NO: 572 - DNA, 278 bp, Zea mays
atttatctatctcttgactcgaaatgggagcagagcaggtttgaaaaaggatcttagagtgtcaagggttgggccaggagggtctcttaaccccttcttttttctgcccatcagagttatttcccaaggacttgccgtggtaagggggagaagggggaagaagcacacttgaagagcgtagtacaacgacgagttgtatgctgcgttcgggaaggatgaattgctcccaaaaaggagtctattgattctctcccaattggttggatcgtaggggcgat

SEQ ID NO: 573 - DNA, 125 bp, Zea mays
agctcaaggtgagaatcacagtgtggctctcctctggcatgaaggcgcggctgagaggcacgaacagtttctggccttcccctgccaatgccaaaggagagctgccctgccattcgttagccctg

SEQ ID NO: 574 - DNA, 136 bp, Zea mays
agaacgggaggagggtttctggaatggaggctggtccaagatccttaggtgttaaagcattatattgccttgtttctggttttgtgtttgagatctcggaccaggcttcattcctcaaacccacgctcccgacact

SEQ ID NO: 575 - DNA, 107 bp, Zea mays
ttggagtctttgcgggcttggcgtccttcattccaaaccgaatgatcaagtcttgtgtgtacttcgtttgggagatgaaggagccgtccttgagttgcttcacttgg

SEQ ID NO: 576 - DNA, 142 bp, Zea mays
aacaatggctggatgaagcgtccaaagggatcgcattgatccatcattccttccattttttcatgcatggctggtcttcgtcgtctgcaaggacttgtcgatggatcaatgcgatccttttggaggcttcccctagacatta

SEQ ID NO: 577 - DNA, 129 bp, Zea mays
ggcctccgtagctcggcgccaagatctgtggcgccgagctacgaggccgcgtcggcgtcgcgccgacgccaggtcagccctagcctcagggagccgttagcgccacgtcagagctcggcgacatagcct

SEQ ID NO: 578 - DNA, 104 bp, Zea mays
ttatttcctagctcggcgccaagatctgtggcgccgagctaggtgccacgcaggctgccaggtcacacagctcggcgccacagcctatggcgccgagctaaggg

SEQ ID NO: 579 - DNA, 107 bp, Zea mays
aagtttcctagctcggcgccatgatctgtggcgccgagctaggtgtgccacgcgggctgccacgtcatgaagctcggcgccatagccgatggcgccgagctgtgtta

SEQ ID NO: 580 - DNA, 180 bp, Zea mays
tgctaacggcggcggtgggctcggcgcgaaaactgaagaacagacgaaacgggcagagagaaaggcgtcgggcggatatttcctagctcggcgccaagatctgtggcgccgagctaggtgccacgcgggatgacacgtcacgaagctcggcgccataagctgtggcgccgagctgtgtta

SEQ ID NO: 581 - DNA, 118 bp, Zea mays
ggcaaacgtagctcggcgccaagatctgtggcgccgagctttcgtagctcggcgccaagatctgtggcaccgagctacgaggccgcgtcgcccacgtcggtgccaggtcagctccagc

SEQ ID NO: 582 - DNA, 105 bp, Zea mays
gtatttcctagctcggcgccaagatctgtggcgccgagctaggtgccacgcgtactgccacgtcacacagctcggcgccataggctgtgacgccgagctatgcct

SEQ ID NO: 583 - DNA, 194 bp, Zea mays
tgagaagaattgtgctgctctcggccagcagcgcgactgttttataggcgtccgtagctcggcgccaagatctgtggcgccgagctacgagaccgcgtcgccgccacatcgctgccacgttagccctgggcgcagatagccgttgctgccacgtcagacctcggcgccataggctgtggcaccgagctgtgtta

SEQ ID NO: 584 - DNA, 124 bp, Zea mays
acacaaccgagctcggcgccaagatctgtggcgccgagctcggtgccacgtcgacgccacgcgtctgggttgtgccaacgcaacacgacctcggcgccatatgctatggcggggagctgtgttt

SEQ ID NO: 585 - DNA, 339 bp, Zea mays
gcgccgggcgagcggcgagctcggcggcgagctcggcgggctgcgggcgggcggcgcgctcgccgggcgcgctcggcgggctgcgggcgggcggcgagctcggcggcggcgggctggcggcggcgggctggcggcgaactcggcggcggcggcggtatgagcggcggcgggcttaggaaaatgaagccgcaagcgaaacagagaagaaaggaagaggaaaggcgtttcggttaagtttcctagctcggcgccaagatctgtggcgccgagctaggtgtgccacgcgtgcagcctcgtcacgaagctcggcgccatagtctgtggcgccgagctgtgttt

SEQ ID NO: 586 - DNA, 314 bp, Zea mays
cgtgagtattatttgctagctacaggcgcaggataaaaaaaatctaggcgagaaataaatttaagcggacacaccaacgatataaacaaaaaaaacaaaaaaaatgcaaactatggggcttgaacccacgaccacatggttagaagccttgtgctctaccaagtgggctagatgggctttgtgctcatgtctgcaacaaatattttaataacacaaccgagctcggcgccaagatctgtggcgccgagctcggttccacgtcgacgccacgcgtctgggtcgtgccaacgcaacacgacctcggcgccatagcc

SEQ ID NO: 587 - DNA, 206 bp, Zea mays
caacctcatggttcaaaaccttgtgctccaccaactgagctagatggcttggtgctatctttttgcagcaaaactgtagataacacaaccgagctcggcgccaagatctgtggcgccgagctcggtgccacgtcaacgccacggtgtctgggttgtgccaacgcagccgtacctcggcgccataacctatggcgccgagctgtgtt

SEQ ID NO: 588 - DNA, 215 bp, Zea mays
tgagaggaaatgtgctgctctcggccagcagcgtggctggttttataagcctccgtagctcggcgccaagatctgtggcgccgagctacgaggccacatcgccgccacgtcgatgctaggtcagccctaggcgcagggagccgttactgccatgtcacaggtcggcgccgagatgtgttacctcggtgccacatcctatggcgccgagctttggg

SEQ ID NO: 589 - DNA, 108 bp, Zea mays
ttaaatactagctcgacgtcaagatctgtggcgccgagatagctgccacgtcggctccacgaaaacatcgcatcagccctcactagtcaatgagtcacgtatcttagc

SEQ ID NO: 590 - DNA, 125 bp, Zea mays
acacaaccgagctcggcgccaagatctgtggcgccgagctcggtgccatgtcgacgccacgcgtccgggttatgccaacgtaacacatacctcggcgccatagcctatggcgccgagctgtgtta

SEQ ID NO: 591 - DNA, 242 bp, Zea mays
caaaatgtaaactgtggggcttgaacccacgatcataaggttagaacttagaagccttgtgctctaccaactgggctagatgggctttatacttatgtctccaacaaacatattaataacacaaccgagctcggcgccaagatctgtggcgccgagcttggtgccacgtcgacgccacgcgtccgggttgtgccaacgcaacacatacctcggtgccatagcctatggcgccgagctgtgtt

SEQ ID NO: 592 - DNA, 114 bp, Zea mays
acacaagcgagctcggcgccaagatctgtggcgccgagctcggtgccacggcgtccaggtgtgccagcgtagcacgtacctcggcgccataggctatggcgccgagcaaagggt

SEQ ID NO: 593 - DNA, 125 bp, Zea mays
ttactccggagctcggcgccaagatctgtggcgccgagctccgggccacgtcggcgccgcgtaagctggtggtgacagcgcgacaggttactcggcgccaagatctatgacgccgagctatgtaa

SEQ ID NO: 594 - DNA, 295 bp, Zea mays
ggggcgggcgagctcggcggtcgggcggacaccgagcgcggtcgccggagctcggcgggcggggtgggcggagctcgggaacggcggcggctatttcctaactcgggaacggcggcggcggctaaacgtgaaaagtaacagagaagaaacgcagagaaaaggggctcgcggttaattcctagctcggcgccaagatctgtggcgccgagctaggtgtcacgcggacttccacgtcacccctgcccgccatggccactttttggcgccgaggtaacacgtgtgcccggggcgttaa

SEQ ID NO: 595 - DNA, 116 bp, Zea mays
ggaatttgtagctcggcgccaagatctgtggcgccgagctacgaggccgggccgcaactagccgttgctgccacgtcatagctcggcgccataggctgtggcgccgagctacggca

SEQ ID NO: 596 - DNA, 301 bp, Zea mays
tcacaacggcggcggcggcgtggcgcgcagggagcagaaaacggcggcggcgcggcgcgcagggggcagcggcggcggcgagctgcgcgcgcggcgcagcggcggcgacgaaaaaacggcgaggtagcagcgacaaacagagaaggagcgcgcggagaaggaaccgcacacgcggttatttcctagctcggcgccaagatctgtggcgccgagctaggtgccacgccatcagccacgtcaccgcccgaggcaatggccacgtcacagctcggcgccacagcctgtggcgccgagctgtgtt

SEQ ID NO: 597 - DNA, 147 bp, Zea mays
ggaattcgtagctcggcgccaagatctgtggcgccgagctacgaggccgcgccgccgccacgccagagccaggtcagccctagacgcaactagccgttgcggccacgtcacagctcggcgccacagcctgtggcgccgagctgtgtt

SEQ ID NO: 598 - DNA, 134 bp, Zea mays
ggaattcgtagctcggcgccaagatctgtggcgccgagctacgaggccgcgccgccgccacgtcagagccaggtcagccctggaagcaactagccgttacggccacgtcagagctcggcgccatagcctgtggc

SEQ ID NO: 599 - DNA, 305 bp, Zea mays
gcgagctccgcggcgagctctcggcgagcaaggcgggcgggggctatcggcgagctcggcgggcggcggccggggcactctcgccgagcgcgggcggcggcggaggtaggtaggcgcggcggcgggctaaggaacggcggcagcgggcgtcggttccgtgaaacagagaacaaacgaagaggaaagggaggtcacagttaagtttcctagctcggcgccaagatctgtggcgccgagctaggtgtgccacgcggacttccacgtcacgaagctcggcgccacagcctgtggcgccgagctgtgtt

SEQ ID NO: 600 - DNA, 104 bp, Zea mays
atacaacctagttcggcgccaagatctgtggcgccgagctcggtgccacgtcgacgccacgcgtctgggttgtgccgacgcatcacgtacctcggcgccatagg

SEQ ID NO: 601 - DNA, 206 bp, Zea mays
caacctcatggttcaaaaccttgtgctccaccaactgagctagatggcttggtgctatctttttgcagcaaaacagtagataacacaaccgagctcggcgccaagatctgtggcgccgagctcggtgccacgtcaacgccacggtgtccgggttatgccaacgcagccgtacctcggcgccataacctatggcgccgagctgtgtt

SEQ ID NO: 602 - DNA, 334 bp, Zea mays
cgtgagtattatttgctagctacaggcgcaggataaaaaaaatctaggcgagaaataaatttaaacggacacaccaacgatataaacaaaaaaaacaaaaaaaatgcaaactagggggcttgaacccacaaccacatggttaaaagccttatgctctaccaagtgggctagatgggctttgtgctcatgtctgcaacaaatattttaataacacaaccgagctcggcgccaagatctgtggcgccgagctcggttccacgtcgacgccacgcgtctgggttgtgccaacgcaacacgacctcggcgccatagcctatgtcgccgagcaaagggt

SEQ ID NO: 603 - DNA, 105 bp, Zea mays
acacaaccgagctcggcgccaagatctgtggcgccgagctcagtgccacgtcagcgccacggcgtctgggttgtgccaacgcatcacgtacctcggcgccataac

SEQ ID NO: 604 - DNA, 105 bp, Zea mays
acacaaccgagctcggcgccaagatctgtggcgccgagctcagtgccacgtcagcgccacggcgtccgggttgtgccaacgcatcacgtacctcggcgccataac

SEQ ID NO: 605 - DNA, 255 bp, Zea mays
accgggggtggcggcggtgctcgggctcgacggtggagcttgggcgatgagagaggtgagagagggagagaatggaaaaagggggaagctagatggcggctaaatcctagctcggcgccaagatctgtggcgccgagctagggggccacatcggcgccgcgtcagcccctcggcgccagcggggcaggttgctcggaaccattggtgccgagctgtgttaccttggcgccacatcttatggtgccgagcaaatgg

SEQ ID NO: 606 - DNA, 194 bp, Zea mays
tgagaggaaatgtggtcttctcggccagcagcgcggccggttttataggcctccgtagctcggcgccaagatctgtggcgccgagctacgaggccgcatcggcgccgcgtcgatgctaagtgagccctaggcgcagggagccgttagtgccacgtcacagctcgacgccatagcctatggcaccaagctgtgtt

SEQ ID NO: 607 - DNA, 124 bp, Zea mays
acacaaccgagctcggcgccaagatctgtggcgccgagctcggttccacgtcgacgccacgcgtctgggttgtgccaacgcaacacgacctcggcgccataggctatggcgccgagctgtgtta

SEQ ID NO: 608 - DNA, 174 bp, Zea mays
gctcgacgtcaggatctagctcggcgtcaatatctgtgacgcggagctaggttgccacgtgcgctgccatgtcggtaagctcgacgtcaagatctgtggcgccgagctagattgccacgtgccctgccacgtcggtaagctcggtgtcaagatccgtgacgtggagctaggttg

SEQ ID NO: 609 - DNA, 247 bp, Zea mays
gctgcgggcgggcggcgagctcggcggcggcgagctggcggcgagctcggcggcggcggcggtatgagcgacggcgggcgtaggaaaatgaagacgcgagcgaaacagagaagaaacgaagaggaaaggcgtttcggttaagtttcctagctcggcgccaagatctgtggcgccgagctaggtgtgccacgcgggctgccacgtcacgaaggctcggcgccatagactgtggcgccgagctgggtaa

SEQ ID NO: 610 - DNA, 110 bp, Zea mays
acacaaccgagctcggcgccaagatctgtggcgccgagctcggtgacacgtcgacgccacgcgtctaggttgtgccaacgcaacacgatctcggcgccataacctatgac

SEQ ID NO: 611 - DNA, 124 bp, Zea mays
acacaaccgagctcagcgccaagatctgtggcgccgagctcggtgccacgtcgacgccacgcgtctgggttgtgccaacgcaacacgacctcggcgccatagcctatggcgccgagctgtgtta

SEQ ID NO: 612 - DNA, 142 bp, Zea mays
ggcagacgcagctcggcgccaagatctgtggcgccgagctttcgtagctcggcgccaagatctgtgacgccgagctaccaggccgcgtccacacgtgggtgccaggtcagtgctgccacgtcacagctcggcgccataggct

SEQ ID NO: 613 - DNA, 108 bp, Zea mays
ttatttcctagctcggcgccaagatctgtggcgccgagctaggtgccacgcggacttccacgtcacatagctcggcgccacagatcttggcgccgagctaggaaataa

SEQ ID NO: 614 - DNA, 194 bp, Zea mays
tgagaggaattgtgctgctctcggccagcagcgcggctgttttatagaagtccgtagctcggcgccaagatctgtggcgccgagctagaaggccgcgtcgccgccacatcgatgacaggtcagccctgggcgcaggtagccgttgctgccacgtcatacctcggcgccataggctgtggcgccgagctgtgtta

SEQ ID NO: 615 - DNA, 196 bp, Zea mays
ggcgggccgggcggctcaggtggcggcacgggagcaaacaggagaacaaagggagtgggaggaaggagaaagaagaaacgcggcgcgccggttaagtcctagttcggcgccaagatctgtggcgccgagctaggtgccacggtggccgccgcgtcagcaaagctcggcgccgagacctgtggcgctgagctgtgtt

SEQ ID NO: 616 - DNA, 124 bp, Zea mays
acacaaccgagctcggcgccaagatctgtggcgccgagctcggttccacgtcgacgccacgcgtctggggtgtgccaacgcaacacgacctcggcgccataggctatggcgccgagcaaagggt

SEQ ID NO: 617 - DNA, 124 bp, Zea mays
acacaaccgagctcggcgccaagatctgtggcgccgagctcggttccacgtcgacgccacgcgtctggggtgtgccaacgcaacacgacctcggcgccatagcctatggcgccgagctgtgtta

SEQ ID NO: 618 - DNA, 214 bp, Zea mays
attaagaaaggcgatcgaagagctcccttcgatccaatccaggaggggaagtggtcggttgcagctgccggttcatggatacctctctggtgcagcaatggccgctgctcacctctgcacttgcatgggtgtgcatgacccgggagatgagcccgccatcatctttccctcgtgcttggattgaagggagctcctctctgtctgtctgtctgtc

SEQ ID NO: 619 - DNA, 251 bp, Zea mays
atgctttggatttgaagcggagctcctctcattccaatgaagggtccttccgaagggtggttccgctgctcgttcatggttcccactatcctatctcatccatgtttgcgtgtcttcgagaggaagcggaagagattcctgtggtcgccttttgagataggcttgtggtttgcatgaccgaggagctgcaccgaccccgtgctggccgctctttggattgaagggagctctgcatcctgatccaccccccc

SEQ ID NO: 620 - DNA, 247 bp, Zea mays
cacgacacacgtgcccacacgtatagcagcgggctttaggtctcttgggctaacactcccccccccccaaaagctagcctttcagggggttgcaccctcaaccttataaaccatgctatcacactctcaccacacaatgtgggactattcccaacaatctccccctcacacattgtgagccgagatttgtcctgagaatgcactggaccaacctggctctgataccaattgttggaaccggaccgtc

SEQ ID NO: 621 - DNA, 245 bp, Zea mays
cacgacacacgtgcccacacgtatagcagcgggctttaggtctcttgggctaacactcccccccccccaaaagctagcctttcaggggttgcaccctcaaccttataaaccatgctatcacactctcaccacacaatgtgggactattcccaacaatctccccctcacacattgtgagccgagatttgtctgagaatgcactggaccaacctggctctgataccaattgttggaaccggaccgtc

SEQ ID NO: 622 - DNA, 242 bp, Zea mays
cgcgacacacgcgcccgcacgtatagcagcgggctttaggtctcttgggccaacactcccccaaaaagctagcctattaggggattgcaccctcaaccatataaaccttgttttctcactctcactagacaatgtgggactattcccaacaatctccccctcacacattgtgagccgagattttatctgagaatgcacagggccaacctggctctgataccaagtgttggaactggactgcc

SEQ ID NO: 623 - DNA, 357 bp, Zea mays
cgcgacacacgcgcccgcacgtatagcagcgggctttaggtctcttgggccaacactcccccaaaaagctagcctttcaggggttgcaccctcaaccatataaaccatgctatcacaccctcaccacacaatgtgggactattcccaacaatctccccctcacacattgtgagccgagatttgtctgagaatgcactgggccaacctggctctgataccaattgttggaaccggaccgccgacacacggcgtgtccgtcggggccgcccgcacacacggcacgcccacccaggctgtcgggccgcgacacacgcgcccacacgtatagcagcgagctttaggtctcttgggccaaca

SEQ ID NO: 624 - DNA, 242 bp, Zea mays
cgcaacacacgcgcccacacgtatagcagcgggctttatgtctcttgggccaacactccccctaaaaagctagcctattagggtgttgcactctcaaccatataaatcatgctttctcaccctcaccacacaatgtgggactattcccaacaatctccccctcacacattgtcagccgagatttgtctgagaatgcactgggccaacctggctctgataccaattgttggaaccggaccgcc

SEQ ID NO: 625 - DNA, 303 bp, Zea mays
tgtctgagaatgcactgggccaacctggctctgataccaaatgttggaaccggaccgccgacacacggcatgtccgttggggccgcccgcacacacggcgcgcccacccaggctatcgggccgcgacacacgcgcccgtacgtatagcagcgggctttaggtctcttgggccaacactccccccaaaaagctagcctatcagggggttgcaccctcaaccttataaaccatgctatcacactctcaccacacaatgtgggactattcccaacagtgcctaggtgttaaatctggtgctcaaca

SEQ ID NO: 626 - DNA, 241 bp, Zea mays
tcggtgttgaccaaaatttcagactacaattatctgatcaactgcaaaatcgtgcctttctgatagtgaatttgaccaactgcaaaaatccagaccacgatttttatgatacgtcacaagtttctgagtgtatttcaacgagcgacgattcaggcagcccctttgtccgatctcaatggcaatggaggtgttgcgttgctcggagatagaaatcttttggtcttcagatcggctgagtggg

SEQ ID NO: 627 - DNA, 208 bp, Zea mays
gaactctaagcaccagagatttggcattctgtccacctccttccagaggagagtcatcttctgcaactcccatatgcagatgcaggtcgctgcatttttgcacagcagacccaccagcataacccttccctggaactcggcaagtgtgtgatcagtcagatgcagtggcagtgggatggcaaattgcctccaaatcccggtgcttaca

SEQ ID NO: 628 - DNA, 246 bp, Zea mays
agtggtgcaccacgagttggtgaagctgccagcatgatctggttatgatggtggtggtatatgtaagatggatgtaatctatactactaccggcccctgtcactctctctctctcccccgtccctgactgtcatatatggatcgacgaatccaagatgagaggggaagggagagagagagagggtaattaatgagcaccaggaccaggtcatgctgtagtttcatctgctggtggccgcacatcga

SEQ ID NO: 629 - DNA, 122 bp, Zea mays
cgtgcaccttattaagcagctgaagctgccagcatgatctgatctttcgtttactggcaactttggatacctaagatccagatcgtgctgcgcagtttcacctgctaattggagcacagaaa

SEQ ID NO: 630 - DNA, 191 bp, Zea mays
aaatgctcttgcgaatgagtgaagctgccagcatgatctagctctgatttggttggcaccatattagcaggcgtccacgcacagctagactagagtggcctcgcgcgctctcgtctggtctgtgtctcgctttgtgcctgcaaatcgttgttagatcatgcatgacagcctcattccttcacaattctggg

SEQ ID NO: 631 - DNA, 170 bp, Zea mays
acttagcaattgtggcaactgagatcagtcactgatataaagtacctgtacttgatgtcctgctcacttgctcagctcatgttgcagcttcaaccacagcaaaaacaagtgcatccttgcctccttggacaagttgcagcttcaaccacagcgaggtaagcgctgcagtt

SEQ ID NO: 632 - DNA, 126 bp, Zea mays
agatgagttttttgaaggtttgacagaagagagtgagcacacacggtggtttcttaccatgagtgtcatgctaggagctgtgcgtgctcaccctctatctgtcagtcactcatcaagcccatctgt

SEQ ID NO: 633 - DNA, 139 bp, Zea mays
gggtggaggagaggtgaaagctgacagaagagagtgagcacacatggtgcctttcttgcatgatgtatgatcgagagagttcatgctcgaagctatgcgtgctcacttctctctctgtcagccattagaactcctctat

SEQ ID NO: 634 - DNA, 234 bp, Zea mays
cgatggagaagaagagctcgtcattgagcgcagcgttgatgatgcggagcatgtacgtcttcccgggcttcactttcagcttgaacgtgtctgcgtgcatgcatatcataagtatggatatgagttagtataaagaatcatagccgttagcgctcattaactagtttttatatgtttatcgtcattgtatgtatgcacaaggctgcgcatgcatgcatatatatctggggcaaa

SEQ ID NO: 635 - DNA, 141 bp, Zea mays
gcccccttggctagccgatgtgggactaaagccggggcgctgactaccagcccctgacatcccaccccccttgggaagccccccaaggcaggcatgggccaaaccaggctctgataccagatgtcagcgtccaacccccgg

SEQ ID NO: 636 - DNA, 139 bp, Zea mays
gacgaggagcctatctcccttagccaagaatggcttgcctatctccattattttgttcatcgcaggaagcccttccgtgatggatgaaatgtggatgatggcatccattcttggctaagtgagtaattctcttccacca

SEQ ID NO: 637 - DNA, 138 bp, Zea mays
atgggggagcctatctcccttagccaagaatggcttgcctatctccactgtttggttcgtcttgggagaccaccctgatgatgggtgtactgtgtggatgatggcaggccttcttggctaagcgagtgattctcttcc

SEQ ID NO: 638 - DNA, 294 bp, Zea mays
gcttgaggttggcttgccgaagctacagaagccgcagggtggttgtctatgtattgtgggacataaggcggatgaaacgaagcagtatgcataacctgctttgactgagcttgttgagatgcagcttcggctagttccttttgcttctggattgtaacatggcacgtcctagtggtgtggcccttgccctctccacagaataggcaaaacagtctccttggctgatctccgaatcttccgccgaagcccctggcgcctctgcctcttggagctgatggccgaaagaaagtttgt

SEQ ID NO: 639 - DNA, 294 bp, Zea mays
gcttgaggttgacttgccgaagctacagaagccgcagggtggttgtctatgtattgtgggacataaggtggatgaaacgaagcagtatgcaaaacctgcttcgactgagcttgttgagatgcagcttcggctagttccttttgcttctggattgtaacatggcatgtcctagtggtgtggcccttgccctctccacagaataggcaaaacagtctccttggctgatctccgaatcttccgccgaagcccctggcgcctctgcctcttggagctggtggccgaaaggaagtttgt

SEQ ID NO: 640 - DNA, 204 bp, Zea mays
atgctgatctgcttcgactgagcttgatgagatgcagcttcggtaattccttttgcttctggaatgtaacatggcacgtcctagtggtgtggcccttgccctctcacagaataggcaaaacagtctccttggctgatctccgaatctccgccgaagcccctggcgcctctgcctctgggagctggtggccgaaaggaagtttgt

SEQ ID NO: 641 - DNA, 294 bp, Zea mays
gcttgaggttgacttgccgaagctacagaagccgcagggtggttgtctatgtattgtgggacataaggcggatgaaacgaagcagtatgcataacctgcttcgactgagcttgttgagatgcagcttcggctagttccttttgcttttggattgtaacatggcacgtcctagtggtgtggcccttgccctctccacagaataggcaaaacagtctccttggctgatctccgaatcttccgccgaagcccctggcgcctctgcctcttggagctggtggccgaaaggaagtttgt

SEQ ID NO: 642 - DNA, 294 bp, Zea mays
gcttgaggttgacttgccgaagctacagaagccgcagggtggttgtctatgtattgtgggacataaggcggatgaaacgaagcagtatgcataacctgctttgactgagcttgttgagatgcagcttcggctagttccttttgcttctggattgtaacatggcacgtcctagtggtgtggcccttgccctctccacagaataggcaaaacagtctccttggctgatctccgaatcttccgccgaagcccctggcgcctctgcctcttggagctggtggccgaaaggaagtttgt

SEQ ID NO: 643 - DNA, 325 bp, Zea mays
tgatcttgctcgatgaggtgaggcgaagctgctgtggaagcttgaggttgacttgccgagctacaaagccccgggtggttgtctatgtattgtggagtaggcggataaacgaaccatatgcataacctgcttcgactgagcttgttgagatgcagcttcggctagttccttttgcttctggattgtaacatggcacgtcctagtggtgtggcccttgccctctccacagaataggcaaaacagtctccttggctgatctccgaatcttccgccgaagcccctggcgcctctgcctcttggagctggtggccgaaagaaagtttgt

SEQ ID NO: 644 - DNA, 294 bp, Zea mays
gcttgagggtgacttgccgaagctacagaagccgcagggtggttgtctatgtattgtgggacataaggcggatgaaacgaagcagtatgcataacctgcttcgactgagcttgttgagatgcagcttcggctagttccttttgcttctggattgtaacatggcacgtcctagtggtgtggtccttgccctctccacagaataggcaaaacagtctccttggctgatctccgaatcttccgccgaagcccctggcgcctctgcctcttggagctggtggccgaaagaaagtttgt

SEQ ID NO: 645 - DNA, 294 bp, Zea mays
gctttaggttgacttgccgaagctacagaagccgcagggtggttgtctatgtattgtgggacataaggcggatgaaacgaagcagtatgcataacctgcttcgactgagcttgttgagatgcagcttcggctagttccttttgcttctggattgtaacatggcacgtcctagtggtgtggcccttgccctctccacagaataggcaaaacagtctccttggctgatctccgaatcttccgccgaagcccctggcgcctctgcctcttggagctggtggccgaaagaaagtttgt

SEQ ID NO: 646 - DNA, 294 bp, Zea mays
gcttgaggttgacttgccgaagctacagaagccgcagggtggttgtctatgtattgcgggacataaggtggatgaaacgaagcagtatgcaaaacctgcttcgactgagcttgttgagatgcagcttcggctagttccttttgcttctggattgtaacatggcacgtcctagtggtgtggcccttgccctctccacagaataggcaaaacagtctccttggctgatctccgaatcttccgccgaagcccctggcgcctctgcctcttggagctggtggccgaaaggaagtttgt

SEQ ID NO: 647 - DNA, 285 bp, Zea mays
tgacttgccgaagctacagaagccacagggtggttgtctatgtattgtgggacataaggcggatgaaacgaagcagtatgcataacctgcttcgactgagcttgttgagatgcagcttcggctagttccttttgcttctggattgtaacatggcacgtcctagtggtgtggcccttgccctctccacagaataggcaaaacagtctccttggctgatctccgaatcttccgccgaagcccctggcgcctctgcctcttggagctggtggccgaaagaaagtttgt

SEQ ID NO: 648 - DNA, 294 bp, Zea mays
gcttgaggttgacttgccgaagctacagaagccgcagggtggttgtctatgtattgtgggacataaggcggatgaaacgaagcagtatgcaaaacctgctttgactgagcttgttgagatgcagcttcggctagttccttttgcttctggattgtaacatggcacgtcctagtggtgtggcccttgccctctccacagaataggcaaaacagtctccttggctgatctccgaatcttccgccgaagcccctggcacctctgcctcttggagctggtggccgaaaggaagtttgt

SEQ ID NO: 649 - DNA, 294 bp, Zea mays
gcttgaggttgacttgccgaagctacagaagccgcagggtggttatctatgtattgtgggacataaggcggatgaaacgaagcagtatgcataacctgcttcgactgagcttgttgagatgcagcttcggctagttctttttgcttctggattgtaacatggcacgacctagtggtgtggcccttgccctctccacaaaataggcaaaacagtctccttggctgatctccgaatcttccaccgaagcccctggcgcctctgcctcttggagctggtggccgaaaggaagtttgt

SEQ ID NO: 650 - DNA, 294 bp, Zea mays
gcttgaggttgacttgccgaagctacagaagccgcagggtggttgtctatgtattgtgggacataaggcggatgaaacgaagcagtatgcataacctgcttcgactgagcttgttgagatgcagcttcggctagttccttttgcttctggattgtaacgtggcacgtcctagtggtgtggcccttgccctctccacagaataggcaaaacagtctccttggctgatctccgaatcttccgccgaagcccctggcgcctctgcctcttggagctggtggccgaaaggaagtttgt

SEQ ID NO: 651 - DNA, 294 bp, Zea mays
gcttgcggttgacttgccgaagctacagaagccgcagggtggttgtctatgtattgtgggacataaggcggatgaaacgaagcagtatgcataacctgcttcgactgagcttgttgagatgcagcttcggctaattccttttgcttctggattgtaacatggcacgtcctagtggtgtggcccttgccctctccacagaataggcaaaacagtctccttggctgatctccgaatcttccgccgaagcccctggcgcctctgcctcttggagctggtggccgaaaggaagtttgt

SEQ ID NO: 652 - DNA, 294 bp, Zea mays
gcttgaggttgacttgccgaagctacagaagccgcagggtggttgtctatgtattgtgggacataaggcggatgaaacgaagcagtatgcataacctgcttcgactgagcttgttgagatgcagcttcggctagttccttttgcttctggattgtaacatggcacgtcctagtggtgtggcccttgccctttccacagaataggcaaaacagtctccttggctgatctccgaatcttccgccgaagcccctggcgcttctgcctcttggagctggtggccgaaagaaagtttgt

SEQ ID NO: 653 - DNA, 294 bp, Zea mays
gcttgaggttgacttgccgaagctacagaagctgcagggtggttgtccatgtattgtgggatataaggcggatgatacgaagcggtatgcatgacctgcttcagctgagcttgttgagatgcagcttcggctatttccttttgcttctggattgtaacatggcacgtcctagtggtatggcccttgccttctccacagaacaagcaaaacagtctccttggctgatctccgaatcttccgccgaagcccctagcgcctctgcctcttggagctggtggccggaaggaagtttgt

SEQ ID NO: 654 - DNA, 294 bp, Zea mays
gcttgaggttgacttgccgaagctacagaagccgcagggtggttgtctatgtattgtgggacataaggcggatgaaacgaagcagtatgcataacctgcttcgactgagcttgttgagatgcagcttcggctagttccttttgcttctggattgtaacatggcacgtcctagtggtgtggcccttgccctctccacagaataggcaaaacagtctccttggctgatctccgaatcttccgccgaaacccctggcgcctctgcctcttggagctggtggccgaaagaaagtttgt

SEQ ID NO: 655 - DNA, 294 bp, Zea mays
gcttgaggttgacttgccgaagctacagaagccgcagggtggttgtctatgtattgtgggacataaggcggatgaaacgaagcagtatgcataacctgcttcgactgagcttgttgagatgcagcttcggctagttccttttgcttctggattgtaacatggcacgacctagtggtgtggcccttgccctctccacagaataggcaaaacagtctccttggctgatctccgaatcttccgccgaagcccctggcgcctctgcctcttggagctggtggccgaaaggaagtttgt

SEQ ID NO: 656 - DNA, 293 bp, Zea mays
agctggaggtgacttgccgaagctacagaagccgcagggtggtgtctatgtattgtgggacataaggcggatgaaacgaagcagtatgcataacctgcttcgactgagcttgttgagatgcagcttcggctagttccttttgcttctggattgtaacatggcacgtcctagtggtgtggcccttgccctctccacagaataggcaaaacagtctccttggctgatctccgaatcttccgccgaagcccctggcgcctctgcctcttggagctggtggccgaaagaaagtttgt

SEQ ID NO: 657 - DNA, 126 bp, Zea mays
aggctcggggactatggtgcagccaaggatgacttgccgatcgatgtgacgcctcttgatctcgtcgtcgtcagatcgtcgccgatcatcggcaagttgttcttggctacaccgtggctcctgctc

SEQ ID NO: 658 - DNA, 242 bp, Zea mays
ctgtgaagatgcggactacctgcacctggacagaaagacactatgaagctttactattctctgggattggctttgggcttttcgtgcgcagcttaggtggaaggtgaagaaggcccccttccgggggacccgagccatcagtgagataccactctagaagagctcagattctaactttgggtgggtcagacccgcgggcaaagggacagtctcaggtagacaatttctatggggtgtaggcc

SEQ ID NO: 659 - DNA, 278 bp, Zea mays
atttatctatctcttgactcaaaatgggagcagagcaggtttgaaaaaggatcttagagtgtctagggttgggccaggagggtctcttaaccccttcttttttctgcccatcggagttatttcccaaggacttgccgtggtaagggggagaagggggaagaagcacacttgaagagcgcagtacaacggggagttgtatgctgcgttcgggaaggatgaatcgctcccgaaaaggagtctattgattctctcccaattggttggatcgtaggggcgat

SEQ ID NO: 660 - DNA, 278 bp, Zea mays
atttatttatctcttgactcaaaatgggagcagagcaggtttgaaaaaggatcttagagtgtctagggttgagccatgagggtctcttaaccccttcttttttctgcccatcgaagttatttcccaaggacttctcgtggtaagggggagaagggggaagaagcacacttgaagagcgcagtacaacggggagttgtatgctgcgttcgggaaggatgaatcgctctcgaaaaggagtctattgattctctcccaattggttggatcctaggggcgat

SEQ ID NO: 661 - DNA, 106 bp, Zea mays
gagtgtggaggtccattgcagggcaaccccccgttggcaggtgcgacggcgacgtacccctaccctgccaaaggggatttgcccggcgatgcgcctgcacacacag

SEQ ID NO: 662 - DNA, 200 bp, Zea mays
gagaacaggaggaattgaagaagaaggccggatccggagtcgcatgcaacagatcacgaggaagaaaaggaggaagctttcttactttgaggggaatgttgtctggctcgaggtgcagaaacacgcagatctcatcgaggtcgtcttggttgttgttgatctcggaccaggcttcattcccctcaagtagagctcccggc

SEQ ID NO: 663 - DNA, 312 bp, Zea mays
tcttcctccacacccaccacaattaagcagctcctagctcctcctttcttccaccaccatcctgaagcaagcagtgcagcttgctctcacgaacctagctagtttcttctctgtctatatatatgctcctcagatccacttcgcatcatcacttcagctccttcgtcatgggggtttgtggggaatgttggctggctcgaggcagcatccgcgtcctagcctgctgttgccggtcgttttgcctgctaccggtcggccggacagatcgaggcgtcggaccaggcttcattcctcgcaaaccggtgcatccat

SEQ ID NO: 664 - DNA, 213 bp, Zea mays
catttgtgccatctgaagtgaggattagaggcaactgaaccatcatctattgcaaaggttcagtttcctctaatatctcatctcgaatgggcccatcgccggagatgtttgtttgcatatagctgaaaatgcagtcacccaaagtgagtgctgaaaggaatttctaacacctaggttgaattgagtgatactgaagtgtttggccatctgcta

SEQ ID NO: 665 - DNA, 119 bp, Zea mays
agtgtcaggcactgaaagtgagagttggaggaaagcaaaccggctgggtatcggattcagcaacggagggtgctgccggtcggtttgttttcctccaatatctcaccttcagtcgatag

SEQ ID NO: 666 - DNA, 162 bp, Zea mays
cccctccagtctccaccagaccaccacggcaccagcagcaccacccagttaaccaccacgcctctctctctctctctcttaccgggaagcaagcaaccgcctccgccgcgccgtctcgggctcgcttggtgcagatcgggacccgccgcccggccgacggga

SEQ ID NO: 667 - DNA, 123 bp, Zea mays
aaattcagatttgtgtgcgtgcctggctccctgtatgccacacatgtagcgcccaacccagatgctaaggttgcctgctgtgggtggcgtgcaaggggccaagcatgcatccatgcatgcatg

SEQ ID NO: 668 - DNA, 116 bp, Zea mays
gagggtgagaatcacagtgcggttctcctctggcacgaaggctggccagagcagcttatattgccaccacccttccttgccaaaggagaattgccctgccattcacaaccctgcaa

SEQ ID NO: 669 - DNA, 351 bp, Zea mays
catgcagacgacataggttatggcgccaaggtacgtgatacgccgagattaaaaaaaatctaggcgagaaataaatttaagcggacacaccaacgacataaacaaaaaaaaacaaaaaaatgcaaactatggggcttgaacccatgaccacatggttagaagccttgtgctctaccaagtgggctagatgggctttgtgctcatgtctgcaacaaatattttaataacacaaccgagctcggcgccaagatctgtggcgccgagctcggttccacgtcgacgccacgcgtctgggttgtgccaacgcaacacgacctcggcggttgacatcttcaggagcatagcgagaca

SEQ ID NO: 670 - DNA, 350 bp, Zea mays
catgcagacgacataggttatggcgccaaggtacgtgatacgccgagattaaaaaaaatctaggcgagaaataaatttaagcggacacaccaacgacataaacaaaaaaaaacaaaaaaatgcaaactatggggcttgaacccatgaccacatggttagaagccttgtgctctaccaagtgggctagatgggctttgtgctcatgtctgcaacaaatattttaataacacaaccgagctcggcgccaagatctgtggcgccgagctcggttccacgtcgacgccacgcgtctgggttgtgccaacgcaacacgacctcggcgccatagcctatggcgccgagctgtgtta

SEQ ID NO: 671 - DNA, 148 bp, Zea mays
ggaattcgtagctcggcgccaagatctgtggcgccgagctacgcggccgcgccgccgccacgtcagagccaggtcagccctggaagcaactagccgttgcggccacgtcacagctcggcgccataggctgtggcgccgagctgtgtaa

SEQ ID NO: 672 - DNA, 172 bp, Zea mays
acggcgggcgtaggaaacggtcgagcgaaacagagaacaaaagaagaggaaagggggtttcggttaagtttcctagctcggcgccaagatctgtggcgccgagctaggtgtgccacgcgggctgccacgtcacgaaggtcggcgccatatgctgtggcgccgagctgtgtta

SEQ ID NO: 673 - DNA, 127 bp, Zea mays
ttaagtcctagctcggcgccaagatctgtggcgccgagctaggtgccacgccagcagccacgtcagccctggcagccatggccatgtcaacgctcggcgccataggctatgacgccgagatgtgtta

SEQ ID NO: 674 - DNA, 243 bp, Zea mays
aacctcatagtttaaaaccttgtgcgccaataactgagctagatgactttgtggtatttctttgcaacaaaactgttaataacacaaccgagctcggcgccaagatctgtggcgccgagctcggtgccacgtcaacgccacggcgtccgggttgtgccaacgcagcacgtacctaggcaccataacctatggcgccgagctgtgttacctcggcgccataggctatggcgccgagcaaagggt

SEQ ID NO: 675 - DNA, 207 bp, Zea mays
caacctcaaggtttaaaaccttgtgctccaccaactgagctagatggctttgtgctatttctttgcaacaaaactgttaataacacaaccgagctcggcgccaagatctgtggcgccgagctcggtgccacgtcaacgctacggcgtccgagttgtgccaacgcagcacgtagctcggcaccataacctatggcgccgagctgtgtt

SEQ ID NO: 676 - DNA, 124 bp, Zea mays
acataaccgagctcggcgccaagatctgtggcgccgagctcggtgccacgtcgacgccacgcgtctgggttgtgccaacgcaacaagacctcggcgccatagcctatggcgccgagctgtgtta

SEQ ID NO: 677 - DNA, 105 bp, Zea mays
acacaaccgagctcggcgccaagatctgtggcgccgagctcggttccacgtcgacgccacggcgtccgggttgtgccgacgcatcacgtacctcggcgccataac

SEQ ID NO: 678 - DNA, 125 bp, Zea mays
acacaaccgagctcggcgccaagatctgtggcgccgagctcggtgccacgtcaacgccacggcgtccgggttgtgccaacgcagcacgaacctcggcgccataacctatggcgccgagctgtgtt

SEQ ID NO: 679 - DNA, 126 bp, Zea mays
acacaaccgagctcggcgccaagatctgtggcgccgagctcggtgccacgtcaacgccacgacgtccgggttgtgccaacgcagcacgtacctcggcggcataagctatggcgccgagcaaagggt

SEQ ID NO: 680 - DNA, 183 bp, Zea mays
tgagaggaattgtgctgctctcggccagcagcgcggttgttttataggcgtccgtagctcggcgccaagatctgtggcgccgagctacgaggccgcgtcgccgccacgtcagccctggacgcaggtagccattgctgccacgtcagacctcagcgccataggctgtggcgccgagctgtgtta

SEQ ID NO: 681 - DNA, 161 bp, Zea mays
acacaaccgagctcggcgccaagatctgtggcgccgagctcggttccacgtcgacgccacgcgtccgtgttgtgccaacgcaacacgacctcgggcgccatagcctatggcgccgagctgtgttacttcggcgccataggctatgacgccgagcaaagggt

SEQ ID NO: 682 - DNA, 123 bp, Zea mays
acacaaccgagctcggcgccaagatctgtggcgccgagcttggttccacgtcgacgccacgcgtccgtgttgtgccaacacaacacgacctcggcgccatagctatggcgccgaactcgtgtt

SEQ ID NO: 683 - DNA, 180 bp, Zea mays
tgctaacggcggcggtgggctcggcgcgaaaactgaagaacagacgaaactggcagagagaaaggcgtcgggcggatatttcctagctcggcgccaagatctgtggcgccgagctaggtgccacgcgggatgacacgtcacgaagctcggcgccataggctgtggcgccgagctgtgtta

SEQ ID NO: 684 - DNA, 285 bp, Zea mays
ggcgacctcggcgggcgagctcggcgggcgagctcggcgggctgctggcgggcggcgagctcggcggcggcgggctggcggcgagctcggcggcggcggcggtatgagcggcggcgggcgtagcaaacgaaagccgagcgaaacagagaagaaacgaagaggaaagggggtttcggttaagtttcctagctcggcgccaagatctgtggcgccgagctaggtgtgccacgcgggctgccacgtcatgaagctcggcgccataggctgtggcgccgagctgtgtta

SEQ ID NO: 685 - DNA, 229 bp, Zea mays
tgagaggaattgtgctgctctcggccagcagcgcggctgtttataggcgtccgtagctcggcgccaagatctgtggcgccgagctacgaggccgcgtcgccaccacatcgatgacaggtcagccctgggcgcaggtagccgttgctgccacgtcatacctcggcgccataggatgtggcgccgagctgtgttacctcggcgccacaggctatggcgccgagcatcgggt

SEQ ID NO: 686 - DNA, 106 bp, Zea mays
tgagaggaattgtgctgctctcgggccagcagcgcgactgttttataggcgtccgtagctcggcgccaagatctgtggcgccgagctacgaggccgcgtcgccgcc

SEQ ID NO: 687 - DNA, 183 bp, Zea mays
ggcatccgtagctcggcgccaagatctgtggcgccgagctacgaggccgcgtcgccaccacgtcgatgccaggtcagccctaggcgaaggtagtcgttgctgccacgtcagagctcggtgccataggatgtggcgatgagttgtgttaccacggtgccacatcctatggcgccgagcatcggg

SEQ ID NO: 688 - DNA, 114 bp, Zea mays
ggaattcgtagctcggcgccaagatctgtggcgccgagctacgaggccgcgccgccaccacgtcagtgccaggtcagccctaggcgcaagtagccgttgctgccacgtcacagc

SEQ ID NO: 689 - DNA, 127 bp, Zea mays
aagtttcctagctcggcgccaagatctgtggcgccgagctaggtgccacgcggacatccacgtcatccctgcccgccatgaccacgtcacagctcggcgccataggctgtggcgccgagctgtgtta

SEQ ID NO: 690 - DNA, 125 bp, Zea mays
acacaaccgagctcggcgccaagatctgtggcgccgagctcggtgccacgtcaatgccacggcgtccgggttgtgccaacgcaacacgtacctcggcgtcataacttatggcgctgagctgtgtt

SEQ ID NO: 691 - DNA, 207 bp, Zea mays
caaccccatggtttaaaaccttgtgctccaccaactaagctagatagctttgcgctatttctttgcaacaaaactgttgataacacaaccgagcttggcgacaagatctgtggcgccgagctcggtgccacgtcaacgccacggcgtccggggtgtgccaatgcagcacgtacctcggcgccataacctatggcgccaagctgtgtt

SEQ ID NO: 692 - DNA, 207 bp, Zea mays
caacctcatggttttaaaccttgtgctccaccaactgagctagatagctttatgctatttctttgcaacaaaactgttgataacacaaccgaactcggcgccaagatctgtggcgccgagctcggtgccacgtcaacgccacggcgtccgggttgtgccaacgcagcacgtacctcggcgccataacctatggcgccgagctgtgtt

SEQ ID NO: 693 - DNA, 359 bp, Zea mays
atttttcatagttatagccttcggcatgccgaagcgacaaacaatgttttgccagggaacggcggcggccgagctcgcgagccggggcggcggcggcgaaatccgttggcggggcgggagggagctgggcgggcggccggcggcgagccgggacggcggcgaagcgaacgggcggtgcggtcgggaacggcggcggtggtattttgcgcagagagaactgagaacaaacgcgcagagagaaacggcggcggcgggtatttcctagctcggcgccaagatctgtggcgccgagctaggtgccacgacgactgccacgtcaccgagctcggcgccataggctgcggcgccgagctgtgtta

SEQ ID NO: 694 - DNA, 127 bp, Zea mays
ttaagtcctagctcggcgccaagatctgtggcgccgagctaggtgccacgtgggctcccacgccaaacctcgccgccatggccacgtcaacgctcggcgccatatgctatggcgccgagctgtgtta

SEQ ID NO: 695 - DNA, 105 bp, Zea mays
acacaaccaagctcggcgccaagatctgtggcgccgagctcggttccacgtcgacgccacggcgtccgggttgtgccgacgcatcacgtacctcggcgccatagg

SEQ ID NO: 696 - DNA, 111 bp, Zea mays
tagacaccgagctcggcgccaagatctgtggcgccgagctcggtgccacgttggcatcacggtgtctgggttatgccagcgcagcagatacatcggcgccataggctatgg

SEQ ID NO: 697 - DNA, 208 bp, Zea mays
ggaccacaaggtaaggagccttgtgctccaccaactaggctagaaaagccttgtgcttatagcttttcaacataactgttgaaacacaaccgagctcggcgccaagatctgtggcgccgagctcagtaccacgtcggcgccatggcgtccgggtgtgccagcgtagcacgtacctcggcgccataggctatggcgccgagcaaagggt

SEQ ID NO: 698 - DNA, 317 bp, Zea mays
tttgaccgttttttttgtgctacttgtgcacagtcgatcagagcttatgaccaaaaaaaaactggacggacacaaaaaacattgaaatgcaaactatgggacttgaacccaggaccagaaggtgagaagccttgtgctctaccaactaggctagacaaactttgtgcttatagctatccaacaactgttaaaacacaaccgagctcggcgccaagatctgtggcgccgagctcggtgccacgtttgcgccacgacgtccgaatgtgccagcgtagcacgtacctcggcgccataggctatggcgccgagctgtgtta

SEQ ID NO: 699 - DNA, 101 bp, Zea mays
gtataaagggggtcggcgctaagatctgtggcgccgaccccccctgacaggattttcgccgccgatagggggtccaagatctatggcgccgaccccctgga

SEQ ID NO: 700 - DNA, 185 bp, Zea mays
tgagaggaattgtgctgctctcggccagcagcgcgactgttttataggcgtccgtagctcggcgccaagatctgtggcgccgagctacgaggccgcgtcgccgccacgtcagccctgggcgcaggtagccgttgctgccacgtcagaacctcggcgccatagggctgtggcgccgagctgtgtta

SEQ ID NO: 701 - DNA, 373 bp, Zea mays
gggcggtggcgcggcggcgctcggcgatcacggcggcggcgcggctgcggaggctgaaaacagagtgtgcagaaaaccgcggcgagaagagagccgcacgacttcatcctagctcggcgctaagatctgtggcgccgagctaggtgccacgcggcctgccacatcagctacaccacgtcatagctcggccataggcggtggcgccgagctaagggtccaaaattgagattaaaatttcctagggtctaaacgtgattttattcttattaaagggccaaaatacagaaaaatcggcctggcatgcatgtaggccggttggcgttggccggatatgcaaggcagcgcgcagtatctgcggcaacttgcgagctgt

SEQ ID NO: 702 - DNA, 147 bp, Zea mays
ggcatccgtagctcggcgccaagatctgtggcgccgagctacgaggccgcgtcgccaccacgtcggtgtcaggtcagccctaggcgaaggtagctgttactgccacgtcacacctcggcgccacagcctatgacgccgagcatcagg

SEQ ID NO: 703 - DNA, 125 bp, Zea mays
acacaaccgagctcggcgccaagatctgtggcgccgagctcggtgccacgtcgacgccacgcgctcgaggtgtgccaacgcagcacgtacctcggcgccatagcctatggcgccgagctgtgtta

SEQ ID NO: 704 - DNA, 125 bp, Zea mays
acacaaccgagctcggcgccaagatctgtggcgccgagctcggtaccacgtcgacgccacgcgctcggggtgtgccaacgcagcacgtacctcggcgccatagcctatggcgccgagctgtgtta

SEQ ID NO: 705 - DNA, 95 bp, Zea mays
ggaattcgtagctcggcgccaagatctgtggcgccgagctacgaggccgcgccgccgccacgtcagagccagatcagccctggacgcaactagcc

SEQ ID NO: 706 - DNA, 106 bp, Zea mays
ttttttcctagctcggcgccaagatctgtggcgccgagctaggtgccacgcggggactgccacgtcacgaagctcggcgccacagcctgtggcgccgagctgtgtt

SEQ ID NO: 707 - DNA, 105 bp, Zea mays
acacaaccaaactcggcgccaagatctgtggcgccgagctcggtgccacgtcgacgccacggcgtccgggttgtgccgacgcatcacgtacctcggcgccataac

SEQ ID NO: 708 - DNA, 105 bp, Zea mays
acacaaccgaactcggcgccaagatctgtggcgccgagctcggtgccacgtcgacgccacggcgtccgggttgtgccgacgcatcacgtacctcggcgccataac

SEQ ID NO: 709 - DNA, 106 bp, Zea mays
ttttttcctagctcggcgccaagatctgtggcgccgagctaggtgccacgcgggactgtcacgtcaggaagctcggcgccataggctgtggcgccgagctgtgtta

SEQ ID NO: 710 - DNA, 125 bp, Zea mays
acacaaccgagctcggcgccaagatctgtggcgccgagcttggtgccacgttggcgccacgacgttcgggtgtgccagcgtagcacgtacctcggcgccataggctatggcgccgagctaagggt

SEQ ID NO: 711 - DNA, 127 bp, Zea mays
ttaagtcctagctcggcgccaagatctgtggcgccgagctaggcgccacgcggacatccacgtcatccctgcccgccatggccacgtcatagctcggcgccataggctgtggcgccgagctgtgtta

SEQ ID NO: 712 - DNA, 126 bp, Zea mays
ttaagtcctagctcggcgccaagatctgtggcgccgagctaggcgccacgcggacggccacgtcagcgctgccagccttggccacgtcatagctcggcgccacagcctgtggcgccgagctgtgtt

SEQ ID NO: 713 - DNA, 139 bp, Zea mays
aagtttcctagctcggcgccaagatctgtggcgccgagctaggtgtgccacgcggctgccacgtcacgaagctcggcgccatagtgtggcgccgaactgtgttacttcggcgccacagcctatggcgccgagcaaaggg

SEQ ID NO: 714 - DNA, 114 bp, Zea mays
acacaaccgagctcggcgccaagatctgtggcgccgagctcggcgccacgacgtccaggtgtgccagcgtagcacgtacctcggcgccatagcctatggcgccgagcaaagagt

SEQ ID NO: 715 - DNA, 125 bp, Zea mays
acacaaccgagctcggcgccaagatctgtggcgccgagctctgtaccacgtcggcgccacgacgtccaggtgtgccagcgttgcacgtacctcggcgccataggctatggcgccgagctgtgtta

SEQ ID NO: 716 - DNA, 124 bp, Zea mays
acacaaccgagctcggcgccaagatctgtggcgccgagctcggtttcacgtcgacgccacgcgtctgggttgtgccaacgcaacaagacctcggcgccatagcctatggcgccgagctgtgtta

SEQ ID NO: 717 - DNA, 369 bp, Zea mays
cccactgcacgcaaaaatgattgagtcgacacgacacacacagttctccacgtttccctgcctgtcgtcgtctcgcctttgcgagaaataaatttaagcggacacaccaacgacataaacaaaaaaaaaacaaaaaaaatgcaaactatggggcttgaacccatgaccacatggttagaagccttgtgctctaccaagtgggctagatgggctttgtgctcatgtctgcaacaaatattttaataacacaaccgagctcggcgccaagatctgtggcgccgagctcggttccacgtcgacgccacgcgtctgggttgtgccaacgcaacaagacctcggcgccataggctatggcgccgagctgtgtta

SEQ ID NO: 718 - DNA, 139 bp, Zea mays
catggccctccttgccgtcttccacagctttcttgaactgcatgccgccggctggtggatgctgcgcgcttgaattccggtcgatcccaagaggcgcagttcaataaagctgtgggaaactgcagagagaggccaccag

SEQ ID NO: 719 - DNA, 146 bp, Zea mays
gaggggcgagcaaaccgtgctggagaagcagggcacgtgctcgccgacaagtcgaagccttagggcagcttggcctgtggctgcacgcgtacgtggtcgtcgcagcacgtgcgctccttctccaacatggcttctcgcccccatca

SEQ ID NO: 720 - DNA, 303 bp, Zea mays
atgcatatgtgatgagatgagaatcttgatgatgctgcatcagcagacactcactcatcacaccaacgtaccccaacaagggtgagagacgacgaatcggctgctggtatatacatacaactgagaagtcggattacctttgctgattattaacttgtttccattgctgtgaaatgaaactttcaatgcaagggggctggcctaccagctggtactagcaggaatgaagagcatatatatatgaacatgatgatgcatatatgcagagcagcaacagcagcatcgtcgtaccatctcatatat

SEQ ID NO: 721 - DNA, 177 bp, Zea mays
aaaatcccagatttcgcctctcgcaccatcaagattcaaattaagagtggccaatgtgttatatatcttcaagaactatagaaattaaagaactcccctacccttgaaatattcctctgacatatattgtcacacctgttctatcttcatgcatggctcacttctggagtaggatct

SEQ ID NO: 722 - DNA, 129 bp, Zea mays
gcgccggccgcggcgggcggtgacagaagagagtgagcacacggccgggcggaacggcaccggcggatggtgccgtcgcggacgcgtgctcactgctctatctgtcatccactctctcccccgctccgc

SEQ ID NO: 723 - DNA, 239 bp, Zea mays
cgcgacacacgcgcccgcacgtatagcagcgggctttaggtctcttgggccaacactcccccaaaaagctagcctgttaggggttgcaccctcgaccttataaaccatgctttcacaccctcaccacacaatgtgggactattcccaacaatctccccatcacacattgtgagccaagattgtctgagaaagcattgggtcaacctggctctgataccaattgttggcgccgtccagcc

SEQ ID NO: 724 - DNA, 239 bp, Zea mays
cgcgacacacgcgcccgcacgtatagcagcgggctttaggtctcttgggccaacactccccaaaaagctagcctcgtaggggttgcaccctcaaccttataaaccatgctttcacactctcaccagacaatgtgggactattcccaacaatctccccctcacacattgtgagccgagatttgtctaagaatgcactgggccaacctggctctgataccaactgttggaaccggaccgcc

SEQ ID NO: 725 - DNA, 242 bp, Zea mays
cgcgacacacgcgcccgcacgtatagcagcgggctttaggtctcttgggccaacactccccccaaaaagctagcctatcagggggttgcaccctcaaccatataaaccatgctatcacaccctcaccacacaatgtgggactattcccaacaatctccccctcacacattgtgagccgagatttgtctgagaatgcactgggtcaacctggctctgataccaattgttggaaccggaccgcc

SEQ ID NO: 726 - DNA, 242 bp, Zea mays
cgcgacacacgcgcccgcacgtatagcagcgggctttatgtctcttgggccaacactccccctaaaaagctagcctgatagggggttgcaccctcaaccatataaaccatgcttttccactctcaccagacaatgtggtactattcccaacaatctccccctcacacattgtgagccaagatttgtctgagaatgcactgggcctacctggctctgataccaattgttggaaccggaccgcc

SEQ ID NO: 727 - DNA, 242 bp, Zea mays
  misc_feature (1)..(8): n is a, c, g, or t
nnnnnnnnacgggcccgcaagtatagcagcggggctttaggtctcttgggccaacactccccccaaaaagctagcctgtcagggggttgcaccctcaaccttataaaccatgctatcacactctcaccacacaatgtgggactattcccaacaatctccccctcacacattgtgagccgagatttgtctgagaatgcactggccaacctggctctgataccaattgttggaaccggaccgcc

SEQ ID NO: 728 - DNA, 232 bp, Zea mays
tgccatttatgtcagcagacgaagaagaagaagaagaagaagcctattttgatgatcgcgagcagtttgccccgcctccctaccatggggatccgggtcaatcatcctctcaccctccgccccaggatccttctggcagtgcaactcccccggatcagtctggggaagaacactttgcctctcacctggcgcaccacttctttgctcctcatcagcctcctcctaactggtg

SEQ ID NO: 729 - DNA, 294 bp, Zea mays
ctcaagatgaggataagtctcaagaagaagaagaagaagatgaagatcaagacgatgagacacctcaagaggaggacattgatcaagggggagatgaagacagtaagacaaggaagatgatcaagagattcaaagtcaaagaccgccacacctaagagtctaccaagcaattcaaagagatcaccccgtcaactccatacttggtgacattcacaagggggtaaccactagatctcaagttgctcatttttgtgaacattactcttttgtgtcttctattgagccatacaggat

SEQ ID NO: 730 - DNA, 125 bp, Zea mays
tggcgcttactgagagttccttggcattctgtccacctcccttcttgacgatcttgcagaaagtttgctttttttgtttgtttggaggtgggcatactgccaatggagctgcgtaggcctccctt

SEQ ID NO: 731 - DNA, 279 bp, Zea mays
atatctatcgaatgtgatatatggaatatatgacaaaggtggagtcttggagtatttcgatcgatcggtcatatacatataggcctgagtcagacatcaaatagcttcgatttgcattatccgtaggacaccttatatgtattacgagagaaccaaggtggcttaactgatgacgataaggttaggcaaatcatatagagtttaactcatgttcattatttattagtgtctactagttattacatttatctaattcatctaatatttctgcagacttcg

SEQ ID NO: 732 - DNA, 187 bp, Zea mays
atgagagtggtagctctggtagccaaggatgacttgcctgtgtgctggccacgctcccctcatgcaaggaccatctcgtgtcgaccgacgagcgagcgagcgatcgatcgatgagaggatgacgaagcttggggtgtacgttggtctctcacgggcagtctccttggctagccctgactcactctta

SEQ ID NO: 733 - DNA, 125 bp, Zea mays
aataagggcctacctctgatagccaaggatgacttgcctatgtcctttgtttacaaaggacctgaatgtgtggaccattgagaggttcataggcagtctccttggctagcctgagtggcccctat

SEQ ID NO: 734 - DNA, 158 bp, Zea mays
gttttcgttccgtggctaactgacagaagagagtgagcacacagcgggcagactgcatcgatcgatctgcatccgagacggcgcacgtacgaatgatgatgcagctgctgctgcgtgctcacttctctctctgtcagtcctctagctgctacggcctc

SEQ ID NO: 735 - DNA, 260 bp, Zea mays
gtttgggtactctagtattgaccctaatccatatgtattgagatggattgaggtgtaacttaaactaatttacaccacaattcacctcaacacatgtggattgaggtcaatactagagtacccaaacaaagtcttagggcttgttcggttacgtctggatcgaatggtattgagggggattaaatccccttctatttaattttgactagagagggatttaatcccctccaatccacttcgatccagacacaaccaaacaa

SEQ ID NO: 736 - DNA, 223 bp, Zea mays
aaggtggaacgaattgcgcatgcctggctccctgtatggctgcaggagcactgccggccgggaacgggaagaagggtgggtggtggtgctggtgggagtgggagtgaaggaaatggtggtggtgctggccgtgcggcagtgggttgggcgggaacgccgggttcaggagctgcccttcgaaggggaactccgggtacgccgggatccggggcttcttgcgcgg

SEQ ID NO: 737 - DNA, 175 bp, Zea mays
agatggagagccccttttggtagccaagaatgacttgcctatgcacgccctctgttggcagttccgtccggcagccatggcgacggttgcacaaggtgagtttttgcggcgtggatgatgcaatgtggctgcatcggcaggtcttcttggctagccagtgggctctcgtccacca

SEQ ID NO: 738 - DNA, 233 bp, Zea mays
gattgccgaagttcaggtctatgttgaagggctgagatatctgtcaggctcaattctctatggtgctaactatgaagatgattatttgtattgctatccagatagtagagaaattgatgtatgtcgcttcatgatggataatattggttatccaaagcttgagcatggtttatctgcaatgccaaagagggaccttgcagtctccttggcttacaatagcttgaaggtatgaa

SEQ ID NO: 739 - DNA, 294 bp, Zea mays
gcttgaggttgacttgccgaagctacagaagccgcagggtggttgtctatgtattgtgggacataaggcggatgaaacgaagcagtatgcataacctgcttcgactgagcttgttgagatgcagcttcggctagttccttttgcttctggattgtaacatggaacgtcctagtggtgtggcccttgccctctccacagaataggcaaaacagtctccttggctgatctccgaatcttccgccgaagcccctggcgcctctgcctcttggagctggtggccgaaaggaagtttgt

SEQ ID NO: 740 - DNA, 294 bp, Zea mays
gcttgaggttggcttgccgaagctacagaagccgcagggtggttgtctatgtattgtgggacataaggcggatgaaacgaagcagtatgcataacctgcttcgactgagcttgttgagatgcagcttcggctagttccttttgcttctggattgtaacatggcacgtcctagtggtgtggcccttgccctctccacagaataggcaaaacagtctccttggctgatctccgaatcttccgccgaagcccctggcgcctctgcctcttggagctggtggccgaaagaaagtttgt

SEQ ID NO: 741 - DNA, 294 bp, Zea mays
gcttgaggttgacttgccgaagctacagaagctgcagggtggttgtctatgtattgtgggatataaggcggatgatacgaagcagtatgcatgacctgcttcggctgagcttgttgagatgcagcttcggctatttccttttgcttctggattgtaacatggcacgtcctagtggtatggcccttgccttctccacagaacaagcaaaacagtctccttggctgatctccgaatcttccgccgaagcccctggcgcctctacctcttggagctggtggccggaaggaagtttgt

SEQ ID NO: 742 - DNA, 294 bp, Zea mays
gcttgaggttgacttgccgaagctacagaagccgcagggtggttgtctatgtattgtgggacataaggcggatgaaacgaagcagtatgcataacctgcttcgactgagcttgttgagatgcagcttcggttagttccttttgcttctggattgtaacatggcacgtcctagtggtgtggcccttgccctctccacagaataggcaaaacagtctccttggctgatctccgaatcttccgccgaagcccctggcgcctctgcctcttggagctggtggccgaaaggaagtttgt

SEQ ID NO: 743 - DNA, 294 bp, Zea mays
gcttgaggttgacttgccgaagctacagaagccgcagggtggttgtctatgtattgtgggacataaggcggatgaaacgaagcagtatgcataacctgcttcgactgagcttgttgagatgcaacttcggctagttccttttgcttctggattgtaacatggcacgtcctagtggtgtggcccttgccctctccacagaataggcaaaacagtctccttggctgatctccgaatcttccgccgaagcccctggcgcctctgcctcttggagctggtggccgaaaggaagtttgt

SEQ ID NO: 744 - DNA, 294 bp, Zea mays
gcttgaggttgacttgccgaagctacagaagccgcagggtggttgtctatgtattgtgggacataaggcggatgaaacgaagcagtatgcataacctgcttcgactgagcttgttgagatgcagcttcggctagttccttttgcttctggattgtaacatggcacgtcctagtggtgtggcccttgccgtctccacagaataggcaaaacagtctccttggctgatctccgaatcttccgccgaagcccctggcgcctctgcctcttggagctggtggccgaaaggaagtttgt

SEQ ID NO: 745 - DNA, 294 bp, Zea mays
gcttgaggttgacttgccgaagctacagaagccgcagggtggttatctatgtattgtgggacataaggcggatgaaacgaagcagtatgcataacctgcttcgactgagcttgttgagatgcagcttcggctagttccttttgcttctggattgtaacatggcacgtcctagtggtgtggcccttgccctctccacagaataggcaaaacagtctccttggctgatctccgaatcttccgccgaagcccctggcgcctctgcctcttggagctggtggccgaaaggaagtttgt

SEQ ID NO: 746 - DNA, 294 bp, Zea mays
gcttgaggttgacttgccgaagctacagaagccgcagggtggttgtctatgtattgtgggacataaggcggatgaaacgaagcagtatgcataacctgcttcgactgagcttgttgagatgcatcttcggctagttccttttgcttctggattgtaacatggcacgtcctagtggtgtggcccttgccctctccacagaataggcaaaacagtctccttggctgatctccgaatcttccgccgaagcccctggcgcctctgcctcttggagctggtggccgaaaggaagtttgt

SEQ ID NO: 747 - DNA, 294 bp, Zea mays
gcttgaggttgacttgccgaagctacagaagccgcagggtggttgtctatgtattgtgggacataaggcggatgaaacgaagcagtatgcataacctgcttcgactgagcttgttgagatgcagcttcggctagttccttttgcttctggattgtaacatggcacgtcctagtggtgtggcccttgccctctccacagaataggcaaaacagtctccttggctgatctccgaatcttccgccgaagcccctggcgcttctgcctcttggagctggtggccgaaaggaagtttgt

SEQ ID NO: 748 - DNA, 289 bp, Zea mays
gtggcttgccgaagcaacagaggccgtaggctgttgattacctacgtactctaggacgtagggagaatagcatgaagcagtatgtagaacttgcttcggctgattttgttgtgcttcagcttcggcaatctctttctacttctgaatcgtgacttggcacgttcttgtggtgtggcctttgtcttctccgcagaacaaacaaaacagtctccttggctgatctccatatcttcctccgaagcttctgccccctttgcctcttggagctggtggcctaaaggaactttgt

SEQ ID NO: 749 - DNA, 294 bp, Zea mays
gcttgaggttgacttgccgaagctacagaagccgcagggtggttgtctatgtattgtgggacataaggcggatgaaacgaagcagtatgcataacctgcttcgactgagcttgttgagatgcagcttcggctagttccttttgcttctggattgtaacatggcacgacctagtggtgtggcccttgccctctccacagaataggcaaaacagtctccttggctgatctccgaatcttccgccgaagcccctggcgcctctgcctcttggagctggtggccgaaagaaagtttgt

SEQ ID NO: 750 - DNA, 294 bp, Zea mays
gcttgaggttgacttgccgaagctacagaagccgcagggtggttgtctatgtattgtgggacataaggcggatgaaacgaagcagtatgcataacctgcttcgactgagcttgttgagatgcagcttcggctagttccttttgcttctggattgtaacatggcacgtcctagtggtgtggcccttgccctctccacagaataggcaaaacagtctccttggctgatctccgaatcttccgccgaagcccctggcgcctctacctcttggagctggtggccgaaaggaagtttgt

SEQ ID NO: 751 - DNA, 294 bp, Zea mays
gcttgaggttgacttgccgaagctacagaagccgcagggtggttgtctatgtattgtgggacataaggcggatgaaacgaagcagtatgcaaaacctgcttcgactgagcttgttgagatgcagcttcggctagttctttttgcttctggattgtaacatggcacgtcctagtggtgtggcccttgccctctccacagaataagcaaaacagtctccttggctgatctccgaatcttccgccgaagcccctggcgcctctgcctcttggagctggtggccgaaaggaagtttgt

SEQ ID NO: 752 - DNA, 294 bp, Zea mays
gcttgaggttgacttgccgaagctacagaagccgcatggtggttgtctatgtattgtgggacataaggcggatgaaacgaagcagtatgcataacctgcttcgactgagcttgttgagatgcagcttcggctagttccttttgcttctggattgtaacatggcacgtcctagtggtgtggcccttgccctctccacagaataggcaaaacagtctccttggctgatctccgaatcttccgccgaagcccctggcgcctctgcctcttggagctggtggccgaaaggaagtttgt

SEQ ID NO: 753 - DNA, 294 bp, Zea mays
gcttgaggttgacttgccgaagctacagaagccgcagggtggttgtctatgtattgtgggacataaggcggatgaaacgaagcagtatgcataacctgtttcgactgagcttgttgagatgcagcttcggctagttccttttgcttctggattgtaacatggcacgtcctagtggtgtggcccttgccctctccacagaataggcaaaacagtctccttggctgatctccgaatcttccgccgaagcccctggcgcctctgcctcttggagctggtggccgaaaggaagtttgt

SEQ ID NO: 754 - DNA, 294 bp, Zea mays
gcttgaggttgacttgccgaagctacagaagccgcagggtggttgtctatgtattgtgggacataaggcggatgaaacgaagcggtatgcataacctgcttcgactgagcttgttgagatgcagcttcggctagttccttttgcttctggatcgtaacatggcacgtcctagtggtgtggcccttgccctctccacagaataggcaaaacagtctccttggctgatctccgaatcttccgccgaagcccctggcgcctctgcctcttggagctggtggccgaaaggaagtttgt

SEQ ID NO: 755 - DNA, 419 bp, Zea mays
cgcctgccttcgacctggctaggccagggtgctttgtcgggcgatgtggaagaattgatcgggctgaggaggagctccgtcgtgcactgatcgtcagtgttgtcggacaggaaggttctggctgtgctgcggaggtgcgtgatgcaatcgcctcgaggtttttccttgaagcagggtcgctgcgcctacgtcgtgctacgccaaattctttcctcgtcctcttcccctcagtctccttggctgatcgggtggtcgatggggggcaatcacttcatgcccctccactcaggttacacattcgaaggtggtctcgtcaggctttcgctattggaagtggtcggccgctggtgcccattggcgttgagctacgtggaattcctacgcatctctaggagattgagtctgcggaggctgtgctt

SEQ ID NO: 756 - DNA, 294 bp, Zea mays
gcttgaggttgacttgccgaagctacagaagccgcagggtggttgtctacgtattgtgggacataaggcggatgaaacgaagcagtatgcataacctgcttcgactgagcttgttgagatgcagcttcggttagttccttttgcttctggattgtaacatggcacgtcctagtggtgtggcccttgccctctccacagaataggcaaaacagtctccttggctgatctccgaatcttccgccgaagcccctggcgcctctgcctcttggagctggtggccgaaagaaagtttgt

SEQ ID NO: 757 - DNA, 107 bp, Zea mays
cctctccacagaataggcaaaacagtctccttggctgatctccaaatcttccgccgaagcccctggcgcctctgcctcttggagctggtggccgaaaggaagtttgt

SEQ ID NO: 758 - DNA, 198 bp, Zea mays
tcaggtccatgccatgcctttccacagctttcttgaacttcttcttcttctctctcttagaagggccgtatagcttctttgaacctctctctctctctctctcaaaagtgtacacgaacactttcttcattctctgcctctcgctctctgatctccgaagaaggtcaagaaagccgtgggaagaaatggcataacaag

SEQ ID NO: 759 - DNA, 120 bp, Zea mays
tgctaggacaagggcggaggtattggcgcgcctcaatccgaaggcgtggctgatagattggcgcggcagccatgttcttggattgagccgcgtcaatatctcccgttgcctgtcccgtac

SEQ ID NO: 760 - DNA, 105 bp, Zea mays
aagccgcgccgcctcgggctcgcttggtgcagatcgggacccgccgcccggccgacgggacggatcccgccttgcaccaagtgaatcggagccggcggagcgata

SEQ ID NO: 761 - DNA, 159 bp, Zea mays
ttggttgttggctgagagagtgcgatgttggcatggctcaatcaactcgccggccgcgggtggcttatagcttaattctgcgcattcgatcgaggtgcgggcgcagtgtttaattgattgagccgtgccaatatcacaaccttctctagcctatatatg

SEQ ID NO: 762 - DNA, 239 bp, Zea mays
ctgtgaagatgcggactacctgcacctggacagaaagaccctatgaagctttactattccctgggattggctttgggcttttcctgcgcagcttaggtggaaggcgaagaaggcccccttccaagggggcccgagccatcagtgagataccactctggaagagctcggattctaaccttgtgtcagacccgcgggccaagggacagtctcaggtagacagtttctatggggcgtaggcc

SEQ ID NO: 763 - DNA, 239 bp, Zea mays
tgtgaaagatgcggactacctgcacctggacagaaagaccctatgaagctttactgttccctgggattggctttgggcttttcctgcgcagcttaggtggaaggcgaagaaggcccccttccgggggggcccgagccatcagtgagataccactctggaagagctcggattctaaccttgtgtcagacccgcgggccaagggacagtctcaggtagacagtttctatggggcgtaggcc

SEQ ID NO: 764 - DNA, 154 bp, Zea mays
tcaagtccatgccatgcctttccacagctttcttgaacttcttcttcttcttctctcttggaacggcagctttcttcgaatctgtctctctctctctcatctccgaagacgaaggtcaagaaagctgtgggaagaaatgacataacagggactc

SEQ ID NO: 765 - DNA, 129 bp, Zea mays
agctcagggtgagaatcacagtgcggctctcctctggcatgagggcgcgactgagaggcacgaacagtttctggccttctcctgccaatgccaaaggagagttgccctgccattcgttagccctgcaaa

SEQ ID NO: 766 - DNA, 315 bp, Zea mays
cctatacattttgctggttgtttgttttcctctaatatcttatttatcaaatcgtctttgttaatggactgcctctcctagatttggacaatattcaatcaatataactatagatatatatgtttttatatatagagctatatggtgaacacatagcacatatgcatgactatactagcggctcatgcatgaattatgactagccatcctagcacacataacaggtggaataaggcacgatcgactattctatccgcatatactatcaaaatttaaaatatatttgaagaacaaaagttaatgaatcaatcaact

SEQ ID NO: 767 - DNA, 128 bp, Zea mays
gagctagggtgagaatcacagtgcagttctcctctggcacgaaccaaggctgagcagcttgccccatggctagcccacgacggcccttccttgccaaaggagaattgccctgccattcacaaccctac

SEQ ID NO: 768 - DNA, 129 bp, Zea mays
tgctcagggtgagaatcacagtgcggctctcctctggcatgaaggcgcggctgagaggcacgaacagtttctggccttcccctgccaatgccaaaggagagctgccctgccattcgttagccctgcaaa

SEQ ID NO: 769 - DNA, 107 bp, Zea mays
tcggagtcttcgcgggcttggcgtccttcatcccaaaccgctttagcagatcttgcgtgtacttcgtttgggagatgaaggagccttccttgagttgcttcacttgg

SEQ ID NO: 770 - DNA, 118 bp, Zea mays
gatcggctcgtgtcgtgtgtgcctggctccctgtatgccacacatgtagccaacccgtggcgtgattggatgctgtgggtggcgtgcaaggagccaagcatgcataacaggccatgat

SEQ ID NO: 771 - DNA, 167 bp, Zea mays
cccatctacgggtggtgtctgggcgcagtggtttatcgatctcttccttgccttgtgctggtccggccgggagtggtggttcaagcgttttattgttgcagcagctcgcaaacaacgcgggaatcggtcgataaacctctgcatccagctctcactgcggttaaggg

SEQ ID NO: 772 - DNA, 104 bp, Zea mays
ttatttcctagctcggcgccaagatctgtggcgccgagctaggtgccacgcaggctgccaggtcacgatgctcggcgccacagcctgtggcgccgagctgtgtt

SEQ ID NO: 773 - DNA, 365 bp, Zea mays
tgtcaaacagctattttttttccggcagcgacctccacgaccacagggtgagaaataaatctgggtgagaaatctgggtgagaaataaatttagacggacacacgagcgataaaaacaaaaaaataaatctaaatgcaaaccgtggggcttgaacccacgaccacaaggttcaaagctttgtgctctaccaattgagctagatggactttgtgcttatgcatccaacaaatatattaataacataaccgagctcggcgccaagatctgtggcgccgagctcgctgccacgtcgacgccacgcgtccgggttgtgccaacgcagcacgtacctcggcgccatagcctatggcgccgagctgtgtta

SEQ ID NO: 774 - DNA, 124 bp, Zea mays
acacaaccgagctcggcgccaagatctgtggcgccgagctcggtgccacatcgacgccacgcgtccgggttgtgccaacgcaacacgacctcggcgccatagcctatggcgccgagctgtgtta

SEQ ID NO: 775 - DNA, 147 bp, Zea mays
ggcattcgtagctcggcgccaagatctgtggcgccgagctacgaggccgcgccgccgccacgtcagagccaggtaagccctggacgcaactagccgttgcggccacgtcacagctcggcgccatagctgtggcggctggttagctcg

SEQ ID NO: 776 - DNA, 267 bp, Zea mays
ggcctgggccggggcggccgtgcggcggccagccggagctggggcaggcggcggcggcgacccgatggcaggcggcggcggcgtgattttgtgggcggcggcgagttcgtaagcggcttgaattggattgagccgagaagacaagaaacgcgcagagagaagggtgtttgcggatttttcctagctcggcgccaagatctgtggcgccgagctaggtgccacgcgggactgccacgtcacgaagatcggcgccacaggctgtggcgc

SEQ ID NO: 777 - DNA, 224 bp, Zea mays
tgctaacggcggcggtgggctcggcgcgaaaactgaaaaacagacgaaacgggcagagaggaaggcgtcgggcggatatttcctagctcggcgccaagatctgtggcgccgagctaggtgccacgcgggatgacacgtcacgttaagggtttagcgttggtcgcgagctgtgtagctgtaattttcctctgggccataagggtccaaaactgcatttaaaattt

SEQ ID NO: 778 - DNA, 123 bp, Zea mays
acacaaccgagctcggcgccaagatctgtggcgccgagctcggttccacgtcgacgccacgcgtctggggtgtgccaacgcaacacgacctcagcgccatagcctatggcgccgagctgtgtt

SEQ ID NO: 779 - DNA, 124 bp, Zea mays
acacaaccgagctcggcaccaagatctgtggcgccgagctcggtgtcacgtcgacgccacgcgtctgggttgtgctaacgcaacacgacctcggcgccatagcctatggcgccgagttgtgtta

SEQ ID NO: 780 - DNA, 105 bp, Zea mays
acacaaccgagctcggcgccaagatctgtggcgccgagctcggttccacgtcgacgccacggcgtccgagttgtgccgacgcatcacgtacctcggcgccataac

SEQ ID NO: 781 - DNA, 207 bp, Zea mays
caacttcatggtttaaaaccttgtgctccaccaactgagctagatggcttggtgccatttctttgcaacaaaactgttgataacacaaccgagctcggcgccaagatctgtggcgccgagctcagtgccacgtcaacgccacggcgtccagtttgtgccaacgcagcacgtacctcggcgccataacctatggcgccgagctgtgtt

SEQ ID NO: 782 - DNA, 208 bp, Zea mays
aaacctcgtggtttaaaaccttgtgctccaccaactgagctaaatggcttggtgctatttttttgcaacaaaacagttgataacacaaccgagctcggcgccaagatctgtggcgccgagctcggtgccacgtcaacgccacggcgtccagtttgtgccaacgcagcacgtacctcggcgccataggctatggcgccgagcaaagggt

SEQ ID NO: 783 - DNA, 116 bp, Zea mays
ggaatttgtagctcggcgccaagatctgtggcgccgagctacgaggccgggccgcaactagccgttggtgcctcgtcacagctcggcgtcataggctgtggcgccgagctacgaca

SEQ ID NO: 784 - DNA, 297 bp, Zea mays
ggcctgggccggggcggccgtgcggcggccagccggagctggggcaggcggcgacggcgacccgcagacaaacccgagggcaggcggcggcggcgtgattttgtgggcggcggcgagttcgtaaacggcggcggcttgaattggaatgagccgagaagacaagaaacgcgcagagagaaggctgtttgcggatttttcctagctcggcgccaagatctgtggcgccgagctaggtgccacgcgggactgccacgtcacgaaggtcggcgccacaggctgtggcgccgagctgtgtta

SEQ ID NO: 785 - DNA, 314 bp, Zea mays
gggcggagaggcgggcgagctcggcgggcgagctcggcgggctgcgggcgggcggcgcgctcggcgggctgcgggcgggcggcgagctcggcggcggcgggctggcggcgagctcggcggcggcggcggtatgagcggcggcgggcgtaggaaacgaaagcggcgagcgaaacagagaagaaacgaagagaaaagggggtttcggttaagtttcctagctcggcgccaagatctgtggcgccgagctaggtgtgccacgcgggctgccacgtcatgaagctcggcgccatagccgatggcgccgagctgtgtta

SEQ ID NO: 786 - DNA, 207 bp, Zea mays
caacctcatggttcaaaaccttgtgctccaccaactgagctagataggtttatgctatttctttgcagcaaaacaattgataacacaaccgagctcggcgccaagatctgtggcgccgagctcggtgccacgtcaacgccacggcttccgggttgtgccaacgcagcacgtacctcggcgccataacctatggcgccgagctgtgtt

SEQ ID NO: 787 - DNA, 124 bp, Zea mays
acacaacttagctcggcgccaagatctgtggcgccgagctcggttccacgtcgacgccacgcgtctgggttgtgccaacgcaacacgacctcggcgccatagcctatggcgccgagctgtgtta

SEQ ID NO: 788 - DNA, 136 bp, Zea mays
ggcattcgtagctcggcgccaagatctgtggcgccgagctacgaggccgcgccgccgccacgtcagagccaggtaagagccctggacgcaactagccgttgcggccacgtcagagctcggcgccataggctgtggc

SEQ ID NO: 789 - DNA, 106 bp, Zea mays
aagtttcctagctcggcgccaagatctgtggcgccgagctaggtgtgccacgcgggctgccacgtcatgaagctcggcgccacagcctatggcgccgagctgtgtt

SEQ ID NO: 790 - DNA, 105 bp, Zea mays
gtatttcctagctcggcgccaagatctgtggcgccgagctaggtgccacgcgtacagccacgtcacacagctcggcgccataggctgtggcgccgagctgtgtta

SEQ ID NO: 791 - DNA, 95 bp, Zea mays
ggaatttgtagctcggcgccaagatctgtggcgccgagctacgaggccgcgccgccaccacgtcagcgccaggtcagccctggacgcagctagcc

SEQ ID NO: 792 - DNA, 125 bp, Zea mays
acacaaccgagctcggcgccaagatctgtggcgccgagctcgctgccacgtcgacgccacgcgttcgggttgtgccaacgcagcacgtacctcggcgccatagcctatggcgccgagctgtgtta

SEQ ID NO: 793 - DNA, 106 bp, Zea mays
ttttttcctagctcggcgccaagatctgtggcgccgagctaggtgccacgcgggactgccacgtcacgaagctcggcgccacaggctgtggcgccgagctgtgtta

SEQ ID NO: 794 - DNA, 125 bp, Zea mays
acacaaccgagcttggcgccaagatctgtggcgccgagctcggtgccacgtcggcgccacggcgtccaggtgtgccagcgtagcacgtacctcggcgccataggctatggcgccgagctgtgtta

SEQ ID NO: 795 - DNA, 114 bp, Zea mays
acacaatcgagctcggcgccaagatctgtggcgccgagctcggtgccacggcgtccgggtgtgccagcgtagcacgtacctcggcgccatagcctatggcgccgagctgtgtta

SEQ ID NO: 796 - DNA, 206 bp, Zea mays
caacctcatggttcaaaatctcgtgctctaccaactgagctagatagatttatgctatctctttgtagcaaaacagtagataacacaaccgagctcggcgccaagatctgtggcgccgagctcggtgccacgtcaacgccacggcgtccggtttgtgccaacgcagccgtacctcggcgccataacctatggcgccgagctgtgtt

SEQ ID NO: 797 - DNA, 125 bp, Zea mays
acacaaccgagctcggcgccaagatctgtggcgccgagctcggtgccacgtcaacgccacggcgtccggtttgtgccaacgcagccgtacctcggcgccataatctatggcgccgagctgtgtta

SEQ ID NO: 798 - DNA, 126 bp, Zea mays
acacagccgagctcggcgccaagatctgtggcgccgagctcggtgccatgtcaacgccacggcgtccgggttgtgctgacgcatcacgtacctcggcgccataggctatggcgccgagcaaagggt

SEQ ID NO: 799 - DNA, 360 bp, Zea mays
gcggccggagtcgagcgagctcggcggcgagctcggcgggagaggcgggcgccgggcgagcggcgagctcgacgggctgcgggcgggcggcgcgctcgccgggcgcgctcggcgggctgcgggcgggcggcgagctcggcggcggcgggctggcggcgagctcggcggcggcggcggtatgagcggcggcgggcgtaggaaaatgaagccgtgagcgaaacagagaagaaacgaagaggaaaggcgtttcggttaagtttcctagctcggcgccaagatctgtggcgccgagctaggtgtgccacgcgggctgccacgtcatgaagctcggcgccacagcctatggcgccgagctgtgtt

SEQ ID NO: 800 - DNA, 207 bp, Zea mays
aaaccttatggtttaaaaccttgtgctccaccaactgagctagatagctttgtgctgtttctttgcaacaaaactgttgataacacaaccaaactcgatgccaagatctgtggcgccgagctcgatgccacgtcaacgccacggcgtccgggttgtgccaacgcagcacgtacctcggcgccataacctatggcgccgagctgtgtt

SEQ ID NO: 801 - DNA, 196 bp, Zea mays
tgagagaaagtatgctgctctcggcccagccgcgcggccgtttttataggcatccgtagctcgacgccaagatctgtggcgccgagctacgaggccgcatcggcaccgcgtcagtgccatatcagccctaggcgtagggagccgttgctgtcacgtcacatctcggcgccataagctgtggcgtcgagctgtgtta

SEQ ID NO: 802 - DNA, 195 bp, Zea mays
tgagaggaaatgtgctgctctcggccagcagcgcgactgtttttataggcctccgtagctcggcgccaagatctgtggcgccgagctacgaggccgcatcggtgccgcgtcagtgccatgtcagccataggcgcaggtagccgttgttgccacgtcacacctcggcgccataggctgtggcgccgagctatgtta

SEQ ID NO: 803 - DNA, 108 bp, Zea mays
ttatttcctagctcggcgccaagatctgtggcgccgagctaggtgccgccacgcggactgccacgtcacgtacctcggcgccataggctatggcgccgagccgtgtta

SEQ ID NO: 804 - DNA, 112 bp, Zea mays
gtatttcctagctcggcgccaagatctgtggcgccgagctaggtgccacgcggactgccacggtccatacgaggctgttaccgcgccacagcctatggcgccgagcttcggg

SEQ ID NO: 805 - DNA, 206 bp, Zea mays
caacctcatgattcaaaaccttgtgctccaccaactgagctagatggcttggtgctatctttttgcagcaaaacagtagataacacaaccgagctcggcgccaagatctgtggcgccgagctcggtgccacgtcaacgccacggtgtccgggttgtgccaacgcagccgtacctcggcgccataacctatggcgccgagctgtgtt

SEQ ID NO: 806 - DNA, 381 bp, Zea mays
gaaaatttttattttttcagtggggctgcaagagccgctttcccaatgattgattaagaaaaaaatatacctaatgagttatttaaaaaatgagtagtgacaaagataaaaaaaatctaggcgagaaataaatttgagcggacacacaaaaatgcaaactatggggcttgaacccacgaccacaaggttagaagccttgtgctataccaagtgggctagctgggctttgtgctcatgtttgcaacaaatattttaataacacaaccgagctcggcgccaagatctgtggcgccgagctcggttccacgtcgacgccacgcgtccgtgttgtgccaacgcaacacgacctcggtgccatagcctatggcgccgagctgtgtt

SEQ ID NO: 807 - DNA, 166 bp, Zea mays
ctagctaggctttgtgctcatgtctgcaacaaatctgttaataacacaaccgagctcggcgccaagatctgtggcgccgagctcggtgccacgtcgacgccacgcgtctgggttgtgccaacgcaacacgacctcggcgccataacctatggcgccgagctgtgtt

SEQ ID NO: 808 - DNA, 95 bp, Zea mays
ggcattcgtagctcggcgccaagatctgtggcgccgagctacgaggccgcgtcgccaccacgtcggcgccaggtcagccctagacgcaggtagcc

SEQ ID NO: 809 - DNA, 105 bp, Zea mays
ttatttcctagctcggcgtcaagatctgtggcgccgagctaggtgccacgctgactgccacgtcacatagctcggcgccataggctgtggcgccgagctgtgtta

SEQ ID NO: 810 - DNA, 206 bp, Zea mays
caacctcatggttcaaaaccttgtgctccaccaactgagctagatagatttatgctatctctttgcagcaaaacagtagataacacaaccgagctcggcgccaagatctgtggcgccgagctcggtgccacgtcaacgccacggcgtccgggttgtgccaacgcagccgtacctcggcgccataacctatggcgccgagctgtgtt

SEQ ID NO: 811 - DNA, 105 bp, Zea mays
ttatttcctagctcggcgccaagatctgtggcgccgagctaggtgccacggaggacagccacgtcacgaagctcggcgccacagcctgtggcgccgagctgtgtt

SEQ ID NO: 812 - DNA, 308 bp, Zea mays
ggggcggcagtgggcgcagctcgggcgcggcagagggcgggcggcggcgaccgagctcgggggagctcgagcgacgtcgggcggggctcgcggcggcgagccggagtcctggcaggcggcgacgattgaggacggcggcggcggcgttggtttggaacgagcagaagacaagaaacgcgcgcacagagaaggcggtttgcagttttttcctagctcggcgccaagatctgtggcgccgagctaggtgccacgcgggactgccacgtcaggaagctcggcgccacatacggtggtgatagtcgcctaga

SEQ ID NO: 813 - DNA, 112 bp, Zea mays
acacaaccgagctcggcgccaagatctgtggcgccgagctcggttccacgtcgactccacgcgtcggagtggtttacccggtccacgtactccggcggggtcgagagctccg

SEQ ID NO: 814 - DNA, 360 bp, Zea mays
ggggcggcagtgggcggagctcgggcgcggcagagggcgggcggcggcgaccgagctcgggggagctcgagcgggcggcgagctcgggcgacgtcgggcggggctcgcggcggcgagccggagctgggccggggcgggcgggcggcggcgagccggagtcctggcaggcggcggcgattgaggacggcggcggcggcgttggtttggaacgagcagaagacaagaaacgcgcgcacagagaaggcggtttgcagttttttcctagctcggcgccaagatctgtggcgccgagctaggtgccacgcgggactgccacgtcaggaagctcggcgccacagacggtggcgccgagctgtgtta

SEQ ID NO: 815 - DNA, 314 bp, Zea mays
agggggcgagcagaccgtgctggagaagcagggcacgtgctcgtcgacccggcccgtcggcgtggcgcctcaggccgccgccggccgctggtctgggcctctggggtctgctagctggctgcatgcgcgcggtcgatcgtcgcatgcagcacgtgcgctccttctccagcatgtcttctcgcccccatcatcgtcgtcagttcgccggccggccggccgtacgtgcagtgcagtcgtgcactacaagtctacaacaccgcctcgtcatggaagggagtggaggagggctcatcggtagcggtagccggtaggtc

SEQ ID NO: 816 - DNA, 167 bp, Zea mays
attcacatcgtccaactcatgcatcatgcatatatgcatcttcaatgatgcgtgcctcgcatgtgtgtgtatatatatatgatgagatgagaatcttgatgatgctgcatcagcagacactcactagctcatgcatcacctccaagtaataagagatgaattgaatt

SEQ ID NO: 817 - DNA, 128 bp, Zea mays
ggcgggcgggcggcgggcggtgacagaagagagtgagcacacggccgggcggaacggcaccggcggatgtgccgtcgcggccgcgtgctcactgctctatctgtcacccactccccctccccgttcct

SEQ ID NO: 818 - DNA, 158 bp, Zea mays
aatgcagctccgaacctgttttgttggtggtcatttaaccatgcatgcttcgatcgatggattggtgcatgcatggattattgcatagtgtgatgcatgtggcgcatcagtgcatggttagatgaccatcagcaaacatgttcttgaggcatgcaagt

SEQ ID NO: 819 - DNA, 353 bp, Zea mays
gtacgcagttagccccgatggtgattccagccggtaggggcaagtcgcgcacataacagagaaggacgaactaatcttttcagtcatatccgatgtaatctacttcaaccctttataaccaattgatctaatcaaaccgtgcatccagacctaaaactacgcagaacctggctctgataccactgaaggattacggggaggctacgctagcgcaaaacaaaattttcaaccccataataccaagaactactgcggttataggtcatggaattaccactagacgcgcagagcagcggaagacgtctcgatgtagatgaacgcgtcgagcagtgtcgtgcagtcgtcggcgtcct

SEQ ID NO: 820 - DNA, 242 bp, Zea mays
cgcgacacacgcgcccgcacgtatagcagcgggctttaggtctcttgggccaacactcaccctaaaaagctagcctgataggggttgtcaccctcaaccttataaaccatgctttcacactctcaccagacaatgtgggactattcccaacaatctcccgctcacacattgtgagccgagatttgtctgagaatgcactgggccaacctggctctgataccaattgttggaaccggaccgcc

SEQ ID NO: 821 - DNA, 155 bp, Zea mays
cgcgacacacgcgcccgcacgtatagcagcgggctttaggtctcttgggcggactattcttaacaatctccccctcacacattgtgagccgagatttgtctgagaatgcactgggccaacctggctctgataccaattgttggaaccggaccgcc

SEQ ID NO: 822 - DNA, 155 bp, Zea mays
cgcgacacacgcgcccgcacgtatagcagcgggctttaggtctcttgggcggactattcccaacaatctccccctcacacattgtgagccgagatttgtctgagaatgcactggaccaacctggctctgataccaattgttggaaccggaccgcc

SEQ ID NO: 823 - DNA, 155 bp, Zea mays
acaatctccccctcccgcacgtatagcagcgggctttaggtctcttgggcggactattcccaacaatctccccctcacacattgtgagccgagatttgtctgagaatgcactggaccaacctggctctgataccaattgttggaaccggaccgcc

SEQ ID NO: 824 - DNA, 502 bp, Zea mays
cgcgacacacgcgcccgcacgtatagcagcgggctttaggtctcttgggccaacactccccccaaaagctagcctattaggggttgcaccctcaaccatataaaccatactttttcgccttcaccacacaatgtgggactattcccaacaatctccctctcacacattatgagccgagatttatctgagaatgcactgggccaacctggctctgataccaattgttggaaccgaaccgccgacacatggcgtgtccatcagggccgcccgcacacacggcgcgcccacccaggctgttaggtcgcgacacacgcgcccacacgtatagcagcgggctttaggtctcttgggccaacactccccccaaaagctagcctattaggggttgcaccctcaaccatataaaccatactttttcgccttcaccacacaatgtgggactattcccaacaatctccctctcacacattatgagccgagatttatctgagaatgcactggg

SEQ ID NO: 825 - DNA, 241 bp, Zea mays
cgcgacacacgcgcccacacgtatagcagcgggctttagatctcttgggccaacactcccccaaaaagctagcctaatagggagttgcaccctcaaccttataaaccatgctaccacaccctcaccacacaatgtgggactattcccaacaatctccccctcacacattgtgagccaagatttgtctgagaatgcactgtgcctacctggctctgataccaattgttggaaccggaccgac

SEQ ID NO: 826 - DNA, 151 bp, Zea mays
aatggccctccctgccatcttccacagctttcttgaactgcatcatgcatgcagcaggctgtgctgtggacctgatcgagtttcaattgatccaagcaagcaagagggcagttcaataaagctgtgggaaattgcagagagagagagacca

SEQ ID NO: 827 - DNA, 145 bp, Zea mays
cagcacgtcggcgcagtcgtcgtcgtcgatctcgtcgcgccgccgctggtaccgcccgggcgacgcctcgggcgcctgcccccctgccatcgccgcgccgcttgctcaggagagatgacaccgcgcccctccccgatctgcagcc

SEQ ID NO: 828 - DNA, 266 bp, Zea mays
tatccatgggattgcggcgtttttctctatgtgctgaaacatttctgctgatgtacatgagctggcaaggcgtcagcgggagactgacgacaatcttcgtcgtcaagcttccactatgggtatgccctttgcccctcgctcgcctgacgtgcctctccatcctcctccctcggagatcaatgagtggcaccagcaggcctacggggtgccatttatgtcagcagacgaagaagaagaagaagaagcctacgttgatgatcgcgagc

SEQ ID NO: 829 - DNA, 266 bp, Zea mays
ggtccatgggattgcggcatttttctctatgtgctggaacatttctgctgatgtacatgaactggcaaggcgtcagcgggagactaacgacaatcttcgtcgtcaagcttccactatgggtatgccctttgcccctcgctcgcctgacgtgcctatgcatcctcctcccccggagatcaatgagtggcaccggcaggcctacggggtgccatttatgtcagcagacgaagaagaagaagaagaagcctacgttgatgatcgcgagc

SEQ ID NO: 830 - DNA, 129 bp, Zea mays
ggcgcttactgaagagttccttggcattctgtccacctcctctcgccgatcttgcagaaagtttaccagttctgttgcattttttttggaggtgggcatactgccaatggagctgtgtaggcctccctt

SEQ ID NO: 831 - DNA, 164 bp, Zea mays
atttcatcaaggctaaagggagaagagagagagtacagccttgttgccatgtacacactcagatatcaacagtctcttatatttgctgttactacctgttattagtgtccagtgatgatgaaggctgtaccctctctcttcttctcttagcttcttgatgcaaa

SEQ ID NO: 832 - DNA, 151 bp, Zea mays
gaccagagctgattcgttcagtagccaaggatgacttgcctaggtatatatgcatgggctatggctacatgcctgagagccagtctcttgtgacgctgagcatgtatagtgtaggcatgtcttccttggctactcggagcggctctagtca

SEQ ID NO: 833 - DNA, 138 bp, Zea mays
tgcctgcccaagggaacgagtgaagctgccagcatgatctagctcggagtgatcacgcgaggagaacaatagctcgaggtggtcatgccttgctagatcatgctgtggcagcctcacttcttcccgtccttgggcata

SEQ ID NO: 834 - DNA, 125 bp, Zea mays
aagtgcccaagataaagggtgaagctgccagcatgatctaacgacggcattgctctgctgctgcagtgaggcttgcgagtgatggttagatcatgctgtgacagtttcactctttccctttgggc

SEQ ID NO: 835 - DNA, 389 bp, Zea mays
aagggtatggaacagtccttgaagctcaggagggatagcgcctaggaaatcacacatagattggagccacgaagaggaagggagaatgagagagagagagacagagcagctatgctgctctgtctctctctctcactttctcttggatccatctcaaggttctgtctatatatgatgaatcgatccgaagcgctatctatcctgagctccacggcttgttcttaccagttacgtaccacgtacgcgccgccgccgccgccggccgatctcgagctcctcgcgcgctcccagctagaattgccttctgtgtgcgtcgtactccttcattctttcttgttgagatgcaggaggcgagcctgagattgatcgaggtcgtcgtcgtcgtcgtc

SEQ ID NO: 836 - DNA, 142 bp, Zea mays
gaagctatttgcttctgagtggaatgttgtctggttcaaggtcttttgctttgtgatccatctgtgtagagcttctaagtattccttggatctgcaagatctcggaccaggcttcattcccctcagaaatagcttcaaaaat

SEQ ID NO: 837 - DNA, 367 bp, Zea mays
agaaagaaaggacagtctcagcagcacctcctcctttcgttccctgtacggcgacgagcgctcaccggatccaagaacaacgaagccccctctatctctctctttcttgttcttctgtcttcattcgtgcttggagggttggtttgtccctcttcgctttggtggttccgcaacttctgaaccctgattttgtgttgtcgctggttagacgacgacgacgacgacgacggcggcgtttctgtagatgcggagaggctctcgagagattgacagaagagagtgagcacacggcgcgacgaacgacatagcatgtatgccgtcctcgccgcgtgctcacttctctttctgtcagcctctttctctcgat

SEQ ID NO: 838 - DNA, 122 bp, Zea mays
gagaaagagaagcaaaggcatcattgagcgcagcgttgatgagccagccgccgtgcctcccctgtcggctgcggcggctcaccagcgctgcactcaattacgcctttgctttctcccgctgg

SEQ ID NO: 839 - DNA, 136 bp, Zea mays
gatatacggggcgtcggagtcatagcaccaagccggttgaaaccgaggtgcagctggttaagctggtagtctgttaggggtaaaccaaattgagcatgcctggctccctgtatgcctgcaggagcgatgtccgaga

SEQ ID NO: 840 - DNA, 294 bp, Zea mays
gcttgaggttgacttgccgaagctacagaagccgcagggtggttgtctatgtattgtgggacataaggcggatgaaacgaagcagtatgcataacctgcttcgactgagcttgttgagatgcagcttcggctagttccttttgcttctggattgtaacatggcacgtcctagtggtgtggcccttgccctctccacagaataggcaaaacagtctccttggctgatcttcgaatcttccgccgaagcccctggcgcctctgcctcttggagctggtggccgaaaggaaatttgt

SEQ ID NO: 841 - DNA, 294 bp, Zea mays
gcttgaggttgacttgccgaagctacagaagccgcagggtggttgtctatgtattgtgggacataaggcggatgaaacgaagcagtatgcaaaacctgcttcgactgagcttgttgagatgcagcttcggctagttccttttgcttctggattgtaacatggcacgtcctagtggtgtggcccttgccctctccacagaataggcaaaacagtctccttggctgatctccgaatcttccgccgaagtccctggcgcctctgcctcttggagctggtggccgaaaggaagtttgt

SEQ ID NO: 842 - DNA, 294 bp, Zea mays
  misc_feature (1)..(4): n is a, c, g, or t
nnnngaggttgacttgccgaagctacagaagccgcagggtggttgtctatgtattgtgggacataaggcggatgaaatgaagcagtatgcaaaacctgcttcgactgagcttgttgagatgcagcttcggctagttccttttgcttctggattgtaacatggcacgtcctagtggtgtggcccttgccctctccacagaataggcaaaacagtctccttggctgatctccgaatcttccgccgaagcccctggcgcctctgcctcttggagctggtggccgaaaggaagtttgt

SEQ ID NO: 843 - DNA, 343 bp, Zea mays
gcttgaggttgacttgccgaagctacagaagccgcagggtggttgtctatgtattgtgggacataaggcggatgaaacgaagcagtatgcaaaacctgcttcgactgagcttgttgagatgcagcttcggctagttccttttgcttctggattgtaacatggcacgtcctagtggtgtggcccttgccctctccacagaataggcaaaacagtctccttggctgatctccgaatcttccgccgaagcccctggcgcctctgcctcttggggctggtggccgaaaggaagtttgttgttgccccgaagcctgtgaggagcactgcggcctgttttgctgactcc

SEQ ID NO: 844 - DNA, 294 bp, Zea mays
gcttgaggttgacttgccgaagctacagaagccgcagggtggttgtctatgtattgtgggacataaggcggatgaaacgaagcagtatgcataacctgcttcgactgagcttgttgagatgcagcttcggctagttccttttgcttctggattgtaacatggcacgtcctagtggtatggcccttgccctctccacagaataggcaaaacagtctccttggctgatctccgaatcttccgccgaagcccctggcgcctctgcctcttggagctggtggtcgaaaggaagtttgt

SEQ ID NO: 845 - DNA, 294 bp, Zea mays
gcttgaggttgacttgccgaagctacagaagccgcggggtggttgtctatgtattgtgggacataaggcggatgaaacgaagcagtatgcaaaacctgcttcgactgagcttgttgagatgcagcttcggctagttccttttgcttctggattgtaacatggcacgtcctagtggtgtggcccttgccctctccacagaataggcaaaacagtctccttggctgatctccgaatcttccgccgaagcccctggcgcctctgcctcttggagctggtggccgaaaggaagtttgt

SEQ ID NO: 846 - DNA, 294 bp, Zea mays
gcttgaggttgacttgcggaagctacggaagctgcagggtggttgtctatgtattgtgggatataaggcggatgacacgaagcagtatgcatgacctgcttcggctgagcttgttgagatgcagcttcggcaatttccttttgcttctggattgtaatgtggcacgacctagtggtatggcccttgccttctccacagaacaagcaaaacagtctccttggctgatctccaaatcttccgccgaagcccctggcgcctctgcctcttggagctggtggccggaaggaagtttgt

SEQ ID NO: 847 - DNA, 294 bp, Zea mays
gcttgaggttgacttgccgaagctacagaagccgcagggtggttgtctatgtattgtgggacataaggcggatgaaacgaagcagtatgcaaaacctgcttcgactgagcttgttgagatgcagcttcggctagttccttttgcttctggattgtaacatggcacgtcctagtggtgtggcccttgccctctccacagaataagcaaaacagtctccttggctgatctccgaatcttccgccgaagcccctggcgcctctgcctcttggagctggtggccgaaaggaagtttgt

SEQ ID NO: 848 - DNA, 294 bp, Zea mays
gcttgaggttggcttgccgaagctacagaagctgcagggtggttgtctatgtattgtgggatataaggcggatgatacgaagcagtatgcatgacctgcttcggctgagcttgttgagatgcagcttcagcaatttccttttgcttctggattgtaatgtggcacgacctagtggtatggcccttgccttctccacagaataagcaaaacagtctccttggctgatctccgaatcttccgccgaagcccctggcgcctctgccttttggagctggtggccgaaaggaagtttgt

SEQ ID NO: 849 - DNA, 294 bp, Zea mays
cttgaaggttgacttgccgaagctacagaagccgcagggtggttgtctatgtattgtgggacataaggcggatgaaacgaagcagtatgcataacctgcttcgactgagcttgttgagatgcagcttcggctagttccttttgcttctggattgtaacatggcacgtcctagtggtgtggcccttgccctctccacagaataggcaaaacagtctccttggctgatctccgaatcttccgccgaagcccctggcgcctctgcctcttggagctggtggccgaaaggaagtttgt

SEQ ID NO: 850 - DNA, 294 bp, Zea mays
gcttgaggttgacttgccgaagctacagaagccgcagggtggttgtctatgtattgtgggacataaggcggatgaaacgaagcagtatgcataacctgcttcgactgaacttgttgagatgcagcttcggctagttccttttgcttctggattgtaacatggcacgtcctagtggtgtggcccttgccctctccacagaataggcaaaacagtctccttggctgatctccgaatcttccgccgaagcccctggcgcctctgcctcttggagctggtggccgaaaggaagtttgt

SEQ ID NO: 851 - DNA, 294 bp, Zea mays
gcttgaggttggcttgccgaagctacagaagctgcagggtggttgtctatgtattgtgggatataaggcggatgatacgaagtagtatgcatgacctgcttcggctgagcttgttgagatgcagcttcagcaatttccttttgcttctggattgtaatgtggcacgacctagtggtatggcccttgccttctccacagaataagcaaaacagtctccttggctgatctccgaatcttccgccgaagcccctggcgcctctgcctcttggagctggtggccggaaggaagtttgt

SEQ ID NO: 852 - DNA, 181 bp, Zea mays
cttgttgcttgccagttcccggcagctcgatcgtgtgctagctcatcagcttacacttagcaagcaaatgaagcatgcagttctcgccatgagtataaattatcatctgaggccttgcatgtggggatgaggctgttatgtagccaaggatgacttgccggccgatgcctcctcgatatac

SEQ ID NO: 853 - DNA, 142 bp, Zea mays
actttgctgctgtgagaggttgaagctgccagcatgatctggctgctcagacgccggcgggcgtctcgagtgctcgctcgatcgtcggtgacgcttggattcaccagatcatgttgcagcttcactctctcgcagccagcaa

SEQ ID NO: 854 - DNA, 100 bp, Zea mays
ggatgtgcacctgcatttctgggcaacttctcctttggcagatgcgcgagaatgtgccactgctgccaaaggaaatttgccccggaattcatctgcacaa

SEQ ID NO: 855 - DNA, 241 bp, Zea mays
cgcgacatacgcgcccgcacgtatagcagcgggctttaggtctcttgggccaacactccccccaaaaagctagcctaataggggttgcaccctcaaccttataaaccatgctttcacactctcaccagacaatgtgggactattcccaacaatctccccctcacacattgtgagccaagatttgtctgagaatgcactgggccaacctggctctgataccaattgttggaaccggaccgcc

SEQ ID NO: 856 - DNA, 240 bp, Zea mays
cgcgacacacacgcccatacgtatagcagcggggtttaggtcttttgggccaacactcacccaaaaagctagcctattaggggttgcaccctcaaccatataaatcatgctttcccatcctcaccacacaatgtgagactattcccaacaatctcccctcacatattgtgagccgagattttgtctgagaatgcactgggccaacctggctctgatacccattgttggaaccggaccgcc

SEQ ID NO: 857 - DNA, 202 bp, Zea mays
tgctgagcatgaattacagggtacgtctcctttggcacagcagaatgcacacatcatcagtcgagagagtaagctcgctgcgtgctcgccggcctgggagcggaagtcgcaggccaaatggcggcggtgcagatgcatgaacagcagctgccgtatatatgcgtgccaaaggagaattgccctgcgattctaggctcagcga

SEQ ID NO: 858 - DNA, 126 bp, Zea mays
ggcttaggccccgaagagattgacagaagagagcgagcacctggcgcggcgaccggcatggaacgcatgccgtccccgccgcgtgctcgcttctctttctgtcagcctctccctcgtcctgagccg

SEQ ID NO: 859 - DNA, 195 bp, Zea mays
tgagaggaaatgtgctgctctcggccagcagcgcggccggttttataggcctccgtagctcggcgccaagatctgtggcgccgagctacgaggccgcgtcggcgccatgtcaatgccatgtcagccctaggcgcagggagccgttactgccacgtcacagctcggcgccataggctgtggcgccgagatgtgtta

SEQ ID NO: 860 - DNA, 148 bp, Zea mays
ggaattcgtagctcggcgccaagatctgtggcgccgagctacgaggccgcgccgccgccacgtcagagccagctaagccctagacgcaactagccgttgcggccacgtcacagctcggcgccataggctgtggcgccgagctgtgtta

SEQ ID NO: 861 - DNA, 106 bp, Zea mays
gtttttcctagctcggcgccaagatctgtggcgccgagctaggtgccacgcgggactgccacgtcacgaagctcggcgccataggctatggcaccgagctgtgtta

SEQ ID NO: 862 - DNA, 124 bp, Zea mays
acacaaccgagctcggcgccaagatctgtggcgccgagctcggttccacgtcgacgccacgcgtctgggttgtgccaacgcaacaagacctcggcgccatagcctatggggggctgtgttagct

SEQ ID NO: 863 - DNA, 95 bp, Zea mays
ggcattcgtagctcggcgccaagatctgtggcgccgagctacgaggccgcgccgcccccacgtcggagccaggtcagccctagacgcaactagcc

SEQ ID NO: 864 - DNA, 148 bp, Zea mays
ggcattcgtacctcggcgccaagatctgtggcgccgagctacgaggccgcgccgccgccacgtcagagccaggtaagccctggacgcaactagccgttgcggccacgtcacagctcggcgccataggctgtggcgccgagctgtgtta

SEQ ID NO: 865 - DNA, 344 bp, Zea mays
cggctgagctcggacggagctcgggccgagctcgagggcggacctcgccgcggcgtgaatagggcggagctcgcggcggcgggcagcggagcttggggcggccggcgtgaagagctcgaggcggcgccggagaaggggcaagcggcggcggcgtgagctgtggacgtcgggcggcggcggcgggatttcgaatgagcagacaacacaagaaacacgcagagagaagggatgtttacggattttttcctagctcggcgccaagatctgtggcgccgagctaggtgccacgcaggacagccacgtcacgaagctcggcgccatagctgtggcgggctgtgttagct

SEQ ID NO: 866 - DNA, 194 bp, Zea mays
tgagaggaattgtgctgctctcggccagcagcgcggctgttttataggcgtccgtagctcggcgccaagatctgtggcgccgagctacgaggccgcgtcgccgccacatcgatgacaggtcagccctgggcgcaggtagccgttgctgccacgtcatacctcggcgccataggctgtggcgccgagctgtgtta

SEQ ID NO: 867 - DNA, 148 bp, Zea mays
ggaattcgtagctcggcgccaagatctgtggcgccgagctacgaggccgcgccgccgccacgtcagagtcaggtcagccctggacgcaactagccgttgcggccacgtcacagctcggcgccataggctgtggcgccgagctgtgtta

SEQ ID NO: 868 - DNA, 297 bp, Zea mays
ggcctgggccggggcggccgtgcggcggccagccggagctggggcaggcggcggcggcgacccgcagacaaacccgagggcaggcggcggcggcgtgattttgtgggcggcggcgagttcgtaaacggcggcggcttgaattggaatgagccgagaagacaagaaacgcgcagagagaaggctttttgcggatttttcctagctcggcaccaagatctgtggcgccgagctaggtgccacgcgggactgccacgtcacgaagctcggcgccacaggctgtggcgccgagctgtgtta

SEQ ID NO: 869 - DNA, 127 bp, Zea mays
ttaattcctagctcggcgccaagatctgtggcgccgagctaggtgccacgcggacatccacgtcacccctgcccgccatggccacgtcacagctcggcgccatagactatggcgtcgagctgtgtta

SEQ ID NO: 870 - DNA, 432 bp, Zea mays
  misc_feature (421)..(432): n is a, c, g, or t
taactcccgaggacgacctctcttctgccacaacgcctctcggtacatgtcttccaactaataaacgattataattatcactagtacctattatgctttataataagtttacacaaaacgaatcagttggaaatcataccttggtctacgaagtgaaccaactcaaatctttgaatccaggaaattttgacgaagtttggaaatgggatgaaatgagctgctctcggccagccgcgcggacgttttataggaattcgtagctcggcgccaagatctgtggcgccgagctacgagggcgcgctgccgccacgtcagagccaggtcagccctagacgcaactagccgttgcggccacgtcacagctcggcccccttggcttggcgccgagctgtgttagctcggcgccacaggctatggcggnnnnnnnnnnnn

SEQ ID NO: 871 - DNA, 105 bp, Zea mays
ttttttcctagctcggcgccaagatctgtggcgccgagctaggtgccacgcgggactgccacgtcacgaagctcggcgccacagcctgtggtgccgagctgtgtt

SEQ ID NO: 872 - DNA, 137 bp, Zea mays
ggcactcgtagctcggcgccaagatctgtggcgccgagctacgaggccgcgtcgccgccaggtcagccctaggcgcaggtagccgttgctgccatgtcatagctcggcgccataggctgtggcgccgagctgtgtta

SEQ ID NO: 873 - DNA, 117 bp, Zea mays
tttcatcctagctcgacgccaagatctgtggcgccgagctagatgccacgcggcctgccacatcggcttcgccacgtcattgctcggcgccacactctatggcgccgacatgtgtag

SEQ ID NO: 874 - DNA, 140 bp, Zea mays
tgagaggagatgcgctcttctcggccagcagcacagccattttataggcctccgtagctcggcgccaagatctgtggcgccgagctacgaggccgcgttggcgccacgtcagccctagtcgccgggagccaccagcgcca

SEQ ID NO: 875 - DNA, 210 bp, Zea mays
gaacatatctcgcatgcgcctcatcggccaaatctttgaatccaggaaatttttacgaagtttggaaataagatgaaatgagctgctctcggccagccgcgcgggcgtttttataggaattcgtagctcggcgccaagatctgtggcgccgagctacgaggccgcgccgccgccacgtcagcgccaggtcagccctggacgcagctagcc

SEQ ID NO: 876 - DNA, 359 bp, Zea mays
ggggcggcagtgggcggagctcgggcgcggcagagggcgggcggcggcgaccgagctcgggggagctcgagcgggcggcgagctcgggcgagctagggcgacgtcgggcggggctcgcggcggcgagccggagcgggcgggcggcggcgagccggagtcctggcaggcggcggcgattgaggacggcggcggcggcgttggtttggaacgagcagaagacaagaaacgcgcgcacagagaaggcggtttgcagttttttcctagctcggcgccaagatctgtggcgccgagctaggtgccacgcgggactgccacgtcaggaagctcggcgccaccgtctgtggcgccgagctaagggt

SEQ ID NO: 877 - DNA, 148 bp, Zea mays
ggaatttgtagctcggcgccaagatctgtggcgccgagctacgaggccgcgccgccgccacgtcagagccaggtcagccctggacgcagctagccgttgcggccacgtcacagctcggcgccataggctgtggcgccgagctgtgtta

SEQ ID NO: 878 - DNA, 105 bp, Zea mays
tttttccctagctcggcgccaagatctgtggcgccgagctaggtgccatgcgggactgccacgtcacgaagctcggcgccacagcgtgtggcgccgagctgtgtt

SEQ ID NO: 879 - DNA, 285 bp, Zea mays
gcgccgggcgagcggcgagctcggcggcgagctcggcgggctgcgggcgggcggcgcgctcggcgggctgcgggcgggcggcgagctcggcggcggcggcggtatgagcgacggcgggcgtaggaaaatgaagacgcgagcgaaacagagaagaaacgaagaggaaaggcgtttcggttaagtttcctagctcggcgccaagatctgtggcgccgagctaggtgtgccacgcggctgccacgtcacgaagctcggcgccataggctgtggcgccgagctgtgtta

SEQ ID NO: 880 - DNA, 155 bp, Zea mays
ggaattcgtagctcggcgccaagatctgtggcgccgagctacgaggccgcgccgccgccacgtcagcgccaggttagccctggacgcagctagccgttgcggccacgtcacagctcgttagctcggcgccacagcctatggcgccgagctaaggg

SEQ ID NO: 881 - DNA, 332 bp, Zea mays
gtgcctcagaccgtgcaaaatgcggatgcggagtgggatggggagtgttgctggagttggtcttaggctctaatgaagcaccaggctctgataccaattgaaagtcgcctaaaggggggtgaatagggcgaatctgaaatttataaatttaagcacaactacaagccgggttagcgttagaaatataaatgtgtccgagagagagggtgaaaaacaaatcgtaagcaaataaggagtgagacacaaggatttgttttaccgatgttcggttcttgcaaacctactccctgttgaggtggtcacaaagaccgggtctctttcaaccctttccc

SEQ ID NO: 882 - DNA, 229 bp, Zea mays
tgccatttatgtcagcagacgaagaagaagaagaagaaacctactttgatgatcgcgagcagtttgccccgcctccctaccaaggggatccaggtcaatcatcctctcaccctccgccccaggatccttctggaagtgctcctcccccggatcagtctggggaagaacacttcacatctcacctggcgcaccatttcttcgcttcgcatcagcctcctcctaactggtg

SEQ ID NO: 883 - DNA, 267 bp, Zea mays
atactccataatatggatagatcaggaagcctttcgtctttgaggggaatgttgtctggctcggggccgccgccgccgctccttccttctctagtctctcttctctcctagcagctactcttcgcttcctactcctatctcgatccctctcttcttcttcttcttcttcttcctcttcccccctctcttggatcgagaccgagcggacggagacgagtggtgtagatctcggaccaggcttcattccccccaaaatgaagggctccc

SEQ ID NO: 884 - DNA, 119 bp, Zea mays
tggtcgattggctcgtgcatgcctggctccctgtatgccacacatgtagcccaacccgtgatgtgattggatgctgtgggtggcgtgcaaggagccaagcatgtatgcatatataacat

SEQ ID NO: 885 - DNA, 169 bp, Zea mays
cgcaggcgaggcgtgcccgatggagaagaagggcacatgcacgcatcgatcggccggccggccggctggctggctggctgggtttcagaagctagctgctgcacctgcaccagttagccgcgccggcgacgacctgccgtgtctctctctctcgcgcgcgccgctcagg

SEQ ID NO: 886 - DNA, 209 bp, Zea mays
tttggtgagaaggtccctgttggagaagcagggcacgtgcagagacacgccggagcacggccgccgccgatctaccgacctcccaaacctgccttatggtgtgggggtggaggtcgtcggtggaagcgatagctgtcgttgttgcttcgatgttgttagctcctcctgcacgtgctccccttctccaccacggccttctcaccaccctc

SEQ ID NO: 887 - DNA, 245 bp, Zea mays
agatgcattggcaacaatgctacggttggcacatgcatgcatttacgtatgatgcgtgaagctttgatagatggatcaggatgtgcaaaggtgattttgcgtaataatatatgaaggtttgcattgcttaggatgtgcctggctccctgtatgccactcatctagagcaacgacagcttggtagggttgcctataagatggatggcgtgcatggtgccaagcatatctcgccatttttgttgtag

SEQ ID NO: 888 - DNA, 112 bp, Zea mays
aacagtcggtgcttgcaggtgcagcaccatcaagattcacatccccagctcgatctgtgcatgatgagatgagaatcttgatgatgctgcatcagcaaacactcacttacat

SEQ ID NO: 889 - DNA, 128 bp, Zea mays
tagacggtggctgtgcgtggtggagaagcagggcacgtgcattaccatccaatgccgccgggtgggtgggtggaatggatggatggttcttgatgtgcccatcttctccaccgagcacgaactgtctt

SEQ ID NO: 890 - DNA, 294 bp, Zea mays
gcttgaggttgacttgccgaagctacagaagccgcagggtggttgtctatgtattgtgggacataaggcggatgaaacgaagcagtatgcataacctgcttcgactgagcttgttgagatgcagcttcggctagttccttttgcttctggattgtaacatggcacgtcctagtggtgtggcccttgccctctccacaaaataggcaaaacagtctccttggctgatctccgaatcttccgccgaagcccctggcgcctctgcctcttggagctggtggccgaaagaaagtttgt

SEQ ID NO: 891 - DNA, 294 bp, Zea mays
gcttgaggttgacttgccgaagctacagaagccgcagggtggttgtctatgtattgtgggacataaggcggatgaaacgaagcggtatgcataacctgcttcgactgagcttgttgagatgcagcttcggctagttccttttgcttctggattgtaacatggcacgtcctagtggtgtggcccttgccctctccacagaataggcaaaacagtctccttggctgatctccgaatcttccgccgaaacccctggcgcctctgcctcttggagctggtggccgaaaggaagtttgt

SEQ ID NO: 892 - DNA, 294 bp, Zea mays
gcttgaggttgacttgccgaagctacagaagccgcagggtggttgtctatgtattgtgggacatacggcggatgaaacgaagcagtatgcataacctgcttcgactgagcttgttgagatgcagcttcggctagttccttttgcttctggattgtaacatggcacgtcctagtggtgtggcccttgccctctccacagaataggcaaaacagtctccttggctgatctccgaatcttccgccgaagcccctggcgcctctgcctcttggagctggtggccgaaaggaagtttgt

SEQ ID NO: 893 - DNA, 294 bp, Zea mays
gcttgaggttgacttgccgaagctacagaagccgcagggtggttgtctatgtattgtgggacataaggcggatgaaacgaagcagtatgcataacctgcttcgactgagcttgttgagatgcagcttcggctagttctttttgcttctggattgtaacatggcacgtcctagtggtgtggcccttgccctctccacagaataggcaaaacagtctccttggctgatctccgaatcttccgccgaagcccctggcgcctctgcctcttggagctggtggccgaaagaaagtttgt

SEQ ID NO: 894 - DNA, 358 bp, Zea mays
  misc_feature (91)..(190): n is a, c, g, or t
catgagccgacctatattttatgcttaggaatgcaacgaattctcttttatctcattttttgtgaagttttttggaaatatgtgtgatttnnnnnnnnnnnnnnnnnnnnnnnnnnnnnnnnnnnnnnnnnnnnnnnnnnnnnnnnnnnnnnnnnnnnnnnnnnnnnnnnnnnnnnnnnnnnnnnnnnnntcggctagttccttttgcttctggattgtaacatggcacgtcctagtggtgtggcccttgccctctccacagaataggcaaaacagtctccttggctgatctccgaatcttccgccgaagcccctggcgcctctgcctcttggagctggtggccgaaaggaagtttgt

SEQ ID NO: 895 - DNA, 294 bp, Zea mays
gcttgaggttgacttgccgaagctacagaagctgcagggtggttgtctatgtattgtgggatatagggcggatgatacgaagcagtatgcatgacctgcttcggctgagcttgttgagatgcagcttcggctatttccttttgcttctggattgtaacatggcacgtcctagtagtatggcccttgccttctccacagaacaagcaaaacagtctccttggctgatctccgaatcttccgccgaagcccctggtgcctctgcctcttggagctgatggccggaaggaagtttgt

SEQ ID NO: 896 - DNA, 294 bp, Zea mays
gcttgaggttgacttgccgaagctacagaagccgcagggtggctgtctatgtattgtgggacataaggcggatgaaacgaagcagtatgcataacctgcttcgactgagcttgttgagatgcagcttcggctagttccttttgcttctggattgtaacatggcacgtcctagtggtgtggcccttgccctctccacagaataggcaaaacagtctccttggctgatctccgaatcttccgccgaagcccctggcgcctctgcctcttggagctggtggccgaaaggaagtttgt

SEQ ID NO: 897 - DNA, 285 bp, Zea mays
tgacttgccgaagctacagaagccacagggtggttgtctatgtattgtgggacataaggcggatgaaacgaagcagtatgcataacctgcttcgactgagcttgttgagatgcagcttcggctagttccttttgcttctggattgtaacatggcacgtcctagtggtgtggcccttgccccctccacagaataggcaaaacagtctccttggctgatctccgaatcttccgccgaagcccctggcgcctctgcctcttggagctggtggccgaaagaaagtttgt

SEQ ID NO: 898 - DNA, 295 bp, Zea mays
gcttgaggttggcttgccgaagctacagaagccgcagggtggttgtctatgtattgtgggacataaggcggatgaaacgaagcagtatgcataacctgcttcgactgagcttgttgagatgcagcttcggctagttccttttgcttctggattgtaacatggcacgtcctagtggtgtggcccttgcccctctccacagaataggcaaaacagtctccttggctgatctccgaatcttccgccgaagcccctggcgcctctgcctcttggagctggtggccgaaagaaagtttgt

SEQ ID NO: 899 - DNA, 294 bp, Zea mays
gcttgaggttgacttgccgaagctacagaagccgcagggtggttgtctatgtattgtgggacataaggcggatgaaacgaagcagtatgcataacctgcttcgactgaacttgttgagatgcagcttcggctagttccttttgcttctggattgtaacatggcacgtcctagtggtgtggcccttgccctctccacagaataggcaaaacagtctccttggctgatctccgaatcttccgccgaagcccctggcgcctctgcctcttggagctgatggccgaaaggaagtttgt

SEQ ID NO: 900 - DNA, 294 bp, Zea mays
gcttgaggttgacttgccgaagctacagaagccgcagggtggttgtctatgtattgtgggacataaggcggatgaaacgaagcagtatgcataacctgcttcgactgagcttgttgagatgtagcttcggctagttccttttgcttctggattgtaacatggcacgtcctagtggtgtggcccttgccctctccacagaataggcaaaacagtctccttggctgatctccgaatcttccgccgaagcccctggcgcctctgcctcttggagctggtggccgaaagaaagtttgt

SEQ ID NO: 901 - DNA, 285 bp, Zea mays
tgacttgccgaagctacagaagccgcaggatggttgtctatgtattgtgggacataaggcggatgaaacgaagcagtatgcataacctgcttcgactgagcttgttgagatgcagcttcggctagttccttttgcttctggattgtaacatggcacgtcctagtggtgtggcccttgccctctccacagaataggcaaaacagtctccttggctgatctccgaatcttccgccgaagcccctggcgcctctgcctcttggagctggtggccgaaaggaagtttgt

SEQ ID NO: 902 - DNA, 294 bp, Zea mays
gcttgaggttgacttgccgaagctacagaagccgcagggtggttgtctatgtattgtgggacataaggcggatgaaacgaagcagtatgcataacctgcttcgactgagcttgttgagatgcagcttcggctagttccttttgcttctggattgtaacatggcacgtcctagtggtgtggccctggccctctccacagaataggcaaaacagtctccttggctgatctccgaatcttccgccgaagcccctggcgcctctgcctcttggagctggtggccgaaagaaagtttgt

SEQ ID NO: 903 - DNA, 294 bp, Zea mays
gcttgaggttgacttgccgaagctacagaagccgcagggtggttgtctatgtattgtgggacataaggcggatgaaacgaagcagtatgcataacctgcttcgactgagcttgttgagatgcagcttcggctagttccttttgcttctggatcgtaacatggcacgtcctagtggtgtggcccttgccctctccacagaataggcaaaacagtctccttggctgatctccgaatcttccgccgaagcccctggcgcctctgcctcttggagctggtggccgaaaggaagtttgt

SEQ ID NO: 904 - DNA, 294 bp, Zea mays
gcttgaggttgacttgccgaagctacagaagccgcagggtggttgtctatgtattgtgggacataaggcggatgaaacgaagcagtatgcataacctgcttcgactgagcttgttgaggtgcagcttcggctagttccttttgcttctggattgtaacatggcacgtcctagtggtgtggcccttgccctctccacagaatgggcaaaacagtctccttggctgatctccgaatcttccgccgaagcccctggcgcctctgcctcttggagctggtggccgaaagaaagtttgt

SEQ ID NO: 905 - DNA, 294 bp, Zea mays
gcttgaggttgacttgccgaagctacagaagccgtagggtggttgtctatgtattgtgggacataaggcggatgaaacgaagcagtatgcataacctgcttcgactgagcttgttgaggtgcagcttcggctagttccttttgcttctggattgtaacatggcacgtcctagtggtgtggcccttgccctctccacagaataggcaaaacagtctccttggctgatctccgaatcttccgccgaagcccctggcgcctctgcctcttggagctggtggccgaaagaaagtttgt

SEQ ID NO: 906 - DNA, 294 bp, Zea mays
gcttgaggttgacttgccgaagctacagaagccgcagggtggttgtctatgtattgtgggacataaggcggatgaaacgaagcagtatgcatgacctgcttcgactgagcttgttgagatgcagcttcggctagttccttttgcttctggattgtaacatggcacgtcctagtggtgtggcccttgccctctccacagaataggcaaaacagtctccttggctgatctccgaatcttccgccgaagcccctggcgcctctgcctcttggagctggtggccgaaagaaagtttgt

SEQ ID NO: 907 - DNA, 294 bp, Zea mays
gcttgaggttgacttgccgaagctacagaagccgcagggtggttgtctatgtattgtgggacataaggcggatgaaacgaagcagtatgcataacctgcttcgactgagcttgttgagatgcagcttcggctagttccttttgcttctggattgtaacatggcacgtcctagtggtgtggcccttgccctctccacagaataggcaaaacagtctccttggctgatctccgaaccttccgccgaagcccctggcgcctctgcctcttggagctggtggccgaaagaaagtttgt

SEQ ID NO: 908 - DNA, 294 bp, Zea mays
cttgagggttgacttgccgaagctacagaagccgcagggtggttgtctatgtattgtgggacataaggcggatgaaacgaagcagtatgcataacctgcttcgactgagcttgttgagatgcagcttcggctagttccttttgcttctggattgtaacatggcacgtcctagtggtgtggcccttgccctctccacagaataggcaaaacagtctccttggctgatctccgaatcttccgccgaagcccctggcgcctctgcctcttggagctggtggccgaaaggaagtttgt

SEQ ID NO: 909 - DNA, 415 bp, Zea mays
taaatgtaaagagggaacatcttgaatccggtattcaaggagttgaaccaggatttctaaatggataggatagggtatttttatatgtgaaagaagtgtatccacggcttcttgtaccaatttttcctggcacattactaaatctgctggtgctaattcacttatttttaatagataggcaaggttgttgttccgacggataactctcttataaagttcattaatatctgaagtcactactttatccccagatctataaacaatgggtctcaattcgggaggaagaaccggtaataagcacaaaaccatccattctggttctacatttgtttgaataaaatgtttcgccaattgcatgcgtctaatcaaaaaaacttttcttattcgtctttttctatcttcccattcatctcca

SEQ ID NO: 910 - DNA, 225 bp, Zea mays
ctaagtaatggggaagaggactgaaacatgccactgaaagactctactgagacaaaaagatgggctgtcaaaaaggtagaggaggtaggatgggcagttggtcagatctagtatggatcgtacatggacgatagttggagtcggcggctctgcgtgcctgttgaagaatgagccggcgactcataggcagtggcttggttaagggaatggaacccaccagagccg

SEQ ID NO: 911 - DNA, 359 bp, Zea mays
cacatgcaagaccagggtgtgggacccacctgtcagacgttgtacgacaaggtgtgggcagaaccaggatgggaatggagaacaagccaggggtgtgggaccccatatgtcagacggccaaaagtgtgggacccgctatacgacagagttgtgggcagaacggggatgggaatgggattggggaacaggccagtggtgtgggaccccacatgtcagacgttgtacggctagggtgtgtgggcagaaccaggatgagaatgggaatgagaacgtgaatagcagaaaaccaccaggatggaataatggaatggcagaaccaggaatggggcagcctaccccttagagtcttaataggtagt

SEQ ID NO: 912 - DNA, 122 bp, Zea mays
ttggtgtgtcctctagtagctgaagctgccagcatgatctgaggtgtccacagcatatatatggaagcagctagcgatcagatcatgctgtgcagtttcatctgctcgtggacgcacacgag

SEQ ID NO: 913 - DNA, 151 bp, Zea mays
tgaaggagcattcagacggagagagagccaagagccaaagaacgaggcgacatggcatggtattgacttggctcatctctcgcccacaccagaatccacaagtgccggaggaggtgagccgagccaatatcacttcatgtcatctagcgtt

SEQ ID NO: 914 - DNA, 175 bp, Zea mays
gattggctttgggcttttcctgcgtagcttagctggaaggcgaagaaggcccccttccgggggggcccgagccatcagtgagataccactctggaagagctcggattctaaccttgtgtcagacccgcgggccaagggacagtctcaggtagacagtttctatggggcgtaggcc

SEQ ID NO: 915 - DNA, 177 bp, Zea mays
ccttgctcccccgcgcgcgctctctctctctccgtgtccagttcttgttgcgtctgcttggtactgtactttgcagcggtggtcgacgttgggatgatgggggcgctggctggagccagcagctcgacggtgtggctgacagaagagagtgagcacgcatcggccagactgcatcta

SEQ ID NO: 916 - DNA, 277 bp, Zea mays
atttatctatctcttgactcgaaatgggagcagagcaggtttgaaaaaggatcttagagtgtctagggttgggccaggagggtctcttaacccattctttttttgcccatcggagttatttcccaaggacttgccgtggtaagggggagaagggggaagaagcacacttgaagagcgcagtacaacggggagttgtatgctgcattcgggaaggatgaatcgctcccgaaaaggagtctattgattctctcccaattggttggatcgtaggggcgat

SEQ ID NO: 917 - DNA, 263 bp, Zea mays
ccaattgatctaatcaaaccgtgcatcaagtagatccatctcatgaacctagatccagacctaaaactacgcaaaacctggctctgataccactgaaggattacggggaggctacgctagcgcaaaacaaaactttcaaccccataaaaccaagaactactgcggttataggtcatggaattaccactagacgcgcagagcaacggaagacgtctcgatgtagacgaacgagtcgagcagtgtcgtgcagtcgtcggcgtcct

SEQ ID NO: 918 - DNA, 243 bp, Zea mays
cgcgacacacgcgcccacacgtatagcagcgggctttaggtctcttgggccaacactccccccaaaaaagctagcctattagggggttgcaccctcaaccatataaaccatgctttcccaccctcaccacacaatgtgggactattcccaacaatctccccctcacacattatgagccaagatttgtttgagaatgcattgggccaacctggctctgataccaattgttagaaccggcccctg

SEQ ID NO: 919 - DNA, 358 bp, Zea mays
cgcgacacacgcgcccgcacgtatagcagcaggctttaggtctcttgggccaacattccccctaaaaagctagcctcataggggttgcaccctcaaccttataaaccatgctttcacactctcaccagacaatgtgggactattcccaacaatctccccctcacacattgtgagccgagatttgtctgagaatgcactgggccaacctggctctgataccaattgttggaaccggaccgccgacacacggcgtgtccgtcggggccgcccgcacacacggcgcgcccacctaggctgtcgggccgcgacacacgcgcccgcacgtatagcagcaggctttaggtctcttgggccaaca

SEQ ID NO: 920 - DNA, 232 bp, Zea mays
cgcgacacacgcgcccgcacgtatagcagcgggctttaggtctcttgggccaacactcccccaaaaagctagcctgttaggggttgcaccctcaaccttataaaccatgctttcacaccctcaccacacaatgtgggactattcccaacaatctccccctcacacattgtgagccaagatttgtgcattgggtcaacctggctctgataccaattgttggaaccggaccacc

SEQ ID NO: 921 - DNA, 146 bp, Zea mays
acgcaaaggcagttccggcgggggcggactgggaacacatgggaatgagatgagatcattgctcggtcgtgctggcctgggccgtcggcgcgcgttgatcttgcatgtgttctcaggtcgcccccggagggccttccttgctgctg

SEQ ID NO: 922 - DNA, 128 bp, Zea mays
cgagtggacctcgggagcgatgacagaagagagagagcacaacccagcaccagcgaggaaaagcctcgcttctgcgagggccgtgtgctctctgctctcactgtcatcgcccacaggccaccgaaccg

SEQ ID NO: 923 - DNA, 172 bp, Zea mays
ggaattcgtagctcggcgccaagatctgtggcgccgagctacgaagccgcgccgccgccacgtcagagccaggtaagccctagacgcaactagccgttgcggccatgtcacagctcggtggcgccgagctgtgtcagctcggcgccatagcctatggcgccgagctaagggt

SEQ ID NO: 924 - DNA, 105 bp, Zea mays
atatttcctagctcggcgccaagatctgtggcgccgagctaggtgccacgcgggatgacacgtcacgaagctcggcgccatagcctgtggcgccgagctgtgtta

SEQ ID NO: 925 - DNA, 243 bp, Zea mays
tgagaggcgatgagctcttctcggccagcagcgcgtccgttttataggcctccgtagctcggcgccaagatctgtggcgccgagctacgaggccgcgtcggcgccgcgtcgatgctaggtcagccctagccgcagggagccgttagtgccacgtcacagttcggcgccataggttatggcgccgagtgttaccttggcgtcatagcctatggcgccgagtatcggatccaaaattgcatataa

SEQ ID NO: 926 - DNA, 332 bp, Zea mays
tccgggcggcggcggcgaactccgggcgcccgagcccggccggcgacagggagcggggcgggcggccggcggcgacagggagcggggcgggcggccggcggcgagcccggccggcggcgaggtgggcgggcggtgttggtttttgcggtcggagaaacgcgcacagagaagaaacgcgaacagagaagccagagaagaaacgcgcagagaagaaacggcggcggtggatatttcctagctcggcgccaagatctgtggcgccgagctaggtgccacgcaatctgccacgtcacagagctcggcgccacaggctgtggcgccgagatgtgtta

SEQ ID NO: 927 - DNA, 109 bp, Zea mays
ttaagtcctaactcggcgccaagatctgtggcgccgagctaggtgccacgcctgcagccatggccacgtcaacactcggcaccatagactatggcgccgagctgtgtta

SEQ ID NO: 928 - DNA, 124 bp, Zea mays
acacaaccgagctcggcgccaagatctgtggcgccgagctcggttccacgtcgacgccacgcgtctggggtgtgccaacgcaacacgacctcggcgccatagcctatggcgccgagcaaagggt

SEQ ID NO: 929 - DNA, 184 bp, Zea mays
tgatgggagctgaggtcttctcggccagcagcgtggccgtttttataggcctccgtagctcggcgccaagatctgtggcgccgagctacgaggccgtgtcggcgccacgtcagccctagctgcagggagccgttagtgccatgtcatagctcggcgccataggctatggcgctaagtatcgggt

SEQ ID NO: 930 - DNA, 128 bp, Zea mays
ctaaatcttagctcaacatcaagatctgtggcgccgagctaggtgcccacgcgggctgccacgtcagccctggccgctaccgccacgtcagagttcggcgccatagtctatggcgtcgagctgtgtta

SEQ ID NO: 931 - DNA, 124 bp, Zea mays
acacaaccgagctcggcgccaagatctgtggcgccgagctcggttccacgtcgacgccacgcgtcaagacgctgccaacgcaacatgacctcggcgccaaaagctatggcgcagctgtgtaagc

SEQ ID NO: 932 - DNA, 148 bp, Zea mays
ggcattcgtagctcggcgccaagatctgtggcgccgagctacgaggcagcgccgccgccacgtcagagccaggtaagccctggacgcaactagccgttgcggccacgtcacagctcggcgccataggctgtggcgccgagctgtgtta

SEQ ID NO: 933 - DNA, 341 bp, Zea mays
ctcggggcgagctcgggcactggcggccgcgacctcggccggtttggagcgggctcggggcgacctcgggcggggcgggcggcggcggcgggcggacctcgcacgaccgcgggcgggcggcgacctacgacgagggaaggcggcggcgatttgaggagaacgccggcgcggcggcgcggatgtttggaatgagcgcagagagaagaaacgcgcgcagagagaaagcgtttttcggttttttcctagctcggcgccaagatctgtggcgccgagctaggtgccacgcgggacagccacgtcacgaagctcggcgccacaggctgtggcgccgagctgtgtta

SEQ ID NO: 934 - DNA, 126 bp, Zea mays
gaacttcctagctcggcgccaagatctgtggcgccgagctcgggggtcacgtcggcgccgcatccgccctcatttgccagcgcgactcgtacctcgacgccatagcctatgacgctaaggcgtgtt

SEQ ID NO: 935 - DNA, 381 bp, Zea mays
cggctgagctggggcggagctcgggccgagctcgagggcggacctcgccgcggcgtgaatagagcggagctcgcggcggcgggcagcggagcttggggcggccggcgtgaagagctcgaggcggcgccggagaagggccaagcggcggcggcgtgatgtgtggacggcaggcggcggcggcgggatttcgaatgagcagacaacacaagaaacgcgcagagagaagggatgtttgcggattttttcctagctcggcgccaagatctgtggcgccgagctaggtgccacgcaggacagccacgtcacgaagctcggcgccacaggatgtggcgccgagctgtgttagctcggcgccacaggctatggcgccgagcaaagggt

SEQ ID NO: 936 - DNA, 247 bp, Zea mays
gcgccgggcgggcggcgagctcggcgggcgagctcggcgggctgcgggcgggcggcgagctcggctggcggcggcgggcgtaggaaacgaaagcggcgagcgaaacagagaagaaacgaagaggaaagggggtttcggttaagtttcctagctcggcgccaagatctgtggcgccgagctaggtgtgccacgcgggctgccacgtcatgaagctcggcgccatagccgatggcgccgagctaagggt

SEQ ID NO: 937 - DNA, 95 bp, Zea mays
ggcattcgtagctcggcgccaagatctgtggcgccgagctacgaggccgcgtcgccaccacgtcggtgccaggtcagccctaggcgcaagtaccc

SEQ ID NO: 938 - DNA, 124 bp, Zea mays
acacaaccaagctcggcgccaagatctgtggcgccgagctcggtgccacgtcgacgccacgcgtctgggttgtgccaacacaacacgacctcggcgccatagcctatagcgccgagctgtgtta

SEQ ID NO: 939 - DNA, 125 bp, Zea mays
acacaaccgagctcggcgccaagatctgtggcgccgagcttggtgccacgtcaacgccacggcgttcgggttgtgccaacgcagcacgtatctcggcgccataacctatggcgccgagctgtgtt

SEQ ID NO: 940 - DNA, 148 bp, Zea mays
ggaattcgtagctcggcgccaagatctgtggcgccgagctacgagggcgcgccgccgccacgtcagagccaggtcagccctggacgcagctagccgttgcggccacgtcatagctcggcgccataggctgtggcgccgagctaagggt

SEQ ID NO: 941 - DNA, 213 bp, Zea mays
cgaggcagcggcggcgcggctcggccagcgataatggcggcggagagaaaacagagacagtgggcagaaaaccgcggtgaggaggtagccttgcgatttcatcctagctcggcgccaagatctgtggcgccgagctaggtgccacgcggcctgccacatcagcttcgccacgtcattgctcggcgccacactctatggcgccgacatgtgtta

SEQ ID NO: 942 - DNA, 312 bp, Zea mays
cggcgtgggccgaccgcggctccggccgcagctccggcgagggcggtctgggtcggctcagctccgaccgtggaggcgggcgacggtggggcggtgcggcgacgtggcgagaggagagaagaacagagaacagaaacagttggtgcggctaaatcctagctcggcgctaagatctgtggcgccgagctaggtgcccacgtgggctgccacatcagccctggccgccaccgccacgtcaaagctcggcgtcgtagcccatggcgccgagctgtgttacctcggcgccatagcctataacgccgagcttcgggt

SEQ ID NO: 943 - DNA, 207 bp, Zea mays
taacctcatggtttaaaaccttgtgctccaacaactgagctagaaagctttgcactatttctttgcaacaaaactgttgataacacaaccgagctcggcgccaagatctgtggcgccgagctcggtgccacgtcaacgccacggcgtccgggttgtgccaacgcagcacgtacctcggcgccataacctatggcgccgaggtacgcc

SEQ ID NO: 944 - DNA, 125 bp, Zea mays
acacaaccgagctcggcgccaagatctgtggcgccgagctcggtttccacgtcgacgccacgcgtctgggttgtgccaacgcaacacgacctcggcgccatagcctatggcgccgagctgtgtta

SEQ ID NO: 945 - DNA, 298 bp, Zea mays
ggcctgggccgggacggccgtgcggcggccagccggagctggggcaggcggcggcggcgacccgcagacaaacccgagggcaggcggcggcggcgtgattttgtgggcggcggcgagttcgtaaacggcggcggcttgaattggaatgagccgagaagacaagaaacgcgcagagagaaggctgtttgcggatttttcctagctcggcgccaagatctgtggcgccgagctaggtgccacgcgggactgccacgtctgaaagggtcggcgccacaggctgtggcgccgagctgtgtta

SEQ ID NO: 946 - DNA, 319 bp, Zea mays
ggcgggcggggcgggcgagctcggcggacctcgccggagctgggagggcggggaggccggagagaagggcggggcggccgccggagctgggcgggcggggtggccggagagaagggcggggcggcggcgatttccgaacggcggcggcggcgggtggcttgcgcgatttccgaacaacagagaagaaacgcacagagagaaaggtgtcttgcggatatttcctagctcggcgccaagatctgtggcgccgagctaggtgccacgcgggctgccacgtcacgtagctcggcgccataggctgtggcgccgagctgtgtta

SEQ ID NO: 947 - DNA, 148 bp, Zea mays
tgcatccgtagctcagcgccaagatctgtggcgccgagctacaaggtcgcgtcaccaccacgtcgatgccaggtcagccctaggtgaaggtagccgttgctgccacgtcagacctcggcgccataggctgtggcgccgagctgtgtta

SEQ ID NO: 948 - DNA, 223 bp, Zea mays
gggcgaaagcgtggattcgctcgggcaaccactgccgcaaccatgcggcgttgttttacggggacgagtacgacgtggcgcaacggcggataagcctgggatgtcagcctctaaacaaccgagctcggcgccaagatctgtggcgccgagctcggtgccacgtcggcgccacggcgttcgggttatgccagcgcagcaggtacctcggcgccataggctatgg

SEQ ID NO: 949 - DNA, 108 bp, Zea mays
acacaaccgagctcggcgccaagatctgtggcgccgagctcggggcgtccaggtgtgccagcgtagcacgtacctcggcgccataggctatggcgccgagctgtgtta

SEQ ID NO: 950 - DNA, 125 bp, Zea mays
acacaaccgagctcggcgccaagatctgtggcgccgagctcggtgccacgtcggcgccacgacgtctaggtatgccagcgtagcacgtacctcggcgccataggctagggcgccgagctgtgtta

SEQ ID NO: 951 - DNA, 114 bp, Zea mays
ggaattcgtagctcggcgccaagatctgtggcgccgagctacgaagccgcgccgccgccacgtcagtgccaggtcagccctaggcgcaagtagccgttgctgccacgtcacagc

SEQ ID NO: 952 - DNA, 149 bp, Zea mays
ggaattcgtagctcggcgccaagatctgtggcgccgagctacgaggtcgcgcctgccaccacgtcagtgccaggtcagccctaggcttaagtagccgttgctgccacgtcacagctcggcgccataggcgccacagcctatggcgccga

SEQ ID NO: 953 - DNA, 105 bp, Zea mays
atttttcctagctcggcgccaagatctgtggcgccgagctaggtgccacgcaggacagccacgtcacgaagctcggcgccacagcctgtggcgccgagctaaggg

SEQ ID NO: 954 - DNA, 148 bp, Zea mays
ggaattcgtagctcggcgccaagatctgtggcgccgagctacgaggccgcgccgccgccgcgtcagagccaggtcagccctagacgcaactagccgttgcggccacgtcacagctcggcgccataggctgtggcgccgagctgtgtta

SEQ ID NO: 955 - DNA, 124 bp, Zea mays
acacaaccgagctcgccgccaagatctgtggcgccgagctcggtgccacgtcgacgacacgcgtccagattgtgccaacgcagcacgtacctcggcgtcatagcctatggcgccgagctgtgtt

SEQ ID NO: 956 - DNA, 148 bp, Zea mays
gaaattcgtagctcggcgccaagatctgtggcgccgagctacgaggccgcgccgccgccacgtcagagccaggtcagccctggacgcaactagccgttgcggccacgtcacagctcggcgccataggctgtggcgccgagctaagggt

SEQ ID NO: 957 - DNA, 271 bp, Zea mays
gggcgggcgggcggcggagctcgggccaacctcgggcggaggcgggcgggcggcgagccggagccggagccggggcgggcggcggcggcgatttcgtaaacggcggcggcgtgaattggagtgagcagagaagagaaaatcgcgcagagagaaggcagtttgcgggtttttcctagctcggcgccaagatctgtggcgccgagctaggtgccacgcgggactgccacgtcacgaagctcggcgccataggctatggcgccgagctgtgtta

SEQ ID NO: 958 - DNA, 278 bp, Zea mays
ggcctgggccggggcggccgtgcggcggccagccggagctggggcaggcggcggcggcgacccgatggcaggcggcggcggcgagattttgtgggcggcggcgagttcgtaagcggcgtgaattggattgagccgagaagacaagaaacgcgcagagagaagggtgtttgcggatttttcctagctcggcgccaagatctgtggcgccgagctaggtgccacgcgggacggccacgtcacgaagctcggcgccacaacctgtggcgccgagatgtgtt

SEQ ID NO: 959 - DNA, 156 bp, Zea mays
aagtttcctagctcggcgccaagatctgtggcgccgagctaggtgtgccacgcggactgccacgtcacgaagctcggcgccataggctgtggcgccgagctgtgttagctcggcgccaagatctgtggcgccgagctaagggtccaaaactgcatt

SEQ ID NO: 960 - DNA, 194 bp, Zea mays
tgggatgaaatgagctgctctcggccagccgcgtgggcgtttttataggaattctagctcggcgccaagatctgtggcgccgagctacgaggccgcgccgccgccacgtcagagccaggtcagccctagacgcaactagccgttgcggccacgtcacagctcggcgccacggcctatggcgccgagctaagggt

SEQ ID NO: 961 - DNA, 103 bp, Zea mays
tgcaacgatgatgcatcgcgtagccaaggatgacttgccggcattatatttcttggcccgccggcaagtcatctggggctacgcgtttgcctcctcctcctat

SEQ ID NO: 962 - DNA, 193 bp, Zea mays
aatctatgaagctgaagcacgccttcctctggaggcccttccggaccccccacgggcccgagctgcagacaggtacatgcagaagtgatcacagccaaagacaagggctcccgggtcaaatgcagacaggaaccctaggtcggggcttagccctggcgctagaaggagggccataccaagaggtgctccgcaa

SEQ ID NO: 963 - DNA, 150 bp, Zea mays
agcctacgaaactgaagcacgccttcctccggaggccctaccggaccccccacgagtccaaactacagacaggtacatgcaaaagtgaccacagccagagacgaggctcctggcgctagaaggagggctcccgtgtcaaaggcagatggg

SEQ ID NO: 964 - DNA, 149 bp, Zea mays
agtctacgaaactgaagcacgccttcctccggaggccctaccggacccccacgggtccgaactgcagacaggtacatgcagaagtgaccacagccagagaagaggctcctggcgctagaaggagggctcccgtgtcaaatgtagatggg

SEQ ID NO: 965 - DNA, 128 bp, Zea mays
ttgtgggtgtgcgtcctacgctcaggagagatgacaccgacgccagacggaccggtccatccgcgccgtgtctgtccgtctgaagtgggtgtcatctcgcctgaagcatagggcgggctctcgctggc

SEQ ID NO: 966 - DNA, 290 bp, Zea mays
ctcaatatgaggataaggctcaagaagaagaagaagaagatcaagatgatgagccacctcaagaggaggacattgatcaagggggagatgaagatgatcaagacaaggaagatgatcaagagattcgggatcaaagaccgccacacccaagagtccaccaagcaattcaaagagatcaccccgtcaactccatacttggtgtcattcacaagggggtaaccactagatatcgagatgctcatttttgtgaacactacttctttgtgtcctttattgagccatacaggata

SEQ ID NO: 967 - DNA, 438 bp, Zea mays
ggccgatgggattgcggcatttttctctatgtactggaacatttctgctgatgtacatgagctggcaaggcgtcagcgggagactgacgacaattttcatcgtcaagcttccactatgggtatgccctttgcccctcgctctcctgacgtgcctctccatccgcctcccccagagatcaatgagtggcaccagcaggcctacggggtgccctttatgtcagcagacgacgaagaagaagaagaagaagcctactttgatgatcgcgagcagtttgccccgcctccctaccatggggatccgggtcaatcatcctctcaccctccgccccaggatccttttggaagtgctcctcccccggatcagtctggggaagaacacttcgcatctcacctggcgcaccatttctttgctcctcatcagcctcctcctaactggtg

SEQ ID NO: 968 - DNA, 279 bp, Zea mays
ttatgacaacagacgacgttgaagaagaagaagaagaagcttattttgatgatcgtgagcagtttgtcccgcctccgtatcacggggatccgggccaatcatcctctcaccctccgccccaggatccttctggcagtgctcctcccccggatcagtctggggaagaacactttgcctttcacctggcgcaccacctctttgctcctcatcagcctcctccaaactgatgatctttggattggcgtttctctctctttttggttcttgttgccaaaaagg

SEQ ID NO: 969 - DNA, 217 bp, Zea mays
tgagtgagaaggaccacgctggagaagcagggcacgtgcatgcacatacgccattctcgatctctcctctccaccactactgcatctagctatctccatggatggatgtacgtagctcggactggatcgatcggagaagcaataagctagcgagctcatgcatgctggctgtgcacgcacgtggtctccttctccatcacggttctttctcacttcg

SEQ ID NO: 970 - DNA, 124 bp, Zea mays
agctcagggtgagaatcacagtgcggctctcctctggcatgaaggcgcggctgagaggcacgaacagtttctggccttcccctgccaatgccaaaggagagcacgcacagtttccagatactgg

SEQ ID NO: 971 - DNA, 107 bp, Zea mays
tgggtgtcttcgcgggcttagcatccttcattccaaacctcttgagaagatcttgagtgtacttcgtttgggagatgaaggagccgtctttgagttgcttcacttgg

SEQ ID NO: 972 - DNA, 107 bp, Zea mays
tcggtgtcttcgcgggcttggcgtccttcatcccaaaccgcttgagaagatcttgagtgtacttcgtttgggagatgaaggagccatccttgagttgcttcacttca

SEQ ID NO: 973 - DNA, 246 bp, Zea mays
gtcgccctttgctggtagtggtagctcctatataccaccaaaaataaataaataaacccctttattataagagtttgtaattgttcactggccattaaaacactaaatagtcaagcaagcttccataagccgaaggagggaacgatatctttattatcacagctcaaatgaagcgccggagcgtggccaaagaccgcccccgaccctgtggagatgaaggagccgattttttatttttggcaattt

SEQ ID NO: 974 - DNA, 132 bp, Zea mays
aggttaaggggtttgtttgtctggttcaaggtcgccacacagcagggaaaacccatttcgccttgaagcatgcaccatgatgggtgtacctgttggtgatctcggaccaggcttcaatccctttaactagcg

SEQ ID NO: 975 - DNA, 299 bp, Zea mays
ccggggcgccgtgggttctttttcgcggcaccccccttccccgcgggaggttcggggggggcagcgtgccgggccggagcccggcggcacgggtgactcgttcgcggtctgttttgtttaagggtcagagcatggatccttccgcaggttcacctacgcaaaacttctcctttcttctccttcctctaaatgataaggttcattggatttaagacgaggtacaggggggggggggggaaaaaaaccaaatcaacccccattttttttctcctttccccccggacggggggtgttttgtg

SEQ ID NO: 976 - DNA, 248 bp, Zea mays
gagattctcgccaacaaacatagcaagaaactcggaaccctaatctgttatgcgcctgtgcggaccgtccggcccacaggcgcggactgttcggaccccggaccgttcggccccagggccgaaccgtccggccttctcattttggtgcccaacaaatatatacatggaatctcacaaactatatattaaaaaataaagacaccaacaatctcagtctctttggctatacaccatgtccctaaaatgct

SEQ ID NO: 977 - DNA, 294 bp, Zea mays
gcttgaggttgacttgccgaagctacagaagccgcagggtggttgtctatgtattgtgggacataaggcggatgaaacgaagcagtatgcataacctgcttcgactgagcttgttgagatgcagcttcggctagttccttttgcttctggattgtaacatggcacgtcctagtggtgtggcccttgccctctccacagaataggcaaaacagtctccttggctgatctccgaatcttccaccgaagcccctggcgcctctgcctcttggagctggtggccgaaagaaagtttgt

SEQ ID NO: 978 - DNA, 294 bp, Zea mays
gcttgaggttgacttgccgaagctacagaagccgcagggtggttgtctatgtattgtgggacataaggcggatgaaacgaagcagtatgcataacctgcttcgactgagcttgttgagatgcagcttcggctagttccttttgcttctggattgtaacatggcacgtcctagtggtgtggcccttgccctctccacagaataggcaaaacagtctccttggctgatctccgaatcttccgccgaagcccctagcgcccctgcctcttggagctggtggccgaaaggaagtttgt

SEQ ID NO: 979 - DNA, 294 bp, Zea mays
gcttgaggttgacttgccgaagctacagaagccgcagggtggttgtctatgtattgtgggacataaggtggatgaaacgaagcggtatgcataacctgcttcgactgagcttgttgagatgcagcttcggctagttccttttgcttctggattgtaacatggcacgtcctagtggtgtggcccttgccctctccacagaataggcaaaacagtctccttggctgatctccgaatcttccgccgaagcccctggcgcctctgcctcttggagctggtggccgaaaggaagtttgt

SEQ ID NO: 980 - DNA, 294 bp, Zea mays
gcttgaggttgacttgccgaagctacagaagccgcagggtggttgtctatgtattgtgggacataaggcggatgaaatgaagcagtatgcaaaacctgcttcgactgagcttgttgagatgcagcttcggctagttccttttgcttctgtattgtaacatggcacgtcctagtggtgtggcccttgccttctccacagaataggcaaaacagtctccttggctgatctccgaatcttccgccgaagcccctggcgcctctgcctcttggagctggtggccgaaaggaagtttgt

SEQ ID NO: 981 - DNA, 294 bp, Zea mays
gcttgaggttgacttgccgaagctacagaagctgcagggtggttgtccatgtattgtgggatataaggcggatgatacgaagcggtatgcatgacctgcttcggctgagcttgttgagatgcagcttcggctatttccttttgcttctggattgtaacatggcacgtcctagtggtatggcccttgccttctccacagaacaagcaaaacagtctccttggctgatctccgaatcttccgccgaagcccctggcgcctctacctcttggagctggtggccggaaggaagtttgt

SEQ ID NO: 982 - DNA, 294 bp, Zea mays
gcttgaggttgacttgccgaagctacagaagctgcagggtggttgtctatgtattgtgggatataaggcggatgatacgaagcagtatgcatgacctgcttcggctgagcttgttgagatgcagcttcggctatttccttttgcttctggattgtaacatggcacgtcctagtggtatggcccttgccttctccacagaacaagcaaaacagtctccttggctgatcttcgaatcttccgccgaagcccctggcgcctctgcctcttggagctggtggccggaaggaagtttgt

SEQ ID NO: 983 - DNA, 294 bp, Zea mays
gctggaggttgacttgccgaagctacagaagccgcagggtggttgtctatgtattgtgggacataaggcggatgaaacgaagcagtatgcataacctgcttcgactgagcttgttgagatgcagcttcggctagttccttttgcttctggattgtaacatggcacgtcctagtggtgtggcccttgccctctccacagaataggcaaaacagtctccttggctgatctccgaatcttccgccgaagcccctggcgcctctgcctcttggagctggtggccgaaaggaagtttgt

SEQ ID NO: 984 - DNA, 294 bp, Zea mays
gcttgaggttgacttgccgaagctacggaagccgcagggtggttgtctatgtattgtgggacataaggcggatgaaacgaagcagtatgcataacctgcttcgactgagcttgttgagatgcagcttcggctagttccttttgcttctggattgtaacatggcacgtcctagtggtgtggcccttgccctctccacagaataggcaaaacagtctccttggctgatctccgaatcttccgccgaagcccctggcgcctctgcctcttggagctggtggccgaaagaaagtttgt

SEQ ID NO: 985 - DNA, 294 bp, Zea mays
gcttgaggttgacttgccgaagctacagaagccgcagggtggttgtctatgtattgtgggacataaggcggatgaaacgaagcagtatgcataacctgcttcgactgagcttgttgagatgcagcttcggctagttccttttgcttctggattgtaacatggcacgtcctagtggtgtggcccttgccctctccacagaataggcaaaacagtctccttggctgatctccgaatcttccgccgaagcccctggcgcctctgcctcttggagctgatggccgaaaggaagtttgt

SEQ ID NO: 986 - DNA, 247 bp, Zea mays
cgataagagtctgtccagatagccaaggatgacttgcctgtggcctcttggcatggcggcggctcgagctcattaaacaaccttgtgcacgtttgatttgctctctccctgtggcctcgatcacaggcagtctccttggctagtccggacgtctcttatctgaaactaattcacgattcattcataaacatatatcgatgagcgtgcgagggaagcaggcagtgcagctactaggtgttgggttgat

SEQ ID NO: 987 - DNA, 233 bp, Zea mays
acttgcctgtggcctccatcagtcgcagaggacgctgttcttctgcttgtggttgtcgatcgcaggcagtctccttggctagcccgagcggctctcatccaccatgccaggctcgtctcttctatttcttcaacccgactcgttcacgccggtaatcaaagaacatctagtttttttttgtctatgggcttgtttggaagcactgagaaactgatttatgaaaattaagttgg

SEQ ID NO: 988 - DNA, 249 bp, Zea mays
tccatgtattgtgggatataaggcagatgatacgaggcggtatgcatgacctgcttcggctgagcttgttgagatgcagcttcggctatttccttttgcttctggattgtaacatggcacgtcctagtggtatggcccttgccttctccacagaacaagcaaaacagtctccttggctgatctccgaatcttccgccgaagcccctggcgcctctgcctcttggagctggtggccggaaggaagtttgt

SEQ ID NO: 989 - DNA, 211 bp, Zea mays
agtctgagctcccaacaagagactgcacatatgtgggttcatcatcaatcaattgcacattgtctctaacatctctatcatgttgcagcttctctctttttttttgaattgctgattccaaatctttcttgcacttggccttaacatcatcactcactttcttgcactttgcaacagcactaccaacatgaccaagatgctgtttgaacct

SEQ ID NO: 990 - DNA, 513 bp, Zea mays
aggtgctctcaatttggtatgggccgcaacaagcagatgggccttcgaggacgcatgcactttgtatttgcaagctaaacttagtaccacatcgaccactgaattgtgcagacacatgtttataagtttttgtgcggaacatcttgtgtattcttacctgaccattgttgtcaccccaaatagcaggcttttttggtcaaatgcgcggtgcacgaagacaaggaccccacatgcaagaccaggggtgtgggacccacctgtcagacgttgtacgacagggtgtgggcagaaccttgatgggaatggagaacaagccaacggggatgggaatgggaatggagaacaggccagtggtgtggggaccccacatgtcagacgttgtacggctagggtgtgtgggcagaaccaggatgagaatgggaatgagaacgtgaatagcagaaaaccaagatggaatgggaatgacagaaacaggaatagggcagcctaccccttagagtcttaataggtagt

SEQ ID NO: 991 - DNA, 238 bp, Zea mays
gatggtctggtcttaaggcggtgctcccttcacaccaataaacggtcgatctgatgggtggtacagctgctcgttcatggttcccactgtcccatctcatcagagagagagaagatcgtgagagagcgagagatgcttgagatgggcttgtggtttgcatgaccgaggagctgcctcgtccccttcgttgaccgctgtttggagtgaagggagctctgcatcttgctcccatgacttt

SEQ ID NO: 992 - DNA, 238 bp, Zea mays
gacggtctggtcttaaggcggtgctcccttcacaccaataaacggtcgatctgatgggtggtacagctgctcgttcatggttcccactgtcccatctcatcagagagagagaagatcatgagagagcgagagatgcttgagatgggcttgtggtttgcatgaccgaggagctgcctcgtccccttcgttgaccgctgtttggagtgaagggagctctgcatcttgctcccatgacttt

SEQ ID NO: 993 - DNA, 234 bp, Zea mays
gacggtctggtcttaaggcggtgctcccttcaaaccaataaacggtcgatctgatgggtggtacagctgctcgttcatggttcccactgtcccatctcatcagagagagagaagatcgtgagagagcgagagatgcttgagatgggcttgtggtttgcatgaccgaggagctgcctcgtccccttcgttgaccgctgtttggattgaagggagctctgcatcttgctcccatga

SEQ ID NO: 994 - DNA, 234 bp, Zea mays
gacggtctggtcttaaggcggtgctcccttcaaaccaataaacggtcgatctgatgggtggtacaactgctcgttcatggttcccactgtcccatctcatcagagagagagaagatcgtgagagagcgagagatgcttgagatgggcttgtggtttgcatgaccgaggagctgcatcgtccccttcgttgaccgctgtttggattgaagggagctctgcatcttgctcccatga

SEQ ID NO: 995 - DNA, 216 bp, Zea mays
gacggtctggtcttaaggcggtgctcccttcaaaccaataaacggtcgatctgatgggtggtacagctgctcgttcatggttcccactgtcccatctcatcagagagagagagagatgcttgagatgggcttgtggtttgcatgaccgaggagctgcacgtccccttcgttgaccgctgtttggattgaagggagctctgcatcttggtcccaaga

SEQ ID NO: 996 - DNA, 424 bp, Zea mays
catgctaatcttctgtccatacatgagatagaggggcccccagatggtgatccaatggctcagatttgctggtgagatctatataagcccaccaaccgttaggcgatcgttcacaactccatatagctagttcatgtgcgcttctacaagctagcaaagacgagtgagtttatcatgctatgggaagaatggagagccacgaggaggaagaagaagatgccgatcgatcgaagagctcccttcgatccaatccaggagggaaagtggtcggctgcagctgccggttcatggatacctctctggtgcagcaatggccgagatgctcacctgcacttgcatgggtgtgcatgacccgggagacgaaccgaccatcatctttccctcgtgcttggattgaagggagctcctctctctctctctctct

SEQ ID NO: 997 - DNA, 214 bp, Zea mays
tggtcgccggccggatggaagagagcgtccttcagtccactcaggggcggtgctagggtcggattagctgccgactcattcacccacatgccaagcaaacggccatggaaacgagcttcgcagatgagtgaatgaagcgggaggtaaaagcttcgatctcgcaccgtctttgcttggactgaagggtgctccctccgatcctttccttgtttac

SEQ ID NO: 998 - DNA, 218 bp, Zea mays
ggtttatggcttctgtggaagagagctctcttcagtccactctaaaatggctgtagggtttcattagctgccgactcatccattcacctgccaagaaccatgggcaagcggtaggtctggtcttggtagccgagtgggtggcgcgggagctaaaatcaaactctacgctgtttacggttggactgaagggtgctcccttcaatttgcccaaacactcc

SEQ ID NO: 999 - DNA, 460 bp, Zea mays
gatgctttgggtttgaagcggagctcctatcattccaatgaagggtcgttccgaagggctggttccgctgctcgttcatggttcccactatcctatctcatcatgtgtatatatgtaatccatgggggagggtttctctcgtctttgagataggcttgtggtttgcatgaccgaggagctgcaccgcccccttgctggccgctctttggattgaagggagctctgcatcctgatccacccctccatttttttttgcttgttgcgtccttcctgggacctgagatccgaggctcgtggtggctcactgtagcctcgctacactgttttcttctcctctcctgtgctatttgctgtttctcctaagattctttaggccgtgcttatccgtgctggagtttaacgaagcagcacgttgctgctgctggtgctgccctcatgccctggtggtcgactggtatcg

SEQ ID NO: 1000 - DNA, 243 bp, Zea mays
cgcgacacacgcgcccgcacgtatagcagcgggctttaggtctcttgggccaacactccctcaaaaagctagcccttttaaggggttgcaccctcaaccttataaaccatgctatcacattctcaccacacaatatgagactattcccaacaatctccccctcacacattgtgagccgagattttatctgagaatgcactgggccaacctggctctgataccaagtgttggaaccggactgcc

SEQ ID NO: 1001 - DNA, 241 bp, Zea mays
cgcgacacacgcgcccgcacgtatagcagcgggctttaggtctcttgggccaacactcccccaaaaagctagcctgtcagagggttgcgcccttaaccttataaaccatgctatcacactctcaccacacaatgtgggactattcccaacaatctccccctcacacattgtgagccgagatttgtctgagaatgcactgggccaacctggctctgataccaattgttggaaccggactgcc

SEQ ID NO: 1002 - DNA, 409 bp, Zea mays
cgcgacacacgcgcccgcacgtatagcagcgggctttaggtctcttgggccaacactccccccaaaaagctagcctaatagggggttgcaccgtcaaccatataaaccatgctatctcaccatcaccacacaatgtggtactattcccaacaatctccccctcacacattgtgagccgagatttgtctgagaatgcactgggccaacctggctctgataccaattgttggaaccggaccggctgacacatgacgtgtccgttggggccgcccgcactgagagcacctagagggggggtgaataggtgatcctgtagaacttcaaaaacttaagccacaaaacttggttaattgttagcacagtaatttgccaagtggatagagaaggatctcaacaccaacacaataac

SEQ ID NO: 1003 - DNA, 187 bp, Zea mays
gtgggttgggtttgatcggagacagggacgaggcagagcatgggtagggggccatcaacagaattccaaatttgatttctgtttgctcgctcacaaaatggagggactcaccacaaacacactcaggcgttgttgctccctcccctgcactgcctcttccctggctcctcaccgtctcccatccacc

SEQ ID NO: 1004 - DNA, 208 bp, Zea mays
gaactctaagcaccagatatttggcattctgtccacctccttccagaggagagtcatcttctgcaactcccaaatgcagacacaggtcgctgcatttttgcacagcagacccaccagcataacccttccctggaactcggcaagtgtgtggtcggtcagatgcggtggcagtgggatggcaaattgcctccaaatcccagtgcttaca

SEQ ID NO: 1005 - DNA, 277 bp, Zea mays
ttacgacagctgatgacgtcgaagaagaagaagaagaaacttattttgatgatcgggagcagtttgtcccgcctccgtatcacggggatccgggccaatcgtcctcttatcctccgccccaggatccctctggcagtgctcctcccccggcccaatctggggaggaacactttgcctctgacctggcgaaccacctctttgctcctcatcatcctcctccccactggtgatcattggattggcgcttctctctctctttttggttcttgttgccaaa

SEQ ID NO: 1006 - DNA, 324 bp, Zea mays
agactgtcagcctcgaattagaagaagaagaagaagaagaagaacacggtcgtatgagcatttcgggggcgtttggttgccttctccggtggtgcagctgcatctacacatgcaaaaagtagtgtttgtttggttcgttgtatcgcacgagacaggctagcacggaacttaaagcgccgcgagccagcccggcagaaacgcatcgcgcggccgcacgcgcgcggccaggctccgctcagccagctctttactcgtgcacgcatatcgagacacgtttttaattggttttttcattatatcgtctaattaaaagatttaatcacc

SEQ ID NO: 1007 - DNA, 354 bp, Zea mays
agccgcttgcaattaagaacctggccccatttctctccaccaaaccagccgacaaacctaccgtctttttgcttatttgcatgcaccggtcacaaaagatgcgcaggcgaggcgtgcccgatggagaagaagggcacatgcacgcacgcatcgatcggccggctggcctggctttgcttcgtggagctacagttagccggtcgatcggccagcgcgggcgccggcgcggcggacctgctttccgtgtcacgcgctcagctcgccgcgccggcgatgcgtgagtcggcgccagaccgtcgatggaacgaatgaattcacacgtgccctgcttctccacctcgcgcacctcgccat

SEQ ID NO: 1008 - DNA, 239 bp, Zea mays
gatgaggagcctatctcccttagccaagaatggcttgcctatctccattatttggtccatcttcttgggagacctccctcatggtgtggatggaatgtggatggtggcaggccttctggctaagtgagtgattctcttccgcaatgctaggctgcttgccctctttctagttctcagctttcctttcatgtcaaagaagatgagttagaagaagctcagggttctaagctgtacaggtc

SEQ ID NO: 1009 - DNA, 294 bp, Zea mays
gcttgaggttgacttgccgaagctacagaagccgcagggtggttgtctatgtattgtgggacataaggcggatgaaacgaagcagtatgcaaaacctgcttcgactgagcttgttgagatgcagcttcggctagttccttttgcttctggattgtaacatggcacgtcctagtggtgtggcccttgccctctccacagaataggcaaaacagtctccttggctgatctccgaatcttccgccgaagcccctggcgcctctgccttttggagctggtggccgaaaggaagtttgt

SEQ ID NO: 1010 - DNA, 294 bp, Zea mays
gcttgaggttgacttgccgaagctacagaagccgcagggtggttgtctatgtattgtgggacataaggcggatgaaacgaagcagtatgcaaaacctgcttcgactgagcttgttgagatgcagcttcggctagttccttttgcttctggattgtaacatggcacgtcctggtggtgtggcccttgccctctccacagaataggcaaaacagtctccttggctgatctccgaatcttccgccgaagcccctggcgcctctgcctcttggagctggtggccgaaaggaagtttgt

SEQ ID NO: 1011 - DNA, 294 bp, Zea mays
gcttgaggttgacttgccgaagctacagaagccgcagggtggttgtctatgtattgtgggacataaggcggatgaaacgaagcagtatacataacctgcttcgactgagcttgttgagatgcagcttcggctagttccttttgcttctggattgtaacatggcacgtcctagtggtgtggcccttgccctctccacagaataggcaaaacagtctccttggctgatctccgaatcttccgccgaagcccctggcgcctctgcctcttggagctggtggccgaaaggaagtttgt

SEQ ID NO: 1012 - DNA, 294 bp, Zea mays
gcttgaggttgacttgccgaagctacagaagccgcggggtggttgtctatgtattgtgggacataaggtggatgaaacgaagcagtatgcaaaacctgcttcgactgagcttgttgagatgcagcttcggctagttccttttgcttctggattgtaacatggcacgtcctagtggtgtggcccttgccctctccacagaataggcaaaacagtctccttggctgatctccgaatcttccgccgaagcccctggcgcctctgcctcttggagctggtggccgaaaggaagtttgt

SEQ ID NO: 1013 - DNA, 294 bp, Zea mays
gcttgaggttgacttgccgaagctacagaagccgcagggtggttgtctatgtattgtgggacataaggcggatgaaacgaagcagtatgcataacctgcttcgactgagcttgttgaggtgcagcttcggctagttccttttgcttctggattgtaacatggcacgtcctagtggtgtggcccttgccctctccacagaataggcaaaacagtctccttggctgatctccgaatcttccgccgaagcccctggcgcctctgcctcttggagctggtggccgaacactacaggaa

SEQ ID NO: 1014 - DNA, 294 bp, Zea mays
gcttgaggttgacttgccgaagctacagaagccgcagggtggttgtctatgtattgtgggacataaggcggatgaaacgaagcagtatgcataacctgcttcgactgagcttgttgagatacagcttcggctagttccttttgcttctggattgtaacatggcacgtcctagtggtgtggcccttaccctctccacagaataggcaaaacagtctccttggctgatctccgaatcttccgccgaagcccctggcgcctctgcctcttggagctggtggccgaaaggaagtttgt

SEQ ID NO: 1015 - DNA, 294 bp, Zea mays
gcttgaggttgacttgccgaagctacagaagccgcagggtggttgtctatgtattgtgggacataaggcggatgaaacgaagcagtatgcaaaacctgcttcgactgagcttgttgagatgcagcttcagctagttccttttgcttctggattgtaacatggcacgtcctagtggtgtggcccttgccctctccacagaataggcaaaacagtctccttggctgatctccgaatcttccgccgaagcccctggcgcctctgcctcttggagctggtggccgaaaagaagtttgt

SEQ ID NO: 1016 - DNA, 152 bp, Zea mays
aggctcggggactacggtgcagccaaggatgacttgccgatctatcgtcgatcaacgagcgacgcctctgatgtctgatctcgacatctatcgtcgtcagaccatcatcatctatcggcaagttgttcttggctacaccgtggctcctgctc

SEQ ID NO: 1017 - DNA, 105 bp, Zea mays
acacaaccgagctcggcgccaagatctgtggcgccgagctcggttccacgtcgacgccacgtcgtccgggttgtgccgacgcatcacgtacctcggcgccataac

SEQ ID NO: 1018 - DNA, 298 bp, Zea mays
ggaattcgtagctcggcgccgagatctgtggcgccgagctacaaggccgcgccggcaccacgtcagcgctaggactgggcaaaaaacccgttacccgctacccgaacccgaaatacccgaacccgaacccgtaatgtcgggtacccgaaatttgtttgggaaattcgggtactaacttgtgaaacccgaaattattctgggtaattcgggtagcacctaccggtacccgaacaacccatacccgaaatttacaacggctgcccgcggccatcacaatcacacgaaacacaacggctgg

SEQ ID NO: 1019 - DNA, 124 bp, Zea mays
acacaaccgagctcggcgccaagatctgtggcgccgagctcggtgccacgtcgacgccacgcgtctgggttgtgccaacgcaacaagacctcggcgccatagcctatggcgcctagctgtgtta

SEQ ID NO: 1020 - DNA, 207 bp, Zea mays
caaccttagggtataaaatcttgtgctccaccaactgaactagattgctttgtgctctttctttataacgaaactgttaataacacaatcgagctcggcgccaagatctgtggcgccgagctcggtgccacgtcaacgccacggcgttcgggttgtgccaacgcagcacgtacctcggcgccataacctatggcgccgagctatgtt

SEQ ID NO: 1021 - DNA, 207 bp, Zea mays
caaccttaaggtataaaatcttgtgctccaccaactgaactagattgctttgtgctctttctttataacgaaactgttaataacacaatcgagctcggcgccaagatctgtggcgccgagctcggtgccacgtcaacgccacggcgttcgggttgtgccaacgcagcacgtacctcggcgccataacctatggcgccgagctatgtt

SEQ ID NO: 1022 - DNA, 207 bp, Zea mays
caacctcatggtttaaaaccttgtgctccaccaactaaactagatagctttgtgctatgtctttgcaacaaaatagttaataacacaaccgtgctcggcgccaagatctgtggcgccgagctcggtgccacgtcaacgccacagcgttcgggttgtgccaacgcagcacgtacctcggcgccataacctatggtgccgagctgtgtt

SEQ ID NO: 1023 - DNA, 105 bp, Zea mays
tcggatcctagctcggcaccaagatctgtggcgccgagctatgtgtcacgtcggcgccgtatcagcccttgcgtgccagcgagtcaggtatctcggtgtcataag

SEQ ID NO: 1024 - DNA, 364 bp, Zea mays
ggcgagggagagctcgggcgtggcggcgctacggcggctcggccgtgccggcaaaggggcggtgagggagcagccgtgcctgggagccgcctcggcgtggcggcgagggagcagccggcgagggagcggctccggcagaggggcggcgaggcagcggcggcgcggctcgggcggtgcggcgataacggcaacggagagaaaacagagagagtgggcagaaaacagcggtgaggaggtagccgcgcgatttcatcctagctcggcgccaagatctgtggcgccgagctaggtgtcacgcggcctgccacatcggcttcgccacgtcattgctcggcgccacactctatggcgccgacatgtgtta

SEQ ID NO: 1025 - DNA, 104 bp, Zea mays
acataaccaagctcggcgccaagatctgtggcgccgagctcgatgccacgtcaacgccacggcgtcgggttgtgccaacgcatcacgtacctcggcgccataac

SEQ ID NO: 1026 - DNA, 277 bp, Zea mays
ggcattcgtacctcggctccaagatctgtggcgccgagctacgaggccgcgccgccgccacgtcagagccaggtaagccctggacgcaactagccgttgcggccacgtcacagtcataggctgtgccgagctgtgttaccgcgcacgcctatggcgccgagcaaagggtccaaaactgcatttaaaatttttttaggtctaaacgtgaatttacttcagtttaggggctaaaatacaaaaaattcggtgccgtagacatcgcatggtgaggtcaagg

SEQ ID NO: 1027 - DNA, 127 bp, Zea mays
ttaattcctagctcgacgccaagatctgtggcgccgagctaggtgccacgcggacatccacgtcacccctgcccgccatggccacgtcacagctcggcgccataggctgtggcgccgagctgtgtta

SEQ ID NO: 1028 - DNA, 197 bp, Zea mays
ggaccataaggcgaggagccttgagctccaccaactaggctagacatgctttgtgcttagagctttccaacaaaactgttaaaacacaaccgagctcggcgccaagatctgtggcgccgagctcggtgccacggcgttcgggtgtgccagcgtagcacgtacctcgccgccataggctatggcgccgagctgtgtta

SEQ ID NO: 1029 - DNA, 346 bp, Zea mays
ctagcgagctcgggtggagctcgagcggccggagcgtggcgggggcgggcggagctcgagctcgggcggacctcgggcggcgagcgagctcgggcgaactcgggcggggctcgcggcggcgagccggagcgtggccggggcgggcgggcgccggcgagccggacctggggaaggcggcggcggtgatttcgaatgggtagaaagagaagaaacgcgcgcagagagaaggcagttttcggttttttcctagctcggcgccaagatctgtggcgccgagctaggtgccacgcgggactgcagcacgcgaaaagctcggggccacaagctgtggcgccgagctgtgtta

SEQ ID NO: 1030 - DNA, 193 bp, Zea mays
tcgaatggcgagcggcggcttgcgggcaaacagagaagaaacagagaagaaacggagaccccgcggttaagtcctagctcggcgccaagatctgtggcgccgagctaggcgccacgcggacgaccacgtcatcgctggcagccttggccacgtcatagctcggcgccacaggctatggcgtcgagctaagggt

SEQ ID NO: 1031 - DNA, 125 bp, Zea mays
acacaaccgagctcggcgccaagatctgtggcgccgagctcggttccacgtcgacgccacgcgtctgggttgtgccaacgcaacacgacctcggcgtaaatgtacgcatcaagtactcgaattac

SEQ ID NO: 1032 - DNA, 152 bp, Zea mays
agtgagcaaagaagagaaaatcgcgcagagagaacgcagtttgcgggtttttcctagctcggcgccaagatctgtggcgccgagctaggtgccacgcgggactgccacgtcacgaagctcggcgccataggctatggcgccgagctgtgtta

SEQ ID NO: 1033 - DNA, 107 bp, Zea mays
tgcattcgtagctcggcgccaagatctgtggcgccgagctacgaggccgcgccgccaccacgtcagagccaggtcagccctagatgcaactagccgttgctgccacg

SEQ ID NO: 1034 - DNA, 353 bp, Zea mays
gggcggcggcggcggcgaactccgggcggccgagctcgcgagccggggcggcggcggcaaaatccgttggcggggcggggatctccgggcaggcagggagcggggcgggcggccggcggcgagccgggacggcggcgagccgggaacgggcggtgcggtcggagaagtgaacggcggcggtggtattttgcggtcggagaagtgaagcgaactgagaagaaacgcgcagagagaatgggagttcgcgggtatttcctagctcggcgccaagatctgtggcgccgagctaggtgccacgacgactgccacgtcaccgagctcggcgccataggctgtggcgccgagctgtgtta

SEQ ID NO: 1035 - DNA, 148 bp, Zea mays
ggaattcgtagctcggcgccaagatctgtggcgccgagctacgaggccgcgccgccaccacgtcagtgccaggtcagccctaggcgtaagcagccgttgctgccacgtcacagctcggcgccataggctgtggcgccgagctgtgtta

SEQ ID NO: 1036 - DNA, 150 bp, Zea mays
ggcatccgtagctcggcgccaagatctgtggcgccgagctacgaggccgcgtcgccaccacgtcgatgctaggtcagccctaggcgaaggtagccgttgctgccacgtcagaacctcggcgcccataggctgtggcgccgagctgtgtta

SEQ ID NO: 1037 - DNA, 125 bp, Zea mays
tgacttcctagttcggcgtcaagatctgtggcgccgacctagaggtcacgtcggcgccgcgtcagccctcgcttgccagcgaggcaggtatcttggcgccacagcatgtaatgtcgaaatgtgtt

SEQ ID NO: 1038 - DNA, 330 bp, Zea mays
aggcggctgcggcggcgaactccaggcggccgagctcgcgagccggggcggcggcggcgaaatccgttggcgagccggggcagggagctgggcgggcggccggcggcgagctccggacggtggcgagccgggacgacgaacgggcggtgcggtcgggaacggcggcggtgaagttttgcgcagagcgaactgagagaaacgcgcagagagaatgggatttcgcggatatttcctagctcggcgccaagatctgtggcgccgagctaggtaccacgacgactgccacgtcaccgagctcggcgccataggctatggcgccgagctgtgtta

SEQ ID NO: 1039 - DNA, 195 bp, Zea mays
tgggatgaaatgagctgctctcggccagccgcgtgggcgtttttataggaattcgtagctcggcgccaagatctgtggcgccgagctacgaggccgcgccgccaccacgtcagagccaggtcagccctgaacgaaactagccgttgctgccacgtcacagctcggcgccataggctgtggcgccgagctgtgtta

SEQ ID NO: 1040 - DNA, 148 bp, Zea mays
ggcattcgtagctcggcgccaagatctgtggcgccgagctacgaggccgcgccgccaccacgtcagagccaggtaagccctggacgcaactagccgttgcggccacgtcacagctcggcgccataggctgtggcgccgagctgtgtta

SEQ ID NO: 1041 - DNA, 106 bp, Zea mays
ttatttcctagctcggcgccaagatctgtggcgccgagctaggtgccacggaggacagccacgtcacgaagctcggcgccacaggctgtggcgccgagctgtgtta

SEQ ID NO: 1042 - DNA, 360 bp, Zea mays
gagggagctccgcggcgagctcggcggccacggcgggcggggcgctctcggcgagctcggcgggcggcgggcggggcgctctcggcgagctcggcgggcggcgggcggggcgctctcggcgagcgctggcggcggcggcggcggtaggcgcggcggcggtcgtaggaaacggcggcagcgcgcgtagagcgagagaaacagagaacaaacgcagaggaaagggggttacggttaagtttcctagctcggcgccaagatctgtggcgccgagctaggtgccacgcggacatccacgtcatccctgcccgtcatgaccacgtcacagctcggcgccataggctgtggcgccgagctggctat

SEQ ID NO: 1043 - DNA, 148 bp, Zea mays
ggcatccgtagctcggcgccaagatctgtggcgccgagctacgaggccgcgtcgccaccatgtcgatgccaggtcagccctaggcgaaggtagccgttgctgccacgtcagacctcggcgccataggctgtggcgccgagctgtgtta

SEQ ID NO: 1044 - DNA, 160 bp, Zea mays
acacaaccgagctcggcgccaagatctgtggcgccgagctcggtgccacgtcggcgccacgacgttcgggtgtgccagcgtagcatgtacctcggtatcataggctatggcgccgagctgtgttacctcggcgccacagcctatggcgccgagcaaaggg

SEQ ID NO: 1045 - DNA, 125 bp, Zea mays
acacaaccgagctcggcgccaagatctgtggcgccgagctcggtgccacgtcagcgccacggcgttcgggtgtgccagcgtagcacgtacctcggcgccataggctatggcgccgagctgtgtta

SEQ ID NO: 1046 - DNA, 125 bp, Zea mays
acacaaccgagctcggcgccaagatctgtggcgccgagctcggtgccacgtcgacgccacgcgtccgggttgtgccaacgcaacacgtacctcggcgccatagcctatggcgccgagctgtgtta

SEQ ID NO: 1047 - DNA, 324 bp, Zea mays
tgggctcacataatcaatgttcggacaacagaactgcttgtcatagtcttcgtcgatgacagcacggtctccacaatcgcatcgaggcggtgagtccatccgtctttctgttgctacctccttctccgcatccgtcattggtggaggattcgaccagccgcgcgggcgtttttataggaatttgtagctcggcgccaagatctgtggcgccgagctacgaggccgcgccgccaccacgtcagagccaggtcaggcctggacgcaactagccgttgctgccacgtcacagcttggcgccataggctgtggcgccgagctgccaca

SEQ ID NO: 1048 - DNA, 147 bp, Zea mays
ggaattcgtagctcggcgccaagatctgtggcgccgagctacgaggccgcgccgccgccacgtcagagccaggtcagccctggacgcaactagccgttgcggccacgtcacagctcggcgccatatcctgtggcgccgagctgtgtt

SEQ ID NO: 1049 - DNA, 244 bp, Zea mays
ggctgcgggcggcggcgcgctcggcggcggctagctcgcggcggcggactggcggcggcgagcggcgaactcgcccgtaggaaaatgaagccgcgagcgaaacagagaagaaacgaagaggaaaggcgtttcggttaagttccctagctcgacgcccaagatctgtggcgccgagctaggtgtgccacgcgggctgccacgtcacgaagctcggcgccataggctatggcgccgagctgtgtta

SEQ ID NO: 1050 - DNA, 95 bp, Zea mays
ggaattcgtagctcggcgccaagatctgtggcgccgagctacgaggccgcgccgccgccacgtcagcgccaggtcagccctggacgcagctagct

SEQ ID NO: 1051 - DNA, 106 bp, Zea mays
ttttttcctagctcggcgccaagatctgtggcgccgagctaggtgccacgcggaactgccacgtcaggaagctcggcgccatagactgtggcgccgagctgtgtta

SEQ ID NO: 1052 - DNA, 127 bp, Zea mays
cttcgctggtgtgagagcttgaagctgccagcatgatctggctgctcaaacgccgccggcctcccaagtgctcgatcggtggcgcttcaccagatcatgttgcagcttcactctctcgcaaccagcg

SEQ ID NO: 1053 - DNA, 112 bp, Zea mays
ttgatcaatggaaagagcgatattggtgaggttcaatccgatgttaggttttacaaaagctgtaaaatcagtatctgattgagccgcgccaatatctcttcctccaatttgc

SEQ ID NO: 1054 - DNA, 123 bp, Zea mays
gaaatggaagtgtaactatggtgttggctcggctcactcagaagttgaagccgaatccaaatggtagctgccggcgtttctgattgagccgtgccaatatctcagtactctttcatgctgatc

SEQ ID NO: 1055 - DNA, 205 bp, Zea mays
ccaggaccgatatcttcttttcactaccgaaccgacccatagctgtagctgcacccagtgagtaacgtataatgttacgaacaaagagagtcgaacagagctaactctgagctatttgactactggcaccggcactattccttgggttgtattcccgtgggccaagggacagtctcaggtagacagtttctatggggcgtaggcc

SEQ ID NO: 1056 - DNA, 277 bp, Zea mays
atttatctatctcttgactcgaaatgggagcagagcaggtttaaaaaaggatcttagagtgtctagggttgggccaggagggtctcttaaccccttcttttttttgcctcttggagttatttcccaaggacttgtcgtggtaagggggagaagggggaagaagcacacttgaagagcacagtacaacggggagttgtatgctacgttcggaaggatgaatcgctcccgaaaaggagtctattgattctctcccaattggttggatcgtagaggcgat

SEQ ID NO: 1057 - DNA, 356 bp, Zea mays
cacgacacacgcgcccgcacgtatagcagcagtctttaggtctcttgggccaacactccccaaaaagctagcctattaggggttgcaccctcaaccttataaaccatactttctcactctcaccacacaatgtgggactattcctaacaatctccccctcacacattgtgagccgagatttgtctgagaatgcactgggtcaacctggctctgataccaattgttggaaccggaccgccgacacatggcgtgtccgtcggggccgcccgcacacacggcgcgcccacccaggctgttgggccgcgacacacgcgcccgcacgtatagcagcaggctttaggtctcttgggccaaca

SEQ ID NO: 1058 - DNA, 241 bp, Zea mays
cgcgacacacgcgctcgcacgtatagcagcgggctttaggtctcttgggccaacactcccccaaaaagctagcctatcagggggttgcaccctcaaccatataaaccatgctatcacaccctcaccacacaatgtgggactattcccaacaatctccccctcacacattgtgagccaagatttgtctgagaatgcactgggccaacctggctctgataccaattgttggaaccggaccgcc

SEQ ID NO: 1059 - DNA, 313 bp, Zea mays
ccaattgatctaatcaaaccgtgcatcaagtagatccatctcatgaacctagatccagacctaaaactacgcagaacctggctctgataccactgttggattacggggaggctacactagcgcaaaacaaaattttcaaccccataataccaagaactactgcggttataggtcatggagttaccactagacgcgcagagcagcggaagacgtctcgatgtagacgaacgcgtcgagcagtgccgtgcagtcgtcggcgtcctttacgtcctcgcacggttcgtcccagtgctccaaatgcagcacctccgag

SEQ ID NO: 1060 - DNA, 240 bp, Zea mays
cgcgacacacgcgcccgcccgtatagcagcgggctttaggtatcttgggccaacactcccccaaaaagctagcctgataggagttgcaccctcaaccatataaaccatgctttctcaccctcaccacacaatgtgggactattcccaataatctccccctcacacattgtgagccgagatttgtctgagaatgcactgggtcaacctggctctgataccaattgttggaaccggaccgcc

SEQ ID NO: 1061 - DNA, 238 bp, Zea mays
cgcgacacacgcggccgcacgtatagcagcgggctttaggtctctgggccaacactcccccaaaaagctagccttataggggttgcaccctcaaccttataaaccatgctttcacactctcacagacaatgtgggactattcccaacaatctccccctcacacattgtgagccgagatttgtctgagaatgcactgggccaacctggctctgataccaattgagagcacctagagggg

SEQ ID NO: 1062 - DNA, 239 bp, Zea mays
cgcgacacacgcgcccgcacgtatagcagcgggctttaggtctcttgggccaacactccccaaaaagctagcctaataggggttgcaccctcaaccatataaaccatgctatcatattctcaccacacaatgtgggactattcctaacaatctccccttcacacattgtgagccgagatttgtctgagaatgcactgggccaacctggctctgataccaattgttggaaccggaccacc

SEQ ID NO: 1063 - DNA, 381 bp, Zea mays
gtgcgcagttagccccgatggtgattccagccggtaggggcaagtcacgcacataacagagaaggacgaactaatctcttcagtcatatccgatgtaatctacttcaaccctttataaccaaatgatctaatcaaaccgtgcattaagtagatccatctcatgaacctagatccagacctaaaactacgcagaacctggctctgataccactgtaggattacggggaggctacgctagcgcaaaacaaaattttcaaccccataataccaagaactactgcggttataggtcatggaattaccactagacgcgcagagcagcggaagatgtctcgatgtagacgaacgcgtcgagcagtgtcgtgcagtcgtcggcgtcct

SEQ ID NO: 1064 - DNA, 138 bp, Zea mays
gatggccttctttgtgatcttccacagctttcttgaactgcatctctcagaggagcggcagcttcaactcctccacccgcatcagcaggtgcatgcagttcaataaagctgtgggaaactgcagagagaggccagcag

SEQ ID NO: 1065 - DNA, 113 bp, Zea mays
cctggctgtagcagcagcggtggaaggggcatgcagaggagcacgaacgaggtgtggttggcccctcgttagctctcctgtgcctgcctcttccattccttctgctacgctat

SEQ ID NO: 1066 - DNA, 160 bp, Zea mays
gcgagaaagagagtgggatgcagccaaggatgacttgccgggtattttgagcatgcatgttacaggggagcatatgcaatctgtttggaattttgagcccataccgtgcggtgcctgtcttccggcaagttgtccttggctacatcttgttctttttctc

SEQ ID NO: 1067 - DNA, 250 bp, Zea mays
ggcaagaaatctaagcctaagcccctacctagctcaccaaatgttggactaagaacaagccaatggcataggatttggcgctagaaggagggcacgagggaacacaagggttagagtggttcgggttgctagagcgtaataccctacatccactatgagttgtattgcctgggagtctctgtgtttgtcagtgttcgttagagaagccttagttggccctctacgagaccgagttctatcgtgtgtgtgc

SEQ ID NO: 1068 - DNA, 495 bp, Zea mays
tgctcgcttggcccacgggtttgcggcattcttctccatgtgccggaacattgctgcggatgtccatgaggtggctcgacgtcagcgggagactgacgacaaccttcgtcgtcaggcttcctctttgggtactcccttcgccccccgctctcctgatgtacctctccatcctcctcctctgtagatcaatgagtggtaccagcaggcatacagggtgccttttacgacagctgatgatgtcgaagaagaagaagaagaagaagaagcttattttgatgatcgtgagcagtttgtcccgcctccgtatcccggggatccgggccaatcgtcctcttaccctccgccctaggatccttctggcagtgctcctcagtctagggaggaacactttgcctctgacctggcgcaccacctctttgctcctcatcatcctcctcccaactggtgatcattggattggcgtctctctctctctttttggttcttgttgccaaa

SEQ ID NO: 1069 - DNA, 216 bp, Zea mays
gcagctagctgaagacagttgtaggcagctctcctctggcaggcaggcgcgcggtcatcgtcgccatcgacgacggttgcttggctctgctatgctgtgttcgttcgtccatggtgtgctagctagccgtgcatgcattgcagtgtaacatgcgtgcatgcacgcgcgtacgtcctgccaaaggagagttgccctgcgactgtcttcagctcgaac

SEQ ID NO: 1070 - DNA, 296 bp, Zea mays
cggccgaccccgaggagccgctggagatgaaggagccggatggcgacttctacgaggcgcagttggaggagttcgcggccgcggaggaggacgcgaggaggaacggcgtgcggatgaggatgatggacgtgaccaagatgatgctgcgccggccagacgggcaccccgacaggtacggccatggccaaggcgagcacgaaggcttcgacatcgactgcctgcactggtgtctgccgggaccgatcgatgtgtggaacgagctgctgcttcagatcctggccggccattattagatt

SEQ ID NO: 1071 - DNA, 120 bp, Zea mays
acttagggtagagctggaactttggattgaagggagctcgactggataaccactggcaatggcactaccagtaggcaccgactcactccttgccaatacatagttcaaatcagtggaaca

SEQ ID NO: 1072 - DNA, 294 bp, Zea mays
gcttgaggttgacttgccgaagctacagaagccgcagggtggttgtctatgtattgtgggacataaggcggatgaaacgaagtagtatgcataacctgcttcgaccgagcttgttgagatgcagcttcggctagttccttttgcttctggattgtaacatggcacgtcctagtggtgtggcccttgccctctccacagaataggcaaaacagtctccttggctgatctccgaatcttccgccgaagcccctggcgcctctgcctcttggagctggtggccgaaagaaagtttgt

SEQ ID NO: 1073 - DNA, 294 bp, Zea mays
gcttgaggttgacttgccgaagctacagaagccgcagggtggttgtctatgtattgtgggacataaggcggatgaaacgaagcggtatgcataacctgcttcgactgagcttgttgaggtgcagcttcggctagttccttttgcttctggattgtaacatggcacgtcctagtggtgtggcccttgccctctccacagaataggcaaaacagtctccttggctgatctccgaatcttccgccgaagcccctggcgcctctgcctcttggagctggtggccgaaaggaagtttgt

SEQ ID NO: 1074 - DNA, 294 bp, Zea mays
gcttgaagttgacttgccgaagctacagaagccgcagggtggttgtctatgtattgtgggacataaggcggatgaaacgaagcagtatgcaaaacctgcttcgactgagcttgttgagatgcagcttcggctagttccttttgcttctggattgtaacatggcacgtcctagtggtgtggcccttgccctctccacagaataggcaaaacagtctccttggctgatctccgaatcttccgccgaagcccctggcgcctctgcctcttggagctggtggccgaaaggaagtttgt

SEQ ID NO: 1075 - DNA, 294 bp, Zea mays
gcttgaggttgacttgccgaagctacagaagccgcagggtggttgtctatgtattgtgggacataaggcggatgaaacgaagcagtatgcaaaacctgcttcgactgagcttgttgagatgcagcttcggctagttccttttgcttctggattgtaacatggcacgtcctagtggtgtggcccttgccctctccacagaataggcaaaacagtctccttggctgatctccgaatcttccgccgaagcccctggcgcctctgcctcttggagctggtggccgaaaggacgtttgt

SEQ ID NO: 1076 - DNA, 281 bp, Zea mays
tgacttgccgaagctacagaagcgcagggtggtgtctatgtatgtgggacataaggcggatgaaacgaagcagtatgcaaaacctgcttcgactgagcttgttgagatgcagcttcggctagttccttttgcttctggattgtaacatggcacgtcctagtggtgtggcccttgccctctccacagaataggcaaacagtctccttggctgatctccgaatcttccgccgaagcccctggcgcctctgcctcttggagctggtggccgaaaggaagtttgt

SEQ ID NO: 1077 - DNA, 294 bp, Zea mays
gcttgaggttgacttgccgaagctacagaagccgcagggtggttgtctatgtattgtgggacataaggcggatgaaacgaagcagtatgcaaaacctgcttcgactgagcttgttgagatgcagcttcggctagttccttttgcttctggattgtaacatggcacgtcctagtggtgtggcccttgccctctccacagaatagacaaaacagtctccttggctgatctccgaatcttccgccgaagcccctggcgcctctgcctcttggagctggtggccgaaaggaagtttgt

SEQ ID NO: 1078 - DNA, 295 bp, Zea mays
gcttggggttgacttgccgaagctacagaagccgcagggtggttgtctatgtattgtgggacataaggcggatgaaacgaagcagtatgcataacctgcttcgactgagcttgttgagatgcagcttcggctagttccttttgcttctggattgtaacatggcacgtcctagtggtgtggcccttgccctctccacagaataggcaaaacagtctccttggctgatctccgaatcttccgccgaagccccctggcgcctctgcctcttggagctggtggccgaaagaaagtttgt

SEQ ID NO: 1079 - DNA, 294 bp, Zea mays
gcttgaggttgacttgccgaagctacagaggccgcagggtggttgtctatgtattgtgggacataaggcggatgaaacgaagcagtatgcaaaacctgcttcgactgagcttgttgagatgcagcttcggctagttccttttgcttctggattgtaacatggcacgtcctagtggtgtggcccttgccctctccacagaataggcaaaacagtctccttggctgatctccgaatcttccgccgaagcccctggcgcctctgcctcttggagctggtggccgaaaggaagtttgt

SEQ ID NO: 1080 - DNA, 294 bp, Zea mays
gcttgaggttgacttgccgaagctacagaagccgcagggtggttgtctatgtattgtgggacataaggcggatgaaacgaagcagtatgcataacctgcttcgactgagcttgctgaggtgcagcttcggctagttccttttgcttctggattgtaacatggcacgtcctagtggtgtggcccttgccctctccacagaataggcaaaacagtctccttggctgatctccgaatcttccgccgaagcccctggcgcctctgcctcttggagctggtggccgaaagaaagtttgt

SEQ ID NO: 1081 - DNA, 125 bp, Zea mays
acacaaccgagctcggcgccaagatctgtggcgccgagctcgctgccacgtcgacgccacgcgtccgggttgtgccaacgcagcacgtacctcggcgccatagcctatggcgccgagctgtgtta

SEQ ID NO: 1082 - DNA, 125 bp, Zea mays
acacaaccgagctcggcgccaagatctgtggcgccgagctcgctgccacgtcgacgccacgcgtccaggttgtgccaacgcagcacgtacctcggcgccatagcctatggcgccgagctgtggta

SEQ ID NO: 1083 - DNA, 124 bp, Zea mays
acacaaccgagctcggcgccaagatctgtggcgccgagctcggttccacgtcgacgccacgcgtctgggttgtgccaacgcaacacgacctcggcgccatagcctctgtgttagctcggcgcca

SEQ ID NO: 1084 - DNA, 111 bp, Zea mays
ttacaaccaagctcggcgccaagatctgtggcgccgagctcggtgccatgtcgacgccacggcgtccgagttgtgccagcgcagcaggtacctcggcgccataggctatga

SEQ ID NO: 1085 - DNA, 148 bp, Zea mays
ggaattcgtagctcggcgccaagatctgtggcgccgagctacgagggcgcgccgccgccacgtcagagccaggtcagccctggacgcaactagccgttgcggtcacgtcatagctcgacgccataggctgtggcgccgagctgtgtta

SEQ ID NO: 1086 - DNA, 172 bp, Zea mays
ggcgtaggaaacgaaaacggtcgagcgaaacagagaagaaacgaagaggaaagggggtttcggttaagtttcctagctcggcgccaagatctgtggcgccgagctaggtgtgccacgcgggctgccacgtcatgaagctcggcgccatatgctatggcgccgagctgtgtta

SEQ ID NO: 1087 - DNA, 377 bp, Zea mays
taacacagctcggcgccctagcctatggcgccgaggtacgtgctacgctggcatacctagacgtcgtggcgtcgacgtggcaccgagctcggcgccacagatcttggcgccgagctcggttgtgttattaacatatttgttgcagacatgagcacaaagcacagctagcccacttggtggagcacaaagcttctaaccttgtggttgtgggttcaaaccccacagtttgcatttttatttgtttttctttttgtttatgtcgctggtgtgtccgttcaaatttatttctcacctatattttttttatctttgtcactactcatttttttaaataactcattaggtatggcgccaagatctgtggcgccgagctcggt

SEQ ID NO: 1088 - DNA, 287 bp, Zea mays
gctgcgggcgggcggcacgctcggcgggcgcgctcggcgggctgcgggcgggcggcgagctcggcggcggcgggctggcggcgagctcggcggcggcggcggtatgagcggcggcgggcgtaggaaacgaaagcggcgagcgaaacagagaagaaacgaagaggaaagggggtttcggttaagtttcctagctcggcgccaagatctgtggcgccgagctaggtgtgccacgcgggctgccacgtcatgaagctcggcgccatagccgatggcgccgagctgtgtta

SEQ ID NO: 1089 - DNA, 229 bp, Zea mays
tgagaggaaatgtgctgctctcgcccagcagcacggctgtttttataggcctccgtagctcggcgccaagatctgtggcgccgagctacgaggccgcatcggcgccacgtcagtgccatgtcagcactaggcgtgggtagccgttgctgccacgtcatacctcggcgccataggttgtgcgtcgagctgtgttacctcggcgccacagcctatggcgccgagtatcggg

SEQ ID NO: 1090 - DNA, 127 bp, Zea mays
ttaattcctagctcggcgccaagatctgtggcgccgagctaggtgccacgcggacatccacgttacccctgcccgccatggccacgtcacagctcggcgccataggctgtggcgccgagctatgtta

SEQ ID NO: 1091 - DNA, 294 bp, Zea mays
gcggcaggcgcgcggcgagctcggcagccgctgcctggcgcgctcggtgggcggggcgggcggcgcggcgatggaacggcggcgcggtcgctcggctatggcgaagaagaacgaaaacgacgggagcgagtggaaggaagaagaaacacggctcgactcggacgcttaagtcctagctcagcgccaagatctgtggcgccgagctaggcgccacgcggacatccacgtcatccatgcccgccatggccacgtcacagctcggcgcccataaggctgtggcgccgagctgtgtta

SEQ ID NO: 1092 - DNA, 200 bp, Zea mays
gatttataggccttcctagctcggcgccaagatctatggcgcctagctcgacactaagatctgtggcgccgaactaggaggccatgtcccacgtcagcgcctcgtcagccctcgccgctgttgccatgtcataccttggtgggctatagcgccgagctgtattgcctcggcgccacagtctatgacgtcgagtaaatggt

SEQ ID NO: 1093 - DNA, 105 bp, Zea mays
acacaaccgagctcggcgccaagatctgtggcgccgagctcggtgccacgtcgacgccacgacgtccgggttgtgccgacgcatcacgtacctcggcgccataac

SEQ ID NO: 1094 - DNA, 194 bp, Zea mays
tgagaggaattgtgctgctctcggccagcagcgcgactgttttataggcgtccgtagctcggcgccaagatctgtggcgccgagctacgaggccgcgtcgccgccacatcgatgacaggtcagccctgggcgcaggtagccgttgctgccacatcatacctcggcgccataggctgtggctccgagctgtgtta

SEQ ID NO: 1095 - DNA, 105 bp, Zea mays
gtatttcctagctcggcgccaagatctgtggcgccgagctaggtgccacgcggactgccacgtcacgaagctcggcgccataggctgtggcgccgagctgtgtta

SEQ ID NO: 1096 - DNA, 105 bp, Zea mays
ttatttcctagctcggcgccaagatctgtggcgccgagctaggtgccacgcaggctgccaggtaacgatgctcggcgccacaggctgtggcgccgagctgtgtta

SEQ ID NO: 1097 - DNA, 106 bp, Zea mays
gtttttcctagctcgacgccaagatctgtggcgccgagctaggtgccacgcgggactgccacgtcatgaagctcggtgccataggctatggcgccgagctgtgtta

SEQ ID NO: 1098 - DNA, 345 bp, Zea mays
cggctgagctcggacggagctcgggccgagctcgagggcggacctcgccgcggcgtgaatagggcggagctcgcggcggcgggcagcggagcttggggcggccggcgtgaagagctcgaggcggcgccggagaaggggcaagcggcggcggcgtgagctgtggacgtcgggcggcggcggcgggatttcgaatgagcagacaacacaagaaacacgcagagagaagggatgtttacggattttttcctagctcggcgccaagatctgtggcgccgagctaggtgccacgcaggacagccacgtcacgaagctcggcgccataggctgtggcgccaagatgtgtta

SEQ ID NO: 1099 - DNA, 96 bp, Zea mays
ttaagtcctagctcggcgccaagatctgtggcgccgagctaggtgccacgcccgcagccacgtcagcgccggcagccatggccacgtcaacactcg

SEQ ID NO: 1100 - DNA, 182 bp, Zea mays
tctatatttggaccttttactcggcgccacagcctacggcgcggaggtaacacaacttggcgcagtagactatgacgtcgagtaacttgcctcgctgacatcgagggctgacgcgacaccagcgtggcacctagcttgacaccaagatctgtggcgccgagctagaaagatctataaatcag

SEQ ID NO: 1101 - DNA, 126 bp, Zea mays
ttactctggagctcggcgccaagatctgtggcgccgagctccagtccacgtcggtgccgcgtcagctggtgggcgacagcgtggcaggtagctcggcgccaagatctatggcgccgagatgtgtaa

SEQ ID NO: 1102 - DNA, 92 bp, Zea mays
ggaattcgtagctcggcgccaagatctgtggcgccgagctacgaggccgcgccgccacgtcagcgccaggtcagccctggacgcagctagcc

SEQ ID NO: 1103 - DNA, 180 bp, Zea mays
tgctaacggcggcggtgggctcggcgcgaaaactgaagaacagacgaaacgggcagagagaaaggcgtcgagcggatatttcctagctcggcgccaagatctgtggcgccgagctaggtgccacgcgggatgacacatcacgaagctcggcgccataggctgtggcgccgagctgtgtta

SEQ ID NO: 1104 - DNA, 393 bp, Zea mays
tttcttataatttggatctgctattttggtatcaatctgttaggaataggtttacatagttacggttcatttacattaccatctaaataattacataacataaaaccttcggtttttttcctttttagtttgatttgagaaccctttgaaaagacgttcaaggggttctcaaaaattcgagatagatctaattagacttttttacttttttctgaattttttatttttccactctggaatatagagcggactggttaaaaaaagaaaatcctatttagtataataattggataatagaacctctaccctatcaacggatagcgagagaaccaaatctggataaataccaattcctattactggtaaaaagatacagattaaaagaaagagttc

SEQ ID NO: 1105 - DNA, 404 bp, Zea mays
cctcttttggattcttaagaccacccttgcagtaggataccgtctgctttaggttctttattatctccttcgaggggtttttaggatcattcaggctatatttagtctattttggcttttactgtctacttttctcagggagatggttaaggacctcagaagatagaggagagcgccaggcgcagatttccggaatacttctacggggaatgctcattcaatgagcattctccgtattatgccttgaagaggactcgaacctccacgctctttagcacgagattttgagtctcgcgtgtctaccatttcaccatcaaggcatcttgaaagtgaatcgtattccatgaatatgatatctatcgaatgtgatatatggaatatatgacaaaggtggagtcttggag

SEQ ID NO: 1106 - DNA, 408 bp, Zea mays
cctcttttggattcttaagaccacccttgcagtaggataccgtctgctttaggttctttattatctccttcgaggggttggtttttaggatcattcaggctatatttagtctattttggcttttactgtctacttttctcagggagatggttaaggacctcagaagatagaggagagcgccaggcgcagatttccggaatacttctacggggaatgctcattcaatgagcattctccgtattatgccttgaagaggactcgaacctccacgctctttagcacgagattttgagtctcgcgtgtctaccatttcaccatcaaggcatcttgaaagtgaatcgtattccatgaatatgatatctatcgaatgtgatatatggaatatatgacaaaggtggagtcttggag

SEQ ID NO: 1107 - DNA, 403 bp, Zea mays
cctctttggattcttaagaccacccttgcagtaggataccgtctgctttaggttctttattatctccttcgaggggtttttaggatcattcaggctatatttagtctattttggcttttactgtctacttttctcagggagatggttaaggacctcagaagatagaggagagcgccaggcgcagatttccggaatacttctacggggaatgctcattcaatgagcattctccgtattatgccttgaagaggactcgaacctccacgctctttagcacgagattttgagtctcgcgtgtctaccatttcaccatcaaggcatcttgaaagtgaatcgtattccatgaatatgatatctatcgaatgtgatatatggaatatatgacaaaggtggagtcttggag

SEQ ID NO: 1108 - DNA, 404 bp, Zea mays
cctcttttggattcttaagaccacccttgcagtaggataccgtctgctttaggttctttattatctccttcgaggggtttttaggatcattcaggctatatttagtatattttggcttttactgcctacttttctcagggagatggttaaggacctcagaagatagaggagagcgccaggcgcagatttccggaatacttctacggggaatgctcattcaatgagcattctccgtattatgccttgaagaggactcgaacctccacgctctttagcacgagattttgagtctcgcgtgtctaccatttcaccatcaaggcatcttgaaagtgaatcgtattccatgaatatgatatctatcgaatgtgatatatggaatatatgacaaaggtggagccttggag

SEQ ID NO: 1109 - DNA, 400 bp, Zea mays
cctcttttggatttcgaaacccttgcagtaggataccgtctgctttaggttctttattatctccttcgaggggtttttaggatcattcaggctatatttagtctattttggcttttactgtctacttttctcagggagatggttaaggacctcagaagatagaggagagcgccaggcgcagatttccggaatacttctacggggaatgctcattcaatgagcattctccgtattatgccttgaagaggactcgaacctccacgctctttagcacgagattttgagtctcgcgtgtctaccatttcaccatcaaggcatcttgaaagtgaatcgtattccatgaatatgatatctatcgaatgtgatatatggaatatatgacaaaggtggagtcttggag

SEQ ID NO: 1110 - DNA, 88 bp, Zea mays
cccgaacccgtcggctgctggtggaatgctcgagctgctcgcgcggcgagagcgggccgccgcgtgccggccgggggacggaccggga

SEQ ID NO: 1111 - DNA, 88 bp, Zea mays
cccgaacccgtcggctgctggcggaatgctcgagctgctcgcgcggcgagagcgggccgccgcgtgccggccgggggacggaccggga

SEQ ID NO: 1112 - DNA, 88 bp, Zea mays
cccgaacccgtcggctgctggcggaatgctcgagctgctcacgcggcgagagcgggccgccgcgtgccggccgggggacggaccggga

SEQ ID NO: 1113 - DNA, 88 bp, Zea mays
cccgaacccgtcggctgctggcggaatgctcgagctgctcgcgcggcgagagcgggccgccgcgtgccggccgggggacggaccagga

SEQ ID NO: 1114 - DNA, 88 bp, Zea mays
cccgaacccgtcggctgctggcggaatgctcgagctgctcgcgcggcgagagcgggccgccgcgtgccggccgggggacggcccggga

SEQ ID NO: 1115 - DNA, 88 bp, Zea mays
cccgaacccgtcggctgctggcggaatgctcgagctgctcgcgcggcgagagcgggccgccgcgtgccggccgggggacggatcggga

SEQ ID NO: 1116 - DNA, 88 bp, Zea mays
cccgaacccgtcggctgttggcggaatgctcgagctgctcgcgcggcgagagcgggccgccgcatgccggccgggggacggaccggga

SEQ ID NO: 1117 - DNA, 79 bp, Zea mays
aggcatcgggggcgcaacgcccctcgacctattctcaaactttaaataggtaggacggcgcggctgcttcggtgagccg

SEQ ID NO: 1118 - DNA, 162 bp, Zea mays
ttgagtaatgcctaagtcgcagcatcaaggtctgacccaaattgagcgaaggcggccacttcgcgatattgtgccaattccagttttgaactactgcagacttgtttcatagctttcaactgagcggcggacccaacgcgactgacggataagccaacgtta

SEQ ID NO: 1119 - DNA, 152 bp, Zea mays
ccttggtctgggggtttgtggggaatgttggctggctcgaggcatccgcgtcctggctcgcagtcgcagcgcagatcgtgttttgcctgctaccggccggacagatcgagaggcgtcggaccaggcttcattcctcgcaaaccggtgcatcc

SEQ ID NO: 1120 - DNA, 132 bp, Zea mays
tcatgctcggattgggttagggggattgttgtctggctcggtgtctccggtcgagacggccttgccggcgccggagctgtcgtcgaccggagatctcggaccaggcttcaatccctttaaccatgcggcatt

SEQ ID NO: 1121 - DNA, 164 bp, Zea mays
catgctcgggttaggtcagggggattgttgtctggctcggggtctccggtcgagatcgattcataacatatacgtacgtgcttctagccttgccggcggagctagtcgttgtcgtcgaccggagatttcggaccaggcttcaatccctttgaccatgcggcatt

SEQ ID NO: 1122 - DNA, 121 bp, Zea mays
tagctcagggtgcgaatcacagtgcagctctcctctggcatgaaggctgtgagagaggcatgacaatttctggccttgccctgccaaaggagagctgtcctgccattcattagccctgcaa

SEQ ID NO: 1123 - DNA, 128 bp, Zea mays
agctcagggtgagaatcacagtgcggctctcctatggcatgaaggcgcggctgagaggcacgaacagtttctggccttcccctgccaatgccaaaggagagctgccctgccattcgttagccctgcaa

SEQ ID NO: 1124 - DNA, 118 bp, Zea mays
cctaagggcagtagggatgagaacatgaaggaacgcgagtgctctgaatttctcgtctcgcacggaggacatgtgcactgtcgtgttcctgatgcctctcattcctatggttcttagg

SEQ ID NO: 1125 - DNA, 133 bp, Zea mays
ggaagaggaagtaaagatgatctaagagcagtgggcatgggaacatggaggaaggcctatgaggttgaaacctcattttgtgtcttcctaatgcctcccattcctatcgttcttaggtgatccttcctcttgc

SEQ ID NO: 1126 - DNA, 103 bp, Zea mays
ttttgtgttactaggagttacctacaagcacgtctcgataccttggcttaataaaggccagttgtgaagtgtttgggggaactcttggtatcatgaagcaatt

SEQ ID NO: 1127 - DNA, 3929 bp, Zea mays
agaaaaaccaaccgccaattctgttggtgggcctttcttacattattcaggtccaggtcacatgatgcacagacagcccgtccgacgccgcgttagctacttgcctacttcagctatatgaaacggcaaaagtcttcccctcgttccccaatctcctctccatcgaaaccctagcacgacgcaattcccgtcttcccacgccgtatcgccgttgctatgggcaagaagcggaagctcgagcccaaatcggcggcagggttcacgccggttaaggcctccccgaccaccaggtctgccaccgctaaggccgctggtctatccgaggtcctcgcccccgtcgaggctacgatggagaagctgccgcagggggcaggcggcgaggatgtagaggaaatcgaggaggtggaggtcgaggaggaagtggaagtggaagaggaagaagaaggcgagagcgaccaggcttcgatccaggcgctgctggattcgttccccaaggaccagctcgtcgagctgttacgcgacgctgccatcgctcacggcgacgtgctaaccaccatccggcgcgtggccgacgccgacccggctcagcggaagatcttcgtacacggcctcggctgggacaccacaaccgacaccctcaccgaggccttcggcccatacggcgagatagaggatctcaaggtcgtcaccgaccgcaacacgggcaagtgcaaggggtacgggttcatcctcttccgtcaccgctccggcgcccgagctgcactacgcgagccccagaagaagattggtaaccgcagcaccgcctgccagctcgcctctgttggccctgtccctggtggtgcgcccaacagcgctgcaccagccccggttcaattgcagttgccaccagtgtcagagtatacacaacgaaagatatttgtcagcaatgttggtgcagatatcgatccgcagaaattgcttcagttctttgcgaggtttggtgagatcgaggaaggcccgcttggtcttgacaaggtcactgggaaacccaagggatttgctctttttgtctacaagaccattgaaagtgccaagaaggctcttgaggagccacataagcattttgagggagtgatgctgcactgccagaaggcgattgatggaccaaagccgaacaaattaggaggagctggaggttttttcggtgctggagcttcaagtgggggcaaggggtttgctggttatggagctactagtcattctctgcccggaactgttggtattgtccagccaatgtcacctctggcacctggattggcttcattgcctggtggtatttctgctgccccaggtgtggatcctgctctggggcaggccttgacagctttgcttgccacccagcaggggggtgggctgagttttaatagcattctgggggtcggtgctaatggatcggggttgcctccgcaggggccaactggtgcattgggtggtagcagcgtgcaggggatgcaaggtggttatatgggtggctacggtggttctggtgggtatgggggtgcttcttcaggaggccctggaagacattacatgggtcattaggatgattataactattttactgtggccagaatgccagatgattctacatgttcctgcttggcacttataaacttgctgttttaagctgtttctggctactcaattatggctgtggtcaaagttttcataggaactttggttccctccacctatcatttcaaaacgaaattaccgtttagattttcaaaagggcatcttatggctgcaagactattgtagaagacttcatgtggatctaaagcattgtggtatttaatgatattactgtttttgtacggttttcaaaaggccaaattaaggcttgcaaaactattgtaaaagacttcctgtgggtttaaagcactgagctatttaatcacaacggttttgtttcatatgtatggtttttaaagaggcgattgtgtggcttgcaaggctgctgcaaaagattgtggatttttactatgtttctgttttcacttttttttacaataaacctgctgctatgtttagacataatttgtactctgcactgacaagtgtcattttagttgccatacttatttgcaggcaatgcaggtctatttgttcaggaaatcaatagtgcttttcagtatatttctaaagaaagttggatatttcttctatttatatataaagtaatacttcctagtttgcaaataatgtgctttatgttgataaaatgttgaagttgagaacgtttgctactccctcagccccaacaatgtgctgttttaggttcgagatgagtccagtgttcttaaggccgcgcataggtgagcaagcaaacaggtcaaccgccttagctcctaggtgagcaaggcggcaagatttctccgagcgtctggacacgcctaggcaacgccttaaaaaccctggacgagtcaaactttctttaaatataagtttagtgtgaaaatatatttcataacgagtctaatgatatttatttggtatcataaatgtttgtaatttttcatatagatttgttcgaaattctttttgcgatagggggagtagttcaagtaaaatatttgtttatggtatataatggtattgaaggagaggctactaagtatctgtctatttttcgttgctacttgctagggccttttgttgctggaatgatcttggtagcttatctttctcgtatctgaccgtactattgattacatatgtggcagatgcacactgctgtatactatctgactctctacattatcggcaaagaaaacctctgttttgttatgaatctcattgctttttagatgtgaatgttcattgctcatttgacatactcctttgccaaaactattttgttcttattcctttattgataacttacagcaatttatgcttaggtatagattgtgacattgtcatgttgccatttcattgttgcgtgtattcttgaatggtatacataattgttactttctgtaatataatatctttggaatatgattcgacattgttatctgtccgggaaatcaatagtgcttttcagtgtattgtgaccacagtttaacccttgtttaaaagcagttaaagaaagagttctggtgctggttgatagaattcatggccctgaagtggcagattaccatggtgcatggacgacccaatatcactttatttccttgttttaatgtcacggcaggccggttgaggtctcaagtttgcctttgagacaggtaagtacgaaatgcatacattagcaggtccaagtgatgcaaatagcagcagaaagctctcgagcttgttcgcttatgccgaaaaagggtatctacttattttgtctgtataaattagtataaattacagctgcaagcctgcaacagtctgaacagctggcttatagccgcacgtcatctgtaagagcaagtttaataatagagcctattattggctctaacttcttaccgtgtcatatagagccagcaataaacacactcatgtagtaaaactggctttaagattgactcttagatgaatttcttgtctcttatctcttttatccttttgtcttgaaacctgtgtagcacctaactcttgcatgagagctcactacctctattttttgatgtctctcttccacgtaagcaaaaatgacatgtaattagacttgagtccattattgtacttgctctaatttgtgaattcgtgagatgggagagttgcagtgatgtgctgtctcttcgtctcacggtgttgcccgcaaggagagagtggcaaggtagtgctgagacgtgggagcctgcgccctgcttcggaggctgtgcttcagcttcaaacgggtacacggaccgtaatcaaatgatgtatatgttgaattaggaaaggaacat

SEQ ID NO: 1128 - DNA, 1368 bp, Zea mays
cgtcctcctcttctccccgctaaagtttcaagtgtcaacgctccggcagtccaccaccgccacccacaggccacagcaccttataaagcttccttcagtctcaaaccttctcttcaaacccgatcggggacaatggcgagcgcgcccggcgaggtgccgtcccacttcctctgccccatctcgctgcagctcatgcgggaacccgtcacgttgcccaccggcatctcctacgaccgcgccgccatctcccgctggctggccacgcctgcgccggccggcggccgcacctgcccggtcacgcgcgtgccgctcccgccgcagccccagctcactcccaaccacaccctccgccgtctcatccacgcctggctcgcgtccctctcccccgaggcggaggtcaacgaggacgtggccgcgctgcgggggcccgtgcccggcgcggaggtggtcgtcgcgctgctgtccgacgccgccggggctcaggttgaggcgctcaagaggctgcgggagctggtggccgagtgcgaggacagcagggcggttctcgagtcccaggacggggtgttcgacgccttgtcccgcgtcgtgagcagtgccgacgcgtgctcgacggcgcgcgaggaggcggtcgggctgctcgcgtcgctccggatcccggagccggagctggccggcgtcgtggccaggcacagcaacctgggggatgcactcacggccgtcctccgctcgtcgaatctgaagtcgcgcgcgaacgccgctctgctcgttaggtccctctcggaagcggcgtggccggcctgggtcatcgggctgagccaggagcttctagcggaggttgtccgcgtggtccgcgaccgtgtctccacgcaggcgaccaaggcagcactgcacgccctcgcggcgctctgcccctacggcctgacccgcgtcaagatcgtgggcgtgggcgcggtgccggcgatcgtggacctcctgctcgacgaccccgagaggcgtgtcaacgagctcgcgcttgtggcgctggaccggttgtgtacgtgcgccgagggccgcgctgagctggtcgcgcacgcggcggggctggccgtggtgggcaagaaggcgctgcgggtgtcggagaccgcgagcgagcgggcggtgcgcgtgctgcgctccgtggcgcgtcacgcggccacgcctgccgtgctgcaggagatggtggagtccggcgtcgtggccaagctctgcgcggcgctgtggtcccagcagtgcgggttgaggaccaagcagaaggcgcatgaggtgctcaagctgcactccaggacctggaggagctcgccctgcctatctccaaaatttttggggctctacccatcatgaggtgctctg

SEQ ID NO: 1129 - DNA, 661 bp, Zea mays
gcttttcaacaagtctctcgccgccgtacgtggtcgatggccaccacccacgacgactgcgtctccctctgtctcatggcgctcgcagccgcgggaggcggaggaatgacgacgcagtcgtacgctccgagcacggctgcctggacgacgcaagagtgcgagctccgcttccggtgctccgtctgtggcaaggccttcgcgtcgcaccaggcgctgggcgggcacaaggccagccaccgcaagccgacgcacctacagacacagcaggcgtcgtcgtcgtcggtgacgacctcgtcggccggcagcggcggcgggcaggggaggcacaggtgctcggtgtgccatcggagcttcgcgacagggcaggcgctcggtgggcacaagaggtgccattactgggacgggctctcggtgtcgctcaccgcgtcggggtccgggtcgaccgtcaagggtttcgatctgaatttgatgccggcgacgaggtggggagaggaggaagaggtgcagagccccttgccgatcaagaagaggcggctgtccggcccgtccttggaccttagtttaacgatttagagtttccctctcatgcatgagttcatcatctggaatccccccccccccccccccccccccccctatcttcgttcgtactcagagctgg

SEQ ID NO: 1130 - DNA, 8185 bp, Zea mays
ccactgtccactggccttgtgggcggggtacttcggctctcttcggatacttctccggctcttctctctctctctctctcccccccgtgcgtttcccttccccttctctcctctcctgcctgttcggctccccacactgcagcttcccttccctctcacctcggtgaccgcattgggtgctcgcggggcggaagaggaggcgcgggtcgaggtcggctagcctaacccgtccggccgtaccgaggctggtgggatccgctcgccggccggcaccggggaggtgagccacccccacgtgctcgccgcgcggttaaactcactggtggtcaccaacgcccatgcttctatgaccgagagactccgggcttgaccaggacggatttgagcgaatatcttgaggttcatattgttgctggaggggaatggaaactccatcagaggccttgaagccggcggaggctaaaccggcgaagccacggccagtggcgcccacgggcaggttcgccttggggactgcttcgtccattaaaaagcgagctgatggttcggctccggcggaggtgggtgtgccccggtcttccttgatgaagtctacctcgtcgctgaacgccagttcggcgacgagaagaagcagcacggggactgctgggaagcaacaggacaatgggagctcagctgctgctaagaagtctagtcctacgctgtcggatggcgcgaggaagactaaactggtgtcagctcccgctgctggctcaaaaccagcagtggagaagaaaacatccttggtcgagaggacaggtgccgatttggccaggaagcctgctgttaaggcatccccaacttcaacactgaagaaggtccagtcaaagacagagagctccaatggcagcagtggcagcaccaggagagtgtcctccaatgcttctgtgccatcgccacgttccgtcacaagcaatgcagcaaggaaactgggtactcaagcatcatctgctgcgtctaatcggcggaagagctcaaccgcagatagccgtgattcgagattcatgatgctgccacaggtggatttgaaggctagcgatgaagtgaggctggattcaagaggtcatcgagttcgtagtctcaagcagctgaggttatcacatgctcttgagtttgtgtatctgagggacaaccttttatcaagtttggagggcattgagattctcaagggggtaaaggttcttgatttgagttttaatgattttaagctccctgggtttgagcctcttgggaactgtgttgtcctccagcaactgtatcttgctggaaatcaaataacttcacttgctagccttcctgaacttcctaacttggagttcctttctattgctcaaaacaggctaaagtcagtttgtatggctcgacagcctcgacttcaagtgttagcagctagcagaaacaaaatatcaactttgaagggatttccacattttccttctctagagcatttgcgtgttgaggagaatccactacttgagatgccacacttggaagctgcttctatcctacttataggtcctactttgaagaagttcaatgaccgagatctgaaccccaacgaggctgaggtagctaagcaatatcctgctcatacagctatttgcattcgggatggttgggaattttgctcccctgaacttgctgctgattcaacattttctttcctacttgagcaatggaataataagctgcctcaaggttacatggtgaataaagcttatgttgaccatccgtttgaagaggatccatgccattgccattttagattcacaaatcttggtggtgagggtgagctagtcctcaaataccaatggtttctgggtggcaaaacaccaacagattttgttgctatccctggtgcatcgagcgaggtgtactggccaaaacgtgaggatgttggaagatgtttgaaagttgaatgcactccaatagtaaatggtgcagaattttcgcccgtttttgctgtatctttacctgtttctccaggtactggatgtccaaaggtcatcaatctggcagtcagtggtgaagtagtggaaggaaacatactcagtggagttcctgaaattgcctggtgtggtggaacacctgggaaaggcgttgcaagttggttaaggcggaggtggaacggcaatgctgtagtaattgatggagctgaggggatggaatatcagttgacagtcaatgatatcaattcaagtttggtatttatgtacacccctgttacagacgagggtgtcaagggagagccgcaatgtacaatgacagattttgtgaaggctgcaacaccatcagtcagcaatgtgcatgttctgggagatattgttgaagataacattatcgtagggaaaggaaaatacttcggtggcagagagggactaagtaaaatccggtggtttagagagaaggaaaatggtgaatttcttcttgtgctatcagacagcatggagtatacactaaccaaggaggacgtggggagacacctcaaatttgtatatatccctgttaaccttgaaggtcaggagggtgaatctgcttgtgcgataacagatgtagttaagaaagcccctccaaaagtattcaatctaaagattgttggggaatctatggaaggaagcaagatatctgccagtgctactgttacaggtggaactgaagggtccagcagggttcaatggtacaaggcatcttcctctgaatttaagaatgaacatgagcttgaagcccttactccgtcacgagtttctaagacattccgcattcctcttggtgctgttggatattatatcgttgcaaagtttacacctgtggcacctgatggtgaagtcggtgaaccagcctatgctacatcagatggccttgtggaaacactaccacccagcctgaacttcttaacagtcactggtgaattctctgagggtcagatattaacagcatcatatgggtatatcggaggacatgaaggaaatagtttatacagctggcaccttcatgaggctgaagatgacgaaggcactccactttcagaggcaaccggtttgctacaatactgtgttacaaaggaagctgttggaaagtttgtttctttcaaatgcacccctgtcagagatgatgatattgttggtgaggcaagatcattcataggaaaggacagagttactccagggatgccgacattactttctcttgaagtaactggtgatgcaattgaaggaacaactatgtttgccagtaaaaggtattggggaggagaagaaggggacacaatgttccgctggatactgacaaattctgatggaaccgagaaagaaattgaaggagcaacaagttcatcatacaccttgaaatgcaatgacattggcttctacatatctgtcttgtgcaagcctgttagaaatgatggagttgatggttctttagtgtcgactgaagcgattggtcctattataccagggccaccaacatgtcaatctcttgaactagctggctctatggttgaaggtggccgtttgacctttcatgctgtgtatacaggaggtttgcggggaagttgcatccaagaatggttcagattacatgatgatgggcacaaggacaagttgactgctgatgaatgtctagaccttgatctagctgatatcgattgccggattgaacttatgtatacacctgtacgagaagacggagtgcacgggttaccaaggagtgttacttctgatacaatcttacctggggagcccaagggtgtcaatcttattctacctgagtgttttgaggacaatgaaatttctcccatcaaaacctatttcggtggcaaggaaggcactggcaaatatacatggtttcgaaataaagagaaacttgataacttggaatttgatctggttgctgaatcatcagaagttgttggagaaaccttaaaatataagccttcattgaatgatgttagttcctatctgattctttattgggttcctacacggcgtgatggaaaggttggtgatcctttgatggctatctctgatgatccggtcatggcagcttttccatctgtttcggatgttcacttagagcagaaaagttcagatgtatattgtggactaggcatctattatggtggatatgagggattaagcttgtatagatggtacagggaatctagtgatggaactaggcttcacatagatggtgctgattcagtcacatacgaagtgacagatgctgattacagctgccgtctactgtttggttatactcctgttcgttcagatgggataagtggagaagaaaaactctctgaaccatctgatgtaattttgccagaactactcaaaatcgagacactcaatttcaaggggaatcaggttgaaagagaaacactgactgctgctgaacaaattccgtacagtgagattcaacaacatatatggaaaaattataagaaagagatgaaatatcaatggtttatttccaatgaatcaggaggcgatcagtcttttgaaccattggcaacccagtgttctcgctcatacaaagtgcgctttgaggatattggtcgttgcctgaaatgcgaatgctttgtcactgatgtatttggacgatctagtgaattggtatccgctgtgactgctcctattttgccaggaaggcctaaaattgaaaagctggagattgaaggaagaggtttccacactgacctatatgccgttcagggtacctatagcggaggcaaagaaggcaagagtaaaatacaatggctcagatcgatggttggaagccctgatcttatctccatacctggcgaaactggaagaacgtatgaagctaatgttgatgatgtagggtataggcttgttgcaatttatacacctgtaagagaggatggagttgagggacaacctgtttctgtttcaacagaacagattgcagttgagcctgaactttacagggaagtgaaacagaagctcgatgatggttcagtcaaatttgaggttctgtgtgacaaggaccgaacacccaaaaaggcacaagtaatgggccatttggagcggagggttttggaagtcaaccgaaagaggataaaagtagtaaagcctggatctaagacatcattcccgagtactgaagtacgaggaacctacgctccaccgttccatgtcgagctgtatcgcaatgaccagcaccgcttcaagattgttgtcgacggtgatactgaagttgacttaatggtgcaaacacggcacatgcgagaccgcatcatcctcacgatcagaggcctcgcccagaagttcaacagcacctccctcaacacacttctcaggatcgagtcatgatagacctgacagtgtaaaaaccaactattacgggaagctgtaccccttgttccgattggttagagtgcgtggttttagtaggattcgtgacatgccagccttttgtgtgtatgggtgtgggacgggccgagcgtgttggattacaattttttccctgacacatctctcaaatcagagcagcatcagctggttgctctgactggtgccgtcgtgcgtcatgaaatgtacatagggtggttagagcgagaaagagagtggtgtttcttggtgctgtatttattatgcactggttgggttgggttttttcgactgccattctcatactaagtattggttctttcttttttcggtcgttgggtttgcatatacttgtaccgacaacacagcttggggtgattgggcgagtgctgttcagaatgcctggtccacacttgtgtacgactggaatcctacggtggcgtattcacatgctgttttatggtgcaaatgtaaattcatctgttcataaacgagaatcaaaatcgtcggccacgtgtattcgtcgtattcgtaccgatgtatactaccttataaaccagtactaatctcacggtggcatcaattatcttcctctgtttcacaaggcacacgtttttgttcaccaattaaccctgtcaaacggccagccaccaagtcattaacatagttgatgttgtaacatccggatatccaaggacatgcttgatgaacatgcatatgtagccaccaagtcaaaagcaagtgaaaccctcatgtttttcggccagcataatacgccatcaaacgataatgttactatttggtcacccttcaaagaggaaggtccagacccttgcccacctccaccccaatcatctgaagaatccccttgttcagcacctggaaattaagaagccggtccatcgaacgttgagaacgaaactcagatagaatagaagcaacgcctcaaacgtcgtgcccatccattaccagctccacaatgaaggtgccgatgaggccgatcatgcaggccctggagttccaaatctccgcggtctgggtgaaccccaagaagggctcgctcagcttcggctgcaccctgggcgcttcaacctgaacgcacagcagaaaaatgaacaccagctaacagaagcattccccccggcctgtgtcactcacccctggaggaagtttcgcagcacgcgctctcagagcagcggctcctggtcttggcgccgatggcaggcatggagcgagtctcttgctgggtttattgtggcggaggggtccatggaccgacagggatgacgaggaaaggctacaccttgctgccattgctgggactgttcatccaaatccgagtgttagaagttactgttagtagccatcaaacagccaaataggttgaagacagagtttgggaactcggtttcacacagcgggcaggaaagagagaatgcacctggcgggcgctcttcgccgccggtgagggcctcggcagtcggcacctggcggtagcctatccaaccgcgtcgcagacagagaggtatagagagagggaaagagcgctcgacgacttcgtttcacctacctcacacaagtcctcttggttcacagacggccagagccactaactcagccagcgagctgtagctctcagtctcagcgccggccacacattgagcaagcaacatgagtggagaggagaccagtatcacatcttatccgatccgatctacgtggcagcttccctgctctaacgagacgacgccacgtcagcagcgaagatcctgaacctatccacgagtggccgctgcaggccacaagctgccccggtggctcccatcccacgcctcgccgtgtccaggctttaagccacacgcacttgagctccaccgccactaccaccagtaccacaccactccgcgctagctgaggacggtacagcggcacagaggtgcgacgtacgacgacgacgacgcaggcgccacacatggcatcccagctctccgccgccgtgccccggttccacggcctccggggctacgccgcgcccaggtccgcggtggcagcgctgccgtccgtgagggtgggcaggaagaggtcgtcgtcgcagggcatccgctgcgactacatcggctccgccaccaacctgatcatggtgacgacgacgacgctgatgctgttcgcggggcggttcgggctggcgccgtccgcgaaccgcaaggcgacggcggggctgaagctggaggcgcgcgactccggcctgcagacgggtgaccccgccgggttcaccctcgccgacacgctggcctgcggcgccgtcggccacatcctcggcgtcggcatcgtgctcgggctcaagaacaccggcgccctcgaccagatcatcggctagatccctacgtcgccgttgttaagatcagactcagcagcctcgatcgcgccgccggccggcaggtgcaggtggtgactttgtaacgtgtgtgcgtgcgtacgtgtacattgcatccatcttggttccaatggacatatagctcctgttgctcctctagtcctcttgcgttgaccccgatcgatgagtatgacttctaccttccatgatagcaattagcaagcggttaaaacttataaaaaagagataaatccagatcatatctgaaagaaagaataataaatatcactaactagtgacttgttcggttgcatcgggatcgaaagagattaaatcactctctatttaaataaagtgagatttaattctctccaacccccttcgatcctaacgcaattaaataaagtctgctcgttggttt

SEQ ID NO: 1131 - DNA, 2847 bp, Zea mays
cacccttttgctttcctcccccctcccctccccccctctccctgtccggttttaaagacgcggagagattgtaaagtctaaatcttgcattcacttggggaattggataggtagggagtggataggctttgtcggtaggtcctttttccggggagaattcgcctgagttccttggaataaaagaagatttgcgatccttaagcctcacgttccttgatctgctggtgtggaagttgatcttgatcatgttcccgttcgtcgtcttcatggacaatttgatttggagatggggccggaaatgatagagcaggatggatggtaggaaaaggaaggggaaattcaggaattctctcaggcgtatggctatggagtgcctgtgctctggtgagcagttgaaggcgtcagatgagaccatgcggtcatctgattctacgatcacaaaggatttctcggccagtgggtactcttctcggaatggagagattgagcagtaccttgataatggcaacatagaggaagccgagttgtcgctccgggagggcatttgcctaaattatgaggaagcaagggcattgctaggaaggctagaatatcaacggggtcatgtagaggcagcactccgtgtctttgatgggatagacatatctgcattagttcctaagatgaaaatctcaattgctagaaaaacagaccgtcggaagactcattcacagtgggattccccaccaatgcccttgcatgctgtcagccttctcatggaggccatatatcttaaagcaagagcacttcatgatcttgggaaagataaagaagctgcacaagaatgtagaatgatattggatattgtggaagcagctgtacctgagggcttgccagcaggctttgggaaaggctgtaaattgaacgaaataatatgcaaggctgtagagttgctccctgagctgtggaaatcaggggggttttcacttgaaaccatttcttcatataggaggtcacttcttaataattggaatcttgatggagagacaatagcaaggatacaaaagaaatttgctgtttttctcctatatagtggttgtgaagcacgccctccaaatcttcattctcagttggacggttcatttgtacctcgcaacaatattgaagaggctatccttcttttgatgattcttttgaggaagtccaatctcaagaggattgagcaagatccctctgtgatgcatcaccttacttttgcactgtccatgtcaggacagctaattccactggctggacagtttgaagaattgttacctggtgtgttagacaaaaaagaatggttgtacagcgttgcattgtgttatttagcagaagaagatgatctgagtgccctgaatctactcaaaattatactaaaatctggagaggactccgttcaactcatagaactgcttctagcttcaaaggcttgcattgagatgagtattcatactgaaggtgctttttatgcaaggagagccattgcaaatatgcagggaggatgcaaaccaatggcaggacttgcaaacctattgcttggtgttgcactttctaatcaggctagaagtgcaatatctgatacagatagagcttcttggcagtgcgaagcactggaagcccttgggaatgctgaaaaaaatatacatgggaaagattctagggcattatacagtctcagccttgaaaatgctgtgcagaggaaattagaattagctgccttttatgcaaagaggctggtgaaacttgaggctggatcagagttgaggagttggctccttttagctcgaatacttagtgctcaaaagctgtttgctgatgctgaaacagttgttgatgctgctctagatcaaactgggaaatggtgtcaaggagatttattgcgaaccaaagccagaattcaggctgcacaggggcaatttagagaagcggttgaaacatacacccaacttcttgctatcattcaacttagaacgaaaagtttaactgctggagtttgcttgccaaagggcaacaaggatgataaaggcctggaaacagagacctggtatgatctagctctcttatacctaggtatggcacaatggagggatgcagaggtttgtgtattgaagataagatccatcagtccttattctgcattggcttggcatgctacaggaaaaatatatgaagcaaaaggtcttagaaaagaagctttgggagcttttttcagagccttagatcttgatcctaaacatgtcccaagtttaatatcaactgccactgttctacaacaacttggtgacaggccattgccttctatacggtgcttcctgactgatgcattacaactggatagaactaatcatgttgcgtggttcaatcttggccttctttacaaagaggaaggtggcaggtcagcagctgaggctgctgaatgcttccaagctgctgcttttcttaaagaaactgcaccttcagaacctttcagatgacatctacaggggctatagatgtaagctgctgtatgtatttttgatatatttcactgatgaaatagtggattacagagttctaaaaatgatcttcttgggagatcacagcattggaaactgttggaaaaaatgtttaacaattcaatctatagttccaattgttgcctgtatagcaacaagaaagacgatgatcttcgccttgtgtaggaacagtgcttactgtgatatatatatatagatagatgaccagtacattgtgtatcttgagtaaaatggtttcacatataaggtatcagactactctctccgtttgttaagaatttagtcaagatataaaatatgttctggggtcctt

SEQ ID NO: 1132 - DNA, 3460 bp, Zea mays
aaaaaactttctttttattatcattattactagttggatcggttaacagttagaactttgtatttaattattagtgcttcccacctgctacatatatggtgttccagctctgaaccgagctgcatcgatcgtggacctcgcccccgcgcctcccctctcatcagttcttgcacacacgagttgcagttccagcagacaaatcctcccactggtacttccaccacaccacagtccacaggcagagaagagcgaagatgcttcttcccaggcacagattcttcaagttcaggtccttgtagatgagctgcagctgcaggatctcagaatcagctaactattttccacgcatagtcgcctttaattccaggtgacagcaagggcaggtcgactgcgcttgttgcctactgctactccgatcgatacatacatacagattccctgcaccggccgatcgcgatcagagattgaggaggcatcctgtccagctgttccacttccatccatccatccaccaccagagaagagcatacagtagtgcaccactcatctcatccccttctgctgtgcccctgtgatgagtgcacggccctgcccctgccgctgcggcctcggcgccgcgcaccacgcgcacgcgggtgcctccccttgctcctccggggtgccgtcgacgtcgtcgtccacgtccatggagccgcgtgccggcacggacttctcctgcctcagctggctcctcttccgcgtctccgcctacgacgacgacgacacccacaacctcctcctcctcgccgccggcgccctctagcgcgcgcctcctgccgcccacagctcttcttccctccacttctaccaatttgctccctccatccacacatacatacatagctaggttagttagttagttgagttctctctccgccgtctgtcagtgtcagctgctgcaactcatcaatacaactgctgctagctagcttattagccttagctgcggtacacccaaaccaagaaagctaattaagggaaggaaataaagctccgtcgtctcgagccgatcgacgaccaccatgtcggcggcacggcggtgcggcggcgtccggcgtcggctggatagggcggcggcgggagacaacgccaacggatacgtcgagactgaccccaccggtcgctatggacggttcgacgagctcctgggcaaaggcgccatgaagtcggtgtaccggggcttcgacgaggagcgcggcgtggaggtggcgtggaaccaggcgagcctcgccgacgtgctccgctccccggacgccgtgcagcgcatgtactcggaggtgcagctgctgagcgagctccggcacgacggcatcatcggcttccacgcgtcctgggtggacgtgcccgggcgcagcttcaacttcatcaccgagctcttctcctccggcacgctccgctcctaccgcctccggtacccccgcgtgaacctgcgcgccgtccggtcgtgggcgcggcagctgctggggggcctcgcctacctgcacgcgcgcgacccgccggtcatccaccgcgacctcaagtgcgacaacatcttcgtcaacggccaccagggccacgtcaagatcggcgacctcgggctcgccgcggtgctccgccggggcggcgccgcgcacagcgtcatcggcacgcccgagttcatggcgcccgagatgtacgacgaggagtacgacgagcgcgtcgacgtctacgccttcgggatgtgcatgctggagatgctcaccgtcgagtacccctacagcgagtgcaccaacccggcgcagatctacaagaaggtcaccgcaggcaggctccccgacgcgttctaccgggtggacgacgacgacgcgcgcaggttcatcggccgctgcctcgtccccgccgccaaccgcccgtccgccgccgagctgctgctggaccctttcctcctccaccaccaccaccatgctgctgctgctgctggcacggtaccagtgccgtcaccattgccaactaccgctgttgccgccggcgctccgccgccctcgacgtgtagtagctccgcggccgacgatgatgtcgtctcggcgttggacgacgacgacgaggtggacgtgccgcccaggaatgacatgaccatcaccgggaagctgaacgcggaggaggacaccatcttcctgaaggtgcagatcgccgacgaggcgtcggggcacgcgcgcaacatctacttcccgttcgacatggcgagcgacacggcggcggaggtggcgcaggagatggtgaaggagctggacatcacggaccgccacgcgtcggagatcgccgccatgatccaacaggagatcggcaggctgctgccggggcgagcgcagcagcacgagtacacgtacgcgtcacgcggcggcgactacgacgacgaggagcggcctcctcccttctactacctctcctcgtcccccgcatcctcccatggttctcactgcggggtggggccatatgccttcggaggcttctctggcccatgtggcagtgcttggaccaaagatcatgactggtacgctttaagcgacaacgacgatgacatgagctccgtgcactccggtaagtactctcctgtgcactacgcgtcaggtgccggccacgaggaggcgccggccagcagcagcggctcgtccaagacaaggttcggcggcggcggctccggttccgccgcggcgctcgcgcggcagctggagcggcagtgcagcgtgtcgccgcagcacgcggggcggccgcggcggcgggaggacgacgacgaccgggccggcaggcggaggaggatgacgcggaaccggtccatggtggacatgcggagccagctgctgcaccgcacgctggtggaggagctcaaccgccgcctcttcttcaacaccgtcggcgccgtcgagaacatcggcttccgcgcgcccaccaccaccgccgcctcgtcctcctcgtctgcgcgcggcggcctcgaccgcggcaggagaccaggcggcggcggcaagcagcggcagctggacgacaaggagcagcagtatttcatgctttgattgccgctccgcatacgaccgactttttttttttgacaacatatctggtgtcacatattaaatcatcaccactcattttagatctaatatctctagttgtttggtacattttattaaggataccctccaacgtggtgttgtatagtggtggaaggtgttatttgtaaattgaataatcaactagagacgttagatctaaaatgagtgttaatgatttaatatgtgcaccatgtacaccagtcttctatgtgtaccagatatgtcctctttttttgttttggccgtcgcgtgggatgagatcgagtactgtgtgtacatatacatatgcagcttggagaaataatgtatgtttcaagagcgtaaagtttgttacaaactcgcaatgcatactgtga

SEQ ID NO: 1133 - DNA, 2928 bp, Zea mays
ccaaaaaacaaaacaaagcgcctaaggtcccaagagtagagttggatctcgccttctccctgtcgtacccaacggcgttttcccctacattgtcctatcatgcttgccggaggattcgagctaccgcggcggcagcggtgacgtatcggtatcggcggcagcgatggcggcggcggagtgggacagccggagcgtggcgagccccaccggggattggccaccggcggccgccgcgtccccgataaaggggaaggcggcactgccggagtcggatggaggtgcctcggcgtccggctcatcggaggccaaggtcgacgatggcaacatccaggaggcggagtcgtcgctccgcgagggtctctccctcaactacgaggaagctagagctctccttgggagactggaatatcagagaggcaatgtggaagctgctctgcgagtatttgatggaattgaccttcaagctgctattcagcgcttccaaccttctctttctgataaaccactctcgaagcgaagtaacaaattacgggcagattcatcaaattcaggatcacagcatgctgctagccttgttcttgaagccatttacttgaaatcaatgtctcttcaaaagttgggcaaggcaatggaggctgctaaacagtgtaaaagtgtccttgatgctgttgaaagtatcttccaatgtggcatacctggtgttatggttgaacaaaaactgcaggaaactgtcagtaaatctgttgagcttctcccagaactttggaagcaagctggggcctatcaagaagcacttgcttcataccgccgtgctcttctaagtcaatggaatcttgatgatgaatgctgcacaaggattcagaagaggtttgctgttttcttgttgtacggtggtgtagaggcggcccctccaagcttggcttcacaaactgaaggttcatttgttcctaggaataacttagaagaggcaatcctactgctcatgatactattgaagaagtggttccttgggaagacacactgggatccatctgttatggagcatttaacctttgcattgtcactgtgtggccagacatctattattgccaagcacctcgaagaggttttacctggaatataccctcgaaccgagagatggtatagtctagcgttgtgctattttgcagtttctcataatgaagctgcattaaacttgttgaggaaatctttgaataagaatgagagtccaaatgacataatggccctcctgttagctgctaagatatgtagttccaataatcttctttcttctgagggtgtagagtatgcaaagagagcagtcagagatgccgaatcatcagatgggcatttaaagagtgtggccctccatgttctggggagttgcctgtccaggaagtctaaggttgcttcatctgatcaccaaaggtctgtcttgcaggctgaggctttgaagtcactcaatgaggcaatttctcttgaccgtcacaacccagaattattatttgaattggggatagagtatgctgagcagcggaatatgcatgctgccttgaaatgtgcaaaggagttcattgatgtcactggtggatctgtctctaaaggctggaggttgctattgttggttctttctgcacaacaaaggtattcagaagctgaagttgtaactgatgctgcattagatgagaccgcgaagtgggaacaagggccattgcttagaataagggctaaactgaaggttgctcaagcattgcctatggaagcagttgaagcatatcgcacccttcttgctcttgttcaggcacaacggaaggcttatggatctgtcaaaaatggcacagaggataatgaggataaagtgagggaagttgaagtttggcatggtcttgccaacctgtactctagtctttcctattggagagatgcagaaatttgcttacagaaggctaaagccctcaaaacatactctgcgacaacccttcatgtagaaggaaacaaacacgaactgcatgagaagatacaggacgcggtagctgcatacttcaatgccatctctatggaggttgagcacgtcccatccaaggtctctatcggtgctctcctctctaaacaagggcccaagttcctaccagtggcgaggtgtttcctctccgatgccctgaggcttgaacccacgaaccgcatggcctggttctaccttggggaggttcacaagcaggacggcaggctagctgatgccgccgactgcttccaggcggcctcaatgctcgaggactcggatcctgtagaaagtttcagatcactctgatgggtcatctgcaacagcgtgaggttccctttttttgtcggccggttttctcttcgtcttcccccattttcgaggcacagctgggcagagaccaggtgcccagctatctgtaacttgttgtatctacagttgtcagtgtgtaccaacagatgctgtaattggttgttgagtggcctacatgattcttcaaccgatagctccatcaggatcagagtggcactggaacagctatgcaatcatatgagccattattattacgtgtattacacagtatgaatatatgattataatgagtcatcagctaacttaaaactaccgttgctgatattgtaatgttttgtaatttttattcctgttttgtttatcaattaccagacgtgctgaacagtgagcacaccacgggtaaatgaaatggatgttatacaccgccagaaagagttctttcttcactaattaaggaaatgtctggcttctagggctaatttttaatctctacattttattacattttagtcaataagggctagtttggaaactacattttcttaaggaatttctatttttctaaagtaaaatcaactggtttttcttaaaaaatggaaaccccttatgaaaataga

SEQ ID NO: 1134 - DNA, 3504 bp, Zea mays
ccacttcaaatattttttaggctgcttcaaaaaacatggtttagaagtgctctaaatacttcaagtcaactccgttctagatgaacgctcgtttccctcccggcgactacttgcatccattaccggctattgcttccattaccgtccgcgcttagcactaaccacagtgaaaactgcgccactaaccgcagctttaaccccaattccatcaattagcggcgactgataaagtaattaagccggtggcgaagcatcctcgtccgcgtccgcatccgcaccgatccggtacgggagttctcggctccgacgccccacgcggccccgcctcgcgctccttcctcgaacacctcgccgccggctctcctcagctccgccgactcgcttcgctgtcctcctcgcccccagcctcctcctgatcccagattcgcctcgccggcccccggcgcccgccacgagcgccgtcaagcgaagccgttcttccctggcgcgcgccgctggcgtagctgccaggctccttccgccgaagcacatcgcggccagctggcgctcgtcgtccaccgtcgtcgcggcggacttcgtcctcctcccggaagcacagatccgcacaggctcggctgcatttctccacttgctggtaaggaagctcgctccgatggattactccgagggttagttccgccctggtcttccgtttctacgctgccagcaatcaagttccaacaagtcgtcgatggactgcgatttgttcgctgcgtggtggagcagcagcaccagattagtctccaggatttttcgggggtcagctgatgccccgggcccgtcgccagcgaggccagccatgccgcttcaccagaagcaggcggggctcgctgctagcaagctgggcgtggggacctcgaagaaacacagggcttttgtcgcaagcgatgagcagtggtacaacaagatttttgatccgtcaagcgacttcatcttgacatggaaccgcattttcctcttctcctgcttcgtcgcgctatttatagaccccctctatttctatgtgcccaagatcagctacggcagccccaaattctgtatcggaacagacacccgtttcgccgtcggtgttacattcttcagatcgattgcggatttattgtatgtcctgcacatcataataaagttcagaacagcatatatcaatccaagctcgactctgagggtgtttggaagaggggatcttgtcacaaatcccaaggaaattgcgtggaaatatatcagatctgacttagctgttgatgtggcagctgctttgcctttgccacagattattgtctggtttgtgataccagctataaagtattcctctgctgagcacaacaataacattctggtgctcatagttcttgctcagtatcttccaagattgtatctcatattccccttaacttatgaaattgtcaaagctactggagttgttgcaaagactgcttgggaaggagctgcatacaacatggtgctctatctgatagctagtcatgtgctaggtgcactgtggtatttgctatctgttgatcgccagacattctgctggaagacgaactgcctgaatgaaactggttgtgatcttaagtacctagattgtgacacgacaccaaatgctacatgggcgaatacgactgctgtcttcagtaattgtaatgctagcgataccaatataagttttgattttggcatgttcgagcctgcattgtctaatcaagcccctgctcaaagttttgcgatgaagtatttctattccctctggtggggattgcagaatttaagctgctacggtcagactcttactgtgagcacctatcttggcgagacgctgtattgtatattcttggcggtacttggtcttgtcttgtttgcgcatttgattggaaatgtgcagacctacctgcaatctattactgtgagggttgaggaatggagattaaagcaaagagatactgaggaatggatgagacatcgtcagcttccttgtgaactgcgggaaagggtgagacgatttatccagtacaagtggcttgcaacaagaggagtgaacgaagagtcaatattgcatgctctgcctgcagaccttcgacgtgacattaagcgccacctttgcctgggtcttgttcgacgggttccttttttctcccagatggatgatcagcttcttgatgccatctgtgagcgtcttgtatcatcactgtgcacaaaaggcacatacattgtccgtgagggtgatccggtgacagagatgctcttcatcatccgtggaaaactggaaagctccacaacaaatggtggccgcactggcttcttcaattcaatcaccctgaaacccggtgatttctgtggcgaggagcttcttggatgggctcttgtccccaggcctactacaaatttgccgtcatccactcggacagtgaaggcactgatagaagtagaggcctttgcgctccaggcggaggatctcaagtttgttgccagccagttcaggcggctgcacagcaagaaactgcagcacactttccggtactactcgcaccactggaggacgtgggcctcatgcttcatccaagctgcctggagacggtacaagcgaaggaagatggcaaaggacctgagtatgagggagtcattcaactccgttagattagacgaagtggataacgaagatgacgattctccgcccaagaatagccttgctctaaaattcatagctaggactagaaaagtgcctcagaacatgaaagagttgccgaagataacgaagccagacgagccagatttctcagctgaacccgaagactaaagttgtctttgcttatgctatcatgtacagtggtcatagctgactattgtgaattgctagtcctatttggttcgtgatggaggttacaagccaactaggtatggtgggtgaattgaacttgggttgacggtgccatctgtggatgtgaggaaggtaactcagaatatcaatgaaagcgtaatgaagcttctgactggtatatagactgaatggttgtaagttaactagttgctacgttcatgttgtatattcagacatctctgtgcctatagatttcttgaaaaaaaaaggaaagaaaaaacaagaatacatcattacatagactgtaatcttaaacatctgacataagggtgtggctacgttgtccgtggccgtggaggactgtaaatcatgagggtgtggcttctggtaaaatggctagcaccacgcagtgatgagagatatctcgttgagtcatcagggcgcagattcgaacaggggcggagctaggccgcggattcgaacaggcgcagagctaggcctgtttatcggtgtcagctgacaccggcggctttttgcaaaatcaatgagaaatatttgatatgcgttgtttatccatagagctgatatcagtgtctagtggaatcggctccttcagctggcttcgctccgcatttgtgagacaaaggttt

SEQ ID NO: 1135 - DNA, 2603 bp, Zea mays
gtttttgtctcatcacctaccggtcagtaccctcaaaaccaagaaccaggaagcaaaacggcacagtgctgaatggtccatcgttgccccttgccagcagcaccgaagtccgagctctccaccgaggaaacctccccccgctctctctctctctctcctcaggtcatcagtcccctatcctcctcctcctcttcttccccacatcgtcagtgaggtcctcggggttgctgcggcaataataatgggggagaggaggaggtttcctgctagcgctcgcttgctcgccctcgccgtggcgatggtgttgcaggcggcagcggtggtgctcgtcctgggcgaggcgagtgacggcggggccatgcttgtgggcccgcggcagctggagaagttcgtggacgagctgccggacatgccgaggctgcgcggctacggcgtcacggagggcggcgcgctcgtcgccggcaacctcaccatcggcatgtacgacaccagctggaaattccaccgcgaccttccggcgacgcgtgtcttcgcctacggaaccagcaaggagaccgccacggtgccgggccccaccatcgaggccatgcggggcgtccccacgcacgtgacgtgggcgaaccacctcccggcgcgccacttcctcccgtgggaccccacgctgacgaccgccgtggcgcccggcggccgcggcgtccccaccgtggtccacctgcacggcggcgtgcagcagtcctcctccgacggccactcgctggcctggttcaccagcgggttcgccgctacgggcccgcgcttctcgccgccgccctacacgtacccgaaccggcagccgcccgggaacctgtggtaccacgaccacgccatgggcctcacgcgcgtcaacatcctcgcggggctcatgggcgcgtaccgcgtcgccagccccgccgaggaaggcccgatgaacctgccccgcggggaggcgttcgaccggaacctcgtgctgttcgaccgcgacttccgcgccgccgacggggcgctcttcatgaaccgcacgggcaacaaccccggcgtgcacccgcagtggaacccggagtacttcggcgcagtcgtcgtcgtcaacggcaaggcgtggccgtacctccgcgtgcgccgccgccgctaccgcttccgcatcctcaacgccagcaacgcgcgcttcttccggctgtcgctctccgcggggctccgcttcgtgcacgtcgcgtccgactcggtgtacctcgccaggccggtagcgaccgagaggttcgtcgtggcgccgtccgagatcgccgacgtcgtcgtcgacttcgcggagtcggccgccggcgcggcggtcgtcctcagcgacgacgccccggccccgtaccccggcgaccccggcgagaaggcggagaccatcgccgtgatgaagttcgtggtcgagggcgccgcggaggacccggacacgtcgaccgtgccggcgacgctgatgccgcactaccccaggccggacgcgcgcgaggcggccacggcgcgacacatcaccatgtacgagtacaccagggccggcacggacgagccgacgcacctgtacctgaacgcgcgctcgtacatggacccggtgacggagacgcccaaggaaggcacgtcggaggtctgggaggtgatcaacctcacggacgacaaccatccgctgcacgtgcacctggcggtgttcgcggtgctggagcagcggtcgctgcgccgcgtggacgagttcagggactgcatgaagcgccggaacgacgcgcgcgcgtgcggggtcgaccgccacctggccggcgggcggaggcacgtcgtgccgcggcaggagcgcggctggaagaacgtcttcaaggtgcggcccagcgcggtaaccaggatcctcgtgcgcttcaagccgctcacagacgccgcgtcgccggaggagagccgcttccccttcgacgtcaccactggtccgggttacgtgtaccattgccacgtgagtactgcgcgcatctgcctctccaggtcttttgtctgatggatttggttttcgatctcccattctgtcctaatcttcttttgtgccgtttcaaacatgcagattttggaccacgaggacaacgagatgatgaggccgatgaagattgtgcgttgaacggtttccaggaagaaaaacatatattctatgaatgattccgtatcgcaaaagaaacgacatgtttactgtgtctttcccattaatgatttaagcaggaagaacttttagatgattgaacttttcagttaagatagcatttgccgagtaacaacatatatcctaaatgtttgttaagatagcatttgtcgaagcataatttactcataggttgtttatagataatatttacacgtttgtcccccctactattcctatttgctaccacattttcatgacatggggaggacaatgctatatttaaggcacatcatttttcattttatagtcaactgtaatctcgactctcgatagataagactatttgcagtggttccttctaaatttatcttcctattgttggattttttatgggcttgacccatttattcaataaactctatgatgtataatggtg

SEQ ID NO: 1136 - DNA, 2678 bp, Zea mays
tcactctcccccacccgcgccctctcatctcccccttttccttccccctcacgtcctcacccaccacagctttgagttcgagctccccttccccccccttctctgctcccgcgactcgaccctctctctataaatacaaccgccggctcccaccgccaaaccatccatcacagaccaccacaccaacaacagactacggaggaccgccgccgcccacgcaaaaacccacccgatccccgcaaaaacccccgcacgcgatccacgccaattccagtcaccgcgatgcagggtctcgccccgcccacctctgtttccatacaccggcacctgccggcccggtccagggcccgggcctccaattccgtcaggttctcgccgcgcgccgtcagctccgtgccgcccgccgagtgcctccaagcgccgttccacaagcccgtcgccgacctgccggcgccgtccaggaagcccgccgccattgccgtcccagggcactccgcggcgccgaggaaagcggacggcggcaagaagcagctcaacttgttccagcgcgccgcggcggccgcgctcgacgcgttcgaggaagggttcgtggccaacgtcctggagcggccccacgggctgcccagcacggccgacccggccgtgcagatcgccggcaacttcgcgcccgtcggggagagcccgcccgtgcacgagctccccgtctccggccgcatcccgcccttcatcgacggggtctacgcgcgcaacggcgccaacccctgcttcgaccccgtcgccgggcaccacctcttcgacggcgacggcatggtgcacgcgctgcggatacgcaacggcgccgccgagtcctacgcctgccgcttcacggagaccgcgcgcctgcgccaggagcgcgcgatcggccgccccgtcttccccaaggccattggcgagctgcacgggcactccgggatcgcgcgcctcgccctgttctacgcgcgcgccgcgtgcggcctcgtggacccctcggccggcaccggcgtggccaacgccggcctcgtctacttcaacggccgcctgctcgccatgtccgaggacgacctcccctaccacgtccgcgtggcggacgacggcgacctcgagaccgtcggccgctacgacttcgacgggcagctcggctgcgccatgatcgcgcaccccaagctggacccggccaccggggagctccacgcgctcagctacgacgtcatcaagaggccgtacctcaagtacttctacttcaggcccgacggcaccaagtccgacgacgtggagatcccgctggagcagcctacgatgatccacgacttcgccatcaccgagaacttcgtggttgtgcccgaccaccaggtggtgttcaagctccaggagatgctgcgcggcgggtcgcccgtggtgctggacaaggagaagacgtcgcggttcggcgtgctccccaagcacgccgcggacgcgtcggagatggcgtgggtggacgtgccggactgcttctgcttccacctgtggaacgcgtgggaggacgaggcgacgggcgaggtggtggtgatcggctcctgcatgacccccgccgactccatcttcaacgagtccgacgagcgcctggagagcgtgctgacggagatccgcctggacgcgcgcacgggccggtccacgcgccgcgccgtcctgccgccgtcgcagcaggtgaacctggaggtgggcatggtgaaccgcaacctgctgggccgcgagacccggtacgcgtacctcgcggtggcggagccgtggcccaaggtgtcgggcttcgccaaggtggacctgtccacgggcgagctcaccaagttcgagtacggcgagggccggttcggcggcgagccatgcttcgtgcccatggacccggccgcggcccacccgcgcggcgaggacgacgggtacgtgctcaccttcgtccacgacgagcgcgccggcacgtcggagctacttgtggtcaatgccgccgacatgcggctggaggccacggtccagctgccgtcccgcgtgcccttcggcttccacggcaccttcatcacgggccaggagctcgaggcccaggcggcctgaccgagctccacgtttctcggaggaggaacagaggagccagccatggatcaggggagaagtcaccagagggagcccagatcagttccccggggtcttcctgtccccccacgcacaccagagttacagttggtagttgctttgctttgccttttttttttcattatttcatttgacactagtgtaagtaaattgggatagtggcagcttagagagagagagagagattagtagaaaggcgcccagctcgtagcttttcagctggtggtgcctctggctagtatagagtacatattttttcttcttcttctttgctttatccctttttttttctccctttggatgacatggatgtgcatccagctccagttgttgtcacccagtccagtggactggggtgtctgggatcttggttgctgctacttgctcgccattgccacccagttgctgccgctgctgctgaggtgttgctggcttggcttatatactctgtgttccctgtggctatcggtgcgtgtacatttgttcacagtatatgactgatggtatgaaaacaagaaccggtgacggtttctgtctcgatc

SEQ ID NO: 1137 - DNA, 2233 bp, Zea mays
cgcgggcgcgcgtccgtccaagaaacctgacgtaagcagtgacagaattggcgccgcctctcggcgtccacgtgtcgtggtcaacctgtcagagtggggctccgtgtgtgcgctaccgcaggggcccggcgcacgggccacacgtgtcgcggtcgaccgcggctataaatgcccggctccgcactcggaacaagtttcaagctctcctcccctcttcctaccattagcagtagccacagccagaacaccagcagacagcagcatcagcagggaggaacacgatgagcggcgccggtccggatctgcagctgccaccggggttccggttccacccgacggacgaggagctggtgatgcactacctctgccgccgctgcgccggcctgcccatcgccgtccccatcatcgccgagatcgacctctacaagttcgacccatggcagctcccaaggatggcgctgtacggcgagaaggagtggtacttcttctccccgcgggaccgcaagtacccgaacgggtccaggcccaaccgcgccgccggggctgggtactggaaggccaccggcgctgacaagcccgtgggcacgcccaagccgctggccatcaagaaggcgctcgtcttctacgccggcaaggcgcccaagggcgagaagaccaactggatcatgcacgagtaccgcctcgccgacgtcgaccgctcggcgcgcaagaagaacagcctcaggttggatgactgggtcctgtgccgcatctacaacaagaagggcggcgggctggagaaggcggcggcgccggcggccggcggcgaccacaagcctgtgttcgccacggcggcggtgagctccccgccggagcagaagccgttcgtggcggcggcgggcgggctgcccccggcgttcccggagctggcggcgtactacgaccggccgtcggactcgatgccgcggctgcacgcggactactccagctgctcggagcaggtgctgtccccggagcagctggcgtgcgaccgggaggtgcagagccagcccaagatcagcgagtgggagcggaccttcgcctccgaccccgtgaaccccgcgggctccatgctcgaccccgtcgtcggccacgccggcggcgacccgctgctgcaggacatcctcatgtactggggcaagccgttctagacgacaccgcccatcatgtcctgaggggaggtgggggtggcgaagcatcctcggctgcggttggttggttgattgatctgtcttgggcagcgcaatgcaatgcaaccgcacggtgtgggctttgactcaggcgagccgccattgttgacttgcaaggaggatataatatgaaactatagctggattacatggagaggcggcaatgagaccgtctggccccgccggaagggagacggagacggagacggatggcgcagtgcatcgggtgtggtggatcgtgcgcggcatgtgtgtgtgtggctgtacatatacatactgtacatgattggttcagtgcagggtttctgttccttcattgattagttattatactaataagtactagtaattttgtaagggcttgtagttgcagtctccgtactggtggtaggtagtgcaggccatattcgtcatcgccaagcttcgagtgtacttactcctacaatatatattttacagtatatattgtagctgtgttggctcttccggaaaaaaaatggaaggggaaaatagggattatgttattttgattattctgctggtctcgtctgaagtgctactgttcgtctgtattctgctatatcgtcagcacaccacttgtagaaaaaaaaaaggagaggggaaaacgtttgaaccgttgcacgactgtggctcgcaatcgcagctatagcacggttgctgtatgcaggagtatacttatcgacgaagaaacgtttctgaaccgcatgttgaagggggtaaaaaaaacgtgctgtggcagcaggaaaaagtctgccgaacacattggaaaccgcgagacactgaacacgttgataaacgatgggagagattactcggcactcggcaggcagctggtggtcaatccgcacgtgtggaggtaggcaggcagcaaggcggcgacggcggttggccaagcttgggcttccacgtccagacgggtttgtcctcgggcctatcgccgcctctgcatgcccggcgaactgtcaaatctcatgtctctcctgtgggtgggctgtggcagtgga

SEQ ID NO: 1138 - DNA, 1647 bp, Zea mays
ccttctaaaaaaacacttgccatttttcgttattttcgtctcgacttgttttctcactactgtcactggtgagggactgagggtgacggccaaggccaacccagcagctagcgccataaatacgcgcccttgcttgtttccaaggctgctgtgacgtccgcaccgccagcgccacccgcgtcgccatctccaccaggcatccacaccaccaccttgggcgccgggcccttccatgctttccttcgctcgtcgacaagaacaagatatactagtgctagctgttctgtgctgcggtcgtcgtcttcttatataagacgccaacgacgcatgtcctcggagcctgccgaggccaggatatagaggcgtcgccgggccgggccactgcacggtcggcggatatggctgtcgaagcgcacagcctcctcttagcaggagggcacaagcaactcaccagcgcgggatggccttggacgaccggcgacgaagctagatgcgcgacggcgcgaccgagccaccagcaggctttccagctccagcaggcctcgtgtgtgggcgtgggcgtgggcctgccggcggcggctccggtctcgtcggccgcggcggcgccaccagcgccgatgatagcgcagcagtacgctgctggcggacggctgttcgtgggagacgcggcggagagcggcgtcacgttcggaggaggaggtgcggtgcagcaggaggcgccccggaagcggaagcgcgccgagcaggggcagacgccgccgccggttcttgggaccggcgcggccgacgtggcggcgcagtttcaacagcagctcgtcgacgtcgaccgtctcgtcctccaacacaccgccaagatgtgggcggggctcaccgagcagcggcggcggcacgcccggcaggtcgtggccaccgtggaggccgccgcggccccgcggctgcgcgcaaaggaggaggagatccggcggatgcggcgcgtcaactgggcgctcgaggagcgggtgaagagcatgtacgtcgaggcgcacatgtggcgtgacttggcgcagtccaacgacgccgcggtcaccgcgctccgcggcgagctgcagcaggcgctcgacgcccagcagacgcgccgccgcgccgacgacgccgactcgtgctgctgcggggagaacgacgtcttcatcaccggagcaggcgcggcggagaacgaagaggaggccgggaccgggacgtcgtcgtcgggccacgtcaggggggcgtgcgccgtgtgcggcgacaacgcggccgacgtgctgctgctgccgtgccgccacctctgcgcgtgcgcgccgtgcgcggccgcggcgagggcgtgcccggcgtgcgggtgcgccaagaatggcagcgtctgcgtcaacttttcgtgatggtcctgaaaccgatagaattactggatagactagaattttttttggagacggatgcatcttttgcacttgccttcccccctcccccccctccaaaaaccctcgagcgagaagaaaaaatatagtcccaaagttcggaaactttcagtgtcatttttgtgttgcttctgtttgttttctaatttagcgtatttgttagattctccctcccacattttttctttgggtttttttagagtatctgattagaacttat

SEQ ID NO: 1139 - DNA, 955 bp, Zea mays
gccgccacaacaatatcgcattgacatatcgttcatcggatccagtcctctcccgggatctcctccggctataaatttccggccccaattcacccaatccagatgcgcaaacatcgaatcgtctcgctagtggctgccctactcgtgctgcttgccctcgccgccgtttcctccacgcgcagcgcacaaaaggagtccgcggctgacaacgccgggatgttggcaggcggcatcaaggacgtgccggcgaacgagaacgacctccagctccaggagctcgcgcgcttcgccgtcaatgagcacaaccaaaaggccaatgctcttctggggttcgagaagcttgtgaaggccaagacacaagtggttgctggcacgatgtactatctcactattgaagtgaaggatggcgaagtcaataagctctatgaagctaaggtctgggagaagccatgggagaacttcaagcagctgcaggaattcaagcctgttgaagagggtgctagcgcctaagaattaggttggtcccgttttttgagagaggagggcaggatctcttccatttcatttaaggtacaaaagcaaaagaaaaaggaacagaaagagttcaggccgtgtgcccgtgtgagccagaggccagagccatactgcccaaggccaacagccggcaagaaaactagaaaccgatacagttacagccgaaatcctcacaagtaaagtacatcacaccaggatcagtaccgagaaaagacccctgcacatcttttgagtgatgttttgtttggcccatgctgtaagagtctatatgatgtaaatataggcttagacaatttagattgatcctcgaaacaaccctggtccattttgtgtccttccgtatgaaattgtaaacagttggcacagaattgttgcttggtgtgtatggcagtcggtgatacatgcccaattacgttcattg

SEQ ID NO: 1140 - DNA, 1190 bp, Zea mays
gcccacaccgggcacaccccccgagctcagcttagctccactccagctccaatcacagtcgtgaccagagcgcgagagctagctagagggccgtgaaaatgccgatcaataggatcgccctggggagccaccaggaggtgtaccacccgggcgccctcaaggcggcgttcgctgagttcatctccaccctcatcttcgtcttcgccggccagggctccggcatggccttcagcaagctgaccggcggcggcccgacgaccccggcgggcctgatcgcggcggcggtggcgcacgcgttcgcgctgttcgtggcggtgtcggtgggcgcgaacatctccggcgggcacgtgaacccggccgtgaccttcggcgccttcgtgggcggcaacatcaccctgttccgagggctcctgtactgggtggcgcagctgctggggtccaccgtggcgtgcttcctgctccgcttctcgacgggcgggcaggccacgggcaccttcgggctgacgggcgtgtcggtgtgggaggcgctggtgctggagatcgtgatgaccttcgggctggtgtacacggtgtacgcgacggcggtggacccgaagaagggcagcctgggcaccatcgcccccattgccatcggcttcatcgtgggggccaacatcctggtgggcggcgccttcgacggcgcgtccatgaaccccgccgtgtccttcggccccgccctcgtcagctgggagtggggctaccagtgggtgtactgggtcggccccctcatcggcggcggcctcgccggcgtcatctacgagctgctcttcatctcccacacccacgagcagctcccctccaccgactactaaaagccgaagccgaccgacccaggggtgcgcagcgcagcgcagctagcatccagcgctctctccccgctcgccgccgtttagtttctctcgtgcacgtgcatgcatcgtagactgtctcaggccgccgctgcgccggcgccgctcgcatcgtttgcttccttggaccagcagtcgtcgccgtcaggctgaactgcttgtaaccgtgaattccggacccgtttgcttctgtaagatttgtgcatttgcctgagtacacctcgatctgcaaaaaaaaaaaaaaaaaaaaaaaaaaaaaaaaaaaaaaaaaaaaaaaaaaaatcgaggggggccccccccccc

SEQ ID NO: 1141 - DNA, 2551 bp, Zea mays
actttcactagcttgtattaattcttccttccttcctagtgtagctgcaccattccatttcccctccgcccttgttctattccgtccgtagtgccccagcttcccctgtgtccattcagttccttcattcaatgcaaccccagctcgaatctcctccgtgacgtgcagctctccacacgtcctgcttctccgatgccactccaggtccaccccctcctcctgctcctcttggtcagctcgcttccctcctgcgccatctcctccggttcctcctcttgcgccggccgcgacgacgcggccatcgtcgccgccgcgttccggcacgtgcgcaacttccgggccccgaggacgaaagcatgccagccggtcagagcgctccgcctcccgtcgcggaacctcaccggcgcggtgtcgtgggcggcgctggcaaacctgtccgcgctcgccgcggttgacctctcgggcaacgcgctccagggcgccatcccgggcgggttctggcgcgcgccatcgctccgcgcggttgacgtctcccgcaaccagctcggtggcgcgctccgggtggagcccaacccgcagctccagtcgctcaacgtatccggcaaccgcttcaccggcgtcgacggggtggaagggctctcggggctcgtcgcgcttgacgtgtcaacgaacaggatccgggcggtgccgcggggtctgcggcgtctgacacggttgaagcggctcgacctgtcctcgaacgggatgcgggggtggttccccggcgacttgccgccgctcggtggggtgcgttcgttgaacgtctcgtacaacaagttctccggcgtggtggacacgggcgccgtcacgaagttcggccactcggcgttcgttcacgccggcaatgcgtcgctggtgttctcgggccactcgacagagccacggcggccacggccatcacctcctcatggaaaaagcaaaaagaacggtggttcggccgggacgtcgacggagagcaaggcgacgaggagtagcaagaagaggaagcatctgagcatcgtggcggtggcggtgatctgcggggtggtgtccctggccatgctgctctgcctggtcgggtgcgtggcgtgcggcgtgctgaagtccaggcagaagggaggaaaagacgacgacgagaagaagccacaatggggcgagaagggcgaggaggagaaggaggaggacgtggtggtcgcggcggccaggggtgcatcggcagcgcccgtggtgctgttcgagcggccgctgatgcagctcacgctggccaacctggccgcggccacgtcgggcttcggccgcgagtcgcagctcgcggagcgcggcggccgcagcggcgcagcgtacagggccgtgctccccggcgaccagcacgtcgtcgtgcgcgtcgtggagggcgccatggccgggctcggcgaggacgacaacccggcggccgctgccaccgcattccgggagctcgcgcgcctccgccaccccaacattcttccgctccttggctactgcattgcaggcaaagagaagctgctactgtacgagtacatggagaagggcgatctgcaccggtggctgcacgagctgccagcgggtcggccggacatggacgacacgggcagcggcgacatttgggaggcggcggaggtcaagcggtccatctccgactggccgacccggcaccgcatcgcgctgggggtcgcccggggcctggcgttcctgcaccagggatgggccggcgggtcggggcgcgcggcggtcgtgcacggccacctggtgccgaccaacgttctgctgtgcgacgacctggagccccggatctcagacttcgggcacaacaacgacccgccgtcggcggcgacgcccgagggcgacgtgtacgggttcggcgtgctggtgctggagctgatgacggggcaggccgggtgggacgaggcgtccgtgagctgggcgcggggcatcatccgcgacggcaaagggctggacatcgtggaccctagggtgcgggacgaggccgccggggcggaggcggaagcggagcgagagatggtggagtgcctgcgggtggggtacctctgcacggcgcacgcgccggacaagcggccgacaatgcagcaggtagtgggggtgctcaaggacatccggccggcgcctcccacacccggtccgggcagctgagccaagtgccaccagccacgccgggggggtcggactcggacggacacatgctcggggtcggggtcgctggcttgcacgaagcggcggcgtggccagtggccgttccctcccaatcgaggagaagcgtccgtccgttgttttgccttatgccttgcggttgcgggttatccatgatccaccaatggatcgggagcagcttttgctgttgcacggggtcctggtggcctgatgtagtgtggaccagaacgagacctcgttgtttgtactttgctgagatgtgaatgtaacagttttctttgccacttttcattgatgagatgcctgatttctatcttctcttttaaaaaaataatgtatccatcca

SEQ ID NO: 1142 - DNA, 2734 bp, Zea mays
ggcctactctagcttcttcctcagttgtcagttcgctgtcctgcccccgcagcccgcaggccccgccccgcctccacgcgccccgcctccataatcgacacgcacccccagtcccaccgagcacgcggcagcgcactgcgcacccgatcctcgcgccccccgcgcgtcccgtccccactggcgcggcctcgacacctgtcccccggccccccacgcgcgcgcgcacgggagtgcacgtagctttcctgcccctccgtccctcgcccgcccgcccgtccgtcgcctcgcgcggtcgcgcctcacctcgcccctccctccctcctttctgccggccactcccggctcccgagccacagcaattacccagctcagcggctgccgaaccccctccgcttcccggctctccaggtcgagaagggcgctgctcgccacctgcctttctttctacagttcgacgcactttggtggcggtgccgctactctccttcccgagttcctaacttcctaactaggagggcgggcgttgtctgcctgtgtgcttttggcgattcgggggcttgggctcggatctgcgcgtgccttcctccggacccgagcgaggctcgggcgcgaatttggggcggatcagcgcagatctggaggcacatgaggaggaggaggcggaggggtagcgggagcgatgcggtgcttctgcgaagggcttgagccgacctgggaaggtgattctggaggaggtggcggtggctgcggaggcggagggggaggctggaggagggatggaagacgtcgtagcagtcgtggcgtcactctccgcgccgccggcgccggcgtttagccccgccgcggcggggctcacgctgatcgccgcggcggtcgcggacccgatcgccgcggtggtcgtcggagccatggagggggtctccgtgcccgtgactgtgcccccggtcaggacggcgtccgcggtggacgacgacgcgctggcgccgggagaggaagggggagacgcctctttggccgggagcccgtgctcggtggtcagcgactgtagcagcgtggccagcgctgatttcgagggggtcgggctgtgtttcttcggcgcggcagcaggcgcggagggtggtcccatggtgttggaggactcgaccgcgtctgcagccacggtcgaggcggaggccagggtcgcggctggtgggaggagtgtcttcgccgtggactgcgtgccgctgtggggctacacttccatatgcggccgccgtccggagatggaggatgccgttgctatagtgccgcgattctttgacttgccactctggttgctcaccggcaatgcgatggtcgatggcctcgatcccatgacgttccgcttacctgcacatttctttggtgtctatgacggacacggtggtgcacaggtagcaaattactgtcgggaacgcctccatgtggccctactggagcagctgagcaggatagaggagactgcgtgtgcagctaacttgggagacatggagttcaagaaacagtgggaaaaggtctttgtggattcttatgctagagtggatgacgaggttgggggaaacacgatgaggggaggtggtgaagaagcaggcacaagtgatgctgctatgacactcgtgccagaacctgtggcacctgagacggtgggttcgacggcggtcgtcgctgtcatctgctcctcacatatcattgtctccaactgtggagattcacgggcagtgctctgccgaggcaagcagcctgtgcctctgtcggtggatcataaacctaacagggaggatgagtatgcaaggattgaggcagagggtggcaaggtcatacaatggaacggttatcgagttttcggtgttcttgcaatgtcgcgatcaattggtgacagatatctgaagccatggataattccagtcccagaggtaacaatagttccgcgggctaaggatgacgagtgccttattcttgccagtgacggcctctgggatgtaatgtcaaatgaagaggtatgtgaaatcgctcgcaagcggatacttctgtggcacaaaaagaacagcacaagctcatcatcagccccacgggttggtgactccgcagactcagccgctcaagcggctgctgaatgcttgtcaaagcttgctcttcagaaggggagcaaagacaacattactgtcgtggtagttgatctgaaagcacagcgcaagttcaagagcaaaacttaaccgtgacaagcgtagcaacaagttgctaagaacctatagattcggacagtcccaagttcggtcattttagttcgctgctttagtgcattgcttagcccagttccttatttttctcagttctttttaagccatgccaagggctgtattccccgtatacggtacagatcgcgaaatccctatcagggatggtttggtgatatcagggtttatatgttttcctgaccgtggtgactgtcctgttttcattcttctttcttcgctgccctgtattcattttgtcaagctggggcaggcatccaagtatttggcaatgtatatttgagcttgcaggatacaaaggaaacgaattgttatgaagggtacgtatcctgcctgcctgaatttgggaatctatcaactgcatcagctggtaatataagtatggactcgcaatctggatactggtggagagaacctaatggtccagaagggctgagttgtgctaaaaaagtttgaggcaacaa

SEQ ID NO: 1143 - DNA, 1692 bp, Zea mays
gctgaaattcactccgaaccacgacaccacgtgacggcaccggagacccaacaaagatgctgcttaacccggcgtgcgaggcggcagcgccgatggacagcatccggcatcacctcctggacgagccggcggcggcggcgaccgcgagcgctgctccgcggccggtgtactgccgcagcacgagcttcggcagcctagtggcggaccaatggagcgagtcgctcccgttccgccccgacgacgccgacgacatggtcgtcttcggcgcgctccgcgacgccttctcccagggctggcttcccgacggctccttcgccgccgtgaagcccgagcccctggcgttcccggactccccctacgagcgcggatcctatccctgccttggtggcttccttctcgcggaggggcctgagacgccgaccgaggcggcgacgacgcccgggagcgaggaggaggccgcggcggcggtgtccagggggaagcactaccgcggggtgaggcagcggccgtggggcaagttcgcggcggagatccgggacccggccaagaacggcgcgcgcgtgtggctgggcacgtacgacagcgccgaggacgccgccgtggcctacgaccgcgccgcgtaccgcatgcgcggctcccgcgcgctcctcaacttcccgctccgcatcggctccgagatcgccgcggcggccgccggcgacaagcggccgttggcgttgcccgagcccgccacctcctcggactcgtcctcgtcctcctcctccaccggcggctcgcccaagaggcggaagcgaggcgaggccgccgccgccaacatggccatggcgctggtgcccccgccttcccagcttagccggccggcccagccatggttccctgccgcgccggtcgagcaggcggcgatgccgccgcgcgtggagcagctcgtcatctagctagccccgcgcgttaaaccgggctcgcggcgagacaatgaggcgtgcaagtgcaacgacgggtgcgccggcggaaagcggaggaaaacaggacgaggccctgcgctgcacttgcgcgaatgcgacggcgcgcggaatgcgataagctcgggagcaattgggggtccggatgccgctgttgctccgtgcaactcgcgcaagtggaaagaagctgtctgtgtgtagattcatccaagtgtcttgtctgcaaacggattttcggtatatgcgtccttgtcacctgtcagggtggtgtggtgtgagggcttgggcttgggcttgtgctgctgataagtttggagatctgtacaaagaaaaaacgtagggagaagattagatcaagaacagtcgttgaaaaatagaaaagaaccacaaatgggagcgccgtggtctgataaatatcctgcggctaaaccaggcgcgcaagtcaacagaacagcgacctcaactcatggcatggaatcgaaatcgaaatcaccaccctgaaaccaaaactgcggaggcgaagcgagcactaaaacaaacgctgctctgctgacgtggcaggaaggtggcttgctcacggcagcagtatcgagacgagaggtgggtaccacagctccaacgttggatttggactgagccgattgagtatgtaacgaaacgatggatttggactgagccgattgagtatgtaccacagctccaacgtttaatctgtatcgacttatactacact

SEQ ID NO: 1144 - DNA, 812 bp, Zea mays
cccgcaccgcgttccgctccgtacgcatttcggccgttccccaatctcctcccagcgatttgccttgccgaggtcgccttgccttgccgctgttcccgagcgcgacgccgcgccgcccctgccctgctaggctgctacagaggaggagaaccccatattttcccacccccccaatggcaacgcgcgcgccgccgcagtcttcttcgaccggatccgtgacggtgacgatcgacccgtccccctcgtcgtcgtcctcctccgccccgcccgcgtcggcgccggccccggccccggctcctgagtcggtggtgctgcgcctcaagcgccgggccaagaagaaggtgtcgtggaaggaggggacggtggacaacgagggcctcggccgcaagagctctaagaagtgctgcatattccacaaggaggtccccttcgacgaggactgcagcgacgacgaggcccccggcggcggcggcggccaccggtgccctcgccctcatggtgacgccggcgaggggaccagcggatgctcgtcttcttcccacgaccatggccaccactgatctccgtgcgtgttactcgttcttctctatcctccttaggtatcggaccacaatagatgcttatatgtttaattaatctggcatcatgtaattagttgagtgaaaacaccaaattcgtgctctatggttgggagacgcatgttttttatgggtacaattgttgtattggtgcttggcgaccaaacatggcaatcgttttgctgaattcaatgttgacacctatgttttgcttaatacgatttgaactttgaa

SEQ ID NO: 1145 - DNA, 2558 bp, Zea mays
cttgtctgtagccgcatgatgcagatacaatacagtatggacacagtgcttaactaccccgtatgaccatatcactgcagaagatagcgttcagatcaagacagaaaacaagcaagacgatcttaaccaaacagccgtccactgccttttctttctcccgttcaccccgccgtgcacgctctttttgtccctcgtgccgacgaccgaccgaccgccgccgcctcaaggtcttcgtaaagccactcgccggcaacgagcagccaccaggaagatgttgtgaggactgatgcaataactaagcttgctggatggacggatgcgattgcatagagccactatggcctaccgatgatcttctcgtcaagtatcagtacatctcagacttcttcatagcccttgcgtacttctcgattccattggagctcatatattttgtgaagaagtcgtccttcttcccatacagatgggtcctgatccagtttggtgcgtttatagttctttgtggggcaacccatctgataaacctgtggacgttcaccacacatacaaagaccgttgcgatggtcatgaccatagcgaagatttctacagcagtcgtgtcctgtgcaactgctttgatgctcgttcatatcattcccgacttgttgagcgtgaaaactagggagttgttcttgaagaataaagctgaggagcttgatagagagatgggacttataaggacgcaagaggagactggtagacatgttaggatgcttacacatgaaatcagaagtactcttgatagacatacaattttgaagactactctcgttgagctaggaaggaccttgggtctggaagaatgtgcattgtggatgccatctcgaagtggctcaagccttcagctttctcatactttgcgccaccagattactgttggatcatcggtgccaatgaatcttcctgtcgtcaatcaagtgttcagtagcaaccgggcaatcataataccccacacatcttctttggcgcgggttcgacctcttgcagggcgatatgttccaccagaagtggccgcagtccgtgtacctcttctacatctttcaaactttcaaataaatgattggcctgagctctcagcaaaaagctttgcaatcatggttttgatgcttccatctgatagtgctagaaaatggcatgtgcatgaattggagctggttgaggtcgttgctgatcaggtagcagttgcactatctcatgcagctattctcgaagagtccatgcgggcacgtgatttactaatggagcagaatgttgccctggatttagctcgaagagaggctgagatggctatccgtgctcgcaatgatttcctagctgttatgaatcacgaaatgagaacacccatgaatgcaataatagccctttcctccttgcttttggaaactgagcttactcctgagcagcgtctaatggtggaaacagtactgaaaagcagcaatttgttagcaacactcatcaatgatgttctggatctttccaaactcgaggatggaagccttgaactggagattaaagcattcaatcttcatgctgttttcaaagaagtgatgggtttcattaaaccaattgcatctatcaagaggctatctgtatcggttatgttggcaccagatctgccgttatgtgcaattggtgatgaaaagagactcatgcaaactattctgaacatctctggcaatgctgtaaagtttaccaaggagggacacatcacgcttgtagcttccattgtgaaggctgactctttgagagagttcagaaccccagaatttcatccaactgcaagtgatgaacatttctatttgaaagttcaggtaaaagatacaggctgtggagttagtcctcaggatctacctcatgtattcacaaagtttgctcatcctcaaagtggaggaaaccgagggtttaatggtagtggtcttggccttgccatatgcaagaggtttgttagtcttatgggagggcacatctggatcgacagcgaaggaaccggaagaggttgcaccgcaacattcgtcatcaagctcggcgtgtgtgacaacacaaacacctaccagcagcagctggttcctctagtctggccaagcagtgcagactccaatttgtctgctccgaaagtgctgcccgacgggagaggatctgtttccctgaaatctcggtaccaaagaagcgtatgagctcagtgtaaatgattgacggcatagtgccaagtaggggatcgattagtgccattgtctaattttgtttgtaacccagtcatagcaacatatagtgtacaaataatgtaaagccaatggagactgcagctgtgtatctgggtagcaacgctgacttgctgcattgagtagtatgtcctaccagcggattgaattgcttgttctggggtgtgcggcgcgcgccccgttgattgttctgttgtaacttgtaatcccatattaatcgtgtaatatgaaattcaatgcaaatacacggtcacaagctgttttcggtgccctcgctccatcagttggttcagatcgtag

SEQ ID NO: 1146 - DNA, 1221 bp, Zea mays
cggccacgtccctctccacgcgctaacctatatagcccgccacctttccctccaaattcaaatcaaatgctccgactcgttcctccccctgctcgccacgcccacggccactaccactcacacacacaggcagcagccatggacgccgccggctccttcagcgactactcctctggaaccccgtcccctgtcgccggcggcggcggcggcgacgacttcggctcctcctcctacatgacagtgtcatcggcgccgcccaagcgccgagccgggcggaccaagttcaaggagacgcggcaccccgtgtacaagggcgtgcggcggaggaaccccgggaggtgggtctgcgaggtgcgggagccgcacggcaagcagcggatatggctcgggaccttcgagaccgccgagatggcggcgcgcgcgcacgacgtcgccgcgctcgcgctgcgcggccgcgccgcctgcctcaacttcgccgactcgccgcggctcctcagggtgcccccgacgggctccgggcacgacgagatacgccgcgcggccgccgtggcggcggaccagttccgcccggcgcccgatcagggcaatgtggccgccgaggaggaggcggccgatacaccaccaccggatgccttgcccagcgtgacgatgcagagcgtcgacgacgacccgtactgcattatcgacgacaggctcgacttcgggatgcaggggtacctcgacatggcgcaagggatgctcattgatccgccaccgatggccggttcctccaccagtggcggcggcggcgacgacgatgacgacgacggtgaggtcaagctctggagctactgatggccgatcgcacgtgtgtctgaaggaagacaggttgcattgggcaaataacttccctgtacagccttgggaagaaccggtaccggtgaaatgtactggccgtggccctttcccttcggttcgtctatgctatgtaatgttatgtatcctgctcttctgatgattaagggtattcaggagaagcagaagactgggtttactcggtttgatcgtttaatttaatttggagctagagatgtacctgcatgcatatataatgcatgcacggtaactgtgatataatattcagagtgccatcaacacctgtaacgagccataaaaagcatggtgtatgcatttaggaacgaccgtgggcatgatggtatactattgatgttgcattgagaa

SEQ ID NO: 1147 - DNA, 4559 bp, Zea mays
accatggctgttcacatgccatgaagctgcttgaactggaggcacctaaatgctgtggattgttcctatgcagatgattggatcagtggtttcaggcttcggggggttcgatcagatgttgtatgaataatagcaggattgcttgagagactatagtttgggtactgtttgcttctgtatttactggtacggtttcctactgatctgcggctgcgcaggaaggcattctcttttttgccgtaccatggatgcaccggatgttcaacagagcatgggatataaggagtccaggggtggtatgcctaagtttttccatgcccttggaccagcactcctgatttcaatgggttacattgatctcgggaagtgggtggcagccgttgaagctggttcttgttttggattcgacctggtgttgctggctctccttttcaatttcactgccattgtatgtcagtaccttgctgcttgcattggcactgtcacagggaagaatcttgcagagatatgccaccaagagtacaaccagccaacatgtatattccttggtgttcaagctggattgtctttgttgacgtcagagctgactatgatttttggcatagcactcggattcaacctcctgtttgaatatgatgatctcatcacagggatatgctttgcaacagtggtacctaatctgctaccatatgctatatcccacctgggaaagaagatggaagggacaataaatgcctgcatagcaggatttgcacttcttagttatgtgcttggcttattggttagccagccacaaattcctctcacgatgaatgtaatattccccaagatcagtggtgagagtgcttactctctgatggcgcttcttggtgcaaacataatggcacacaacttctacattcattcatcagttgtccagggtcagaaaaagtcatctgcagttggtcttggagccttatttcacgaccaccttttttcaatattgttcatttttactggaatctttatggtgaactatgttctaatgaactctgcagcagcggaatctactaatactcttctcattaccttccaagatgttgtagagctaatgaatcagatatttgtaaaccctctggcaccaactatatttttagtggttcttctcttctccagccacatcatctcgctgacatctgctatcggtagccaagtgatttcacaccatttattcggtataaaccttcctctttctggacatcgtctcctactgaaggtttttgccatagttcctactctgtactgggcgaaagttgcaggagctgaagggatataccaattattaattatatgccagattattcaagccatgcttcttccatcttcagtcgtcccactttttcgtgttgcttcatcaagatcaataatgggagcccatagagtgtctttgcatctggagatactggtttttcttgcatttctccttatgctattttcaaatatcatatttgtggcagaaatgctatttggcgacagtgggtggatgaacaatctgaaaggatatactggaagccctgtggtgctcccatataccgttttagttttagttgcacttatatctgtggctttttcactgtacctggctgttacaccattgagatctggaagtcatgaagctgaatcccatgaatggtctgtgcattctcagagagaactcttgaatacttctcaagaaagggaagatgttaaggtggacaatgttacatatgaggaagatcaaagatcagatgttgtcccttctcccagggatgtgcctgacagccatccggaactggccttggactatattgatacttctgacactgctgtagaatctgatcacgactctcaacaatctactgcttatgcatccactgctcctgaaacctgctcctccccgtcgtttactcgcgaggagtcaaaatcagttgttgcagtcaactggccggagcctttggagaaggttcctacttctactgtgatggaggaaagcacagtagaaaatgtggtctctaggatcacgactgaaagagatgttttagtagaaacagatgttgtctcgggcaaggataaggaagatatccgtactttggagtctgagaagtcaattgttgatagcaccccatatgtgtctgatgacggtccgccatcccttactttcagcaggggaaagggctcagatgcaggaaatggcagtggtagtctctcaaggttatctggtttgggccgtgcagcaaggagacagctagctgctactcttgatgagttctgggggcatctgtttgattaccatggtaagctcactcaagaagctagcaccaaaaagtttggtatcttgcttgggatagaccttagaacacctagcacatctgtaagaacggataaacaagctgctgaaatacttaagagcccactggtgagagactcaatgcggggggcagcttttttgtcaagctcagtggacatgatgtcccctaagaatgaaacgtcgaatttggaacttgcatatgggcttcagaggggacctggcatgggattgtcaagctggtctcagggtatgcagctaccaaatacacagctgcagagctcaagcaatagcctacttgagcagagtgcaagattaaactcaaattttagttcatcttattcagacaacaatcagttctaccaacctgcaacaattcatggataccagctcacatcttacctgaaacagatgaatgccagcccaagcctttactctagcatgccgctggacccacaacggcttccaaaatcatctgtgtctgctgtgccaaactatgctgattccatgatgcatgctcgtaatcataacctgcttgcttcactgggtggtactactacacagcttcctgcaacatcccgcgtaggctcaatgatgcctgaaagatcgtattatgatccttccagcgttgatgggaatgaaaacgctggttcacctgcttactcaaaaaagtaccacagctcacctgatatgtctggaataatcgctgcaagtagagctgcactcttgaatgaagcaaagttgggtgctgccattggaccacagtcatacctcagcaggctggcggcagaaagatctcaatatgcaagctcaacagccaggcccgcggctccattagcatttgacgagctttcacctcctaagctccagagtgatatcttctcggcgcagtcaagcatgagaccaagtgctagatccctttgggctaagcaaccatttgagcaattgttcggcatgtcaagtgcagagctcagtaaaggtgacttcaatcttccaggcagatcaggtggcgtggccaaggatgatttctcttataaggaatctgagacgaagcttcttcagtccctcaggctctgcatcatgaagctccttaagctagagggatcagggtggctgttcaagcaaaatggtggttgtgatgaagatctaatcgaccgagtcgctgcagccgagaagctattgatgcaagggactgccgagaatcaactgctgcttcatggtggtgatctccagcaacattcttccgaccaggccggcatccagtacatgcgcacgcttcccaactgcggggaggactgtgtttggcgcgcgtcactcgtcgttagtttcggtgtctggtgtgtccgccgagtgctggacatgtctctggtggaaagcaggccagaactttggggcaagtatacctatgtccttaaccgtcttcaggggatcttggaccctgcgttctccaagcctcggggtgctctgacaatatgcacctgccttcagaaagacaccagagtgcgcaatagcccaccccacagtgggctaacagccatgggcccggtccccacaccgatccggggcgccttcacgaccgcaggcgtggttctggagatgatcaaggacgtggaggctgcggtctcaggccgcaagggcaggagcggcacggcggcgggcgacgtcgccttccccaaggggaaggagaacctggcctccgtgctgaagcggtacaagcggcggctcgccagcaagggccagtagcgcgcgggtgtcagacaggcaggcgatcgcaagcaatgttaggaggagcctgactattgttctccaggggggctgccactggcgccggcctccctgagccctggattttttcgttgcacgacgttcctagggaccggtggttgcccgatggtcgtcttggtcccttccagcaggttttttttttccttccctctttctgttggtttctttttgttggctttgtgatgttttgtaaggggcaactagggtatgtgctcagaaggactcaagatgtacacgcgaagatgtactagtctgctgatgcagcgttgtaaagtccacactctgcaggttaaccctttttggggccgtcaagtgttagtgcgtgccctatgtatgttaatcacccctgcagagaggttgcgaatactgaactactcacagacctgcacctgtcgagatcgtttgtaatatccgacgtcttgttcagaattgttctcactcttttttgccc

SEQ ID NO: 1148 - DNA, 2312 bp, Zea mays
aacattcctgtaagcgcggagtcggcgacgcacggggagaagtcgaacagcggccgcgcgcggggaagttgcccggcggcggcggatctcggaggcagcgacgcgcgggtggaggagctcagtgacagcgccagtgcctatcgagcgagcgaatcgaggagattctccccactgtttctttcctgctgattccgatttcgcgttgaaacaccggggggagaagaattgcgggcgaccataactcggcaagaagcggctccaaaaagggcatctacctttgccgattccggcaccgatggatcccgcggcgtcggggaggttcgacaagctccagagctcgttcaagctctccatccagtgcctcctcaccgcctgctcccgcgaggatgtcaatgacgctttctcgtccttcactgatgctgagaaggagcgtttgcaccggatgctcacccttgtgatgaagaatctgcatgccaacgtagtggatgagtttgacgacttctgccaagaaacacaggtggctgctgcccttgaaaagatagatgactttgttgaaaagcagaatcttgatgcattatcttcagagaagactactgttgaagaaatcgaagaaaaggtatcaagagcaaaaaaggatgaaattgaatatttgactggtttactgaaaaaggttgaagaaagtaacaatgccaagaaagctcgaattgaactcctgaagaaagaggaggatttaactgctgcaagagatgtcctcaataagatgacgcagtggaactctgcactcgtggagaacattaacccttgaatctgtgtgatgacgattcattggcgtcaaaggacatctttgtataggggtgtgttagattggatgacatgtgaatgtgattcatggatcagcctggatgttctgttatgattaagaactgctatgtatcgtgcaatagacacatcgtctgtactttggatgttattatcaggtcccaaacttcattatatccaatatgttacaatatcattttggtgacttaactacaatgtcagctcgtgccaacagaaaaagaagaaaagaaatgggcggtggttgcccgacaagtccttgtcagccgcacagtcttcacacgaccaggggccatgagcaccactcttgccttagccacggcccacgggcagcacagcatctccatctatccaaatggcagccagcagccgtccccttcctccaccctctgccatcctcgcagtcacagcccctcaccatggctgccacactctcctccgtggctgccccttccctccccaagcacatccccgttaccagagctcagcagcaggcgcctccttccatcatctcggcatcaactcagaagactgccttccatggggtgtcgctggtggtggacaggaggtgggcggccggccaccggagaggcggcggccggcggaggctgctgcaggtgaacgcgaggaccgccgccaagaacatcgaggtggaggtcgagaagccgcttggcttagccttgggccagaagcccggtggtggcgtcgtcatcacttctgtggagtctggagggaatgcagccagagccggtctgaaaaccggggaccaggtcctgtacacaagcagcttcttcggagacgagctgtggcctgcggataagcttgggttcaccaagacagccatccaagcgaagtcagactccgtctacttcgtcgtgagcaggggtgccgaagttgacgtgaagcgcctacctaagaggccggcgccaccccggtttggacggaagctgactgattcacaaaaggagagagcaacgcacgtctgccttgattgtgggtacatatacttcctacccaagccttttgacgaacagcccgacgactacggttgcccacagtgcaacgcgccgaagaagcggtttgcgaggtacgacgctgccaccgggaaggccatcggcggcgctctgccgcctatcgccgtgatcgtaagtttggtgatcggcatcgctggggtaggagctctgctcgtgtacggcctgcagtagcctgctcgttcttgttcagaacctttttttttttttgctgtgctcaagaagctcagctgactgctgctgtactctgtctcacaagacattccgagtgatatacatacataaaagggaagaaggaaatacacagtatttgaggctaatggcttgtctaattttcatgcactgctggtggttatacagtcgctcaatatgagtaccgagaggtcgcatgcttttcggaaatgcttccgttgtcgatgctgctctcgtcagcatagagatttt

SEQ ID NO: 1149 - DNA, 2066 bp, Zea mays
actattttaaacggacccgaggctcagtacagagcactgacacgctcgcctaattataaccacaccgcctagcgccactccccacgtcactcgctgtctgttgtagcaccgcaccagtcttcgccgccggtccgcgggcagatcaagagatggccacggcgatttacctctcctccccggcggcgccgtcgtcgtgtgcccgccagcggcggcagactaccagggcgaccgcgtcggcgacggaccgtccgcgcgaggtcgtgtccccgaagcgtcggctcccgctgcggaaggtgccgggcgactacgggccgccggtgctgggcgcgatccgcgaccggttcgagtacttctacgggcccggcggccgcgacgggttcttcacctcccgcgtgcgcgcgcacggctccaccgtggtgcggctcaacatgccgccgggccccttcgtggcgcgcgacccgcgcgtggtggcgctcctcgacgccgcctcgttcccggtgctcttcgacacctcgctcgtcgacaagacggacctcttcacgggaaccttcatgccgtccaccgagctcaccggcggctaccgcgtgctctcgtacctcgaccccgccgagcccaaccacgggccgctcaagacgctcctcttctacctcctgtcgcaccggcggcagcacgtgatccccaagttccgcgaggtgtacggcgacctcttcggcctcatggagaacgagctcgccagggtcggcaaggccgacttcggccactacaacgacgccgccgccttctccttcctctgccaggcgctgctggggcgcgaccccgccgagtccgcgctccagggcgacgggcccaagctgatcaccaagtgggtgctgttccagctcagcccgctgctcagcctcggcctgcccaagcacgtggaggactccctgctccactcgttccgcctcccgccggcgctggtcaagaaggactacgaccggctggccgacttcttccgcgacgcggccaggagggtggtcgacgagggagagcgcctcggggtcgcgcgggaggaggcggtgcacaacatcctcttcgccatgtgcttcaactccttcggcggcatgaagatcctgttcccgtcgctcgtcaagtggctgggccgcgccggcgggcgcgcgcacggccggctggcgacggaggtacgcgacgccgtgcgcgcgcacggcggcgaggtgactatgaaggcgctggcggagatgccgctggtgaagtcggccgtgtacgaggcgctgcgcatcgagccccccgtggcgatgcagtacggccgcgccaagcaggacatggtggtggagagccacgactatggcttcgaggtgcgcgagggggagatgctcttcggctaccagcccatggccaccaaggacccgcgcgtcttcgcgcgcgccgaggagtacgtgcccgacaggttcctcggcgaggacggcgcgcagctgctccgccacgtcgtctggtccaacggccccgagacggcgtcgcccacgctgcaagacaagcagtgcgctggcaaggacttcgtcgtgctcatcgctcgcctcctcgtcgccgagctcttcctccgctacgactcctttgacgtccaggtcggcgcctccgcgctggggtcgtcggtgaccatcacctcgctcaagaaagccaccttctgagctctgatggaccgcccgtcaaagtcgccggaggctggcacgtgcacttttttttcaccgtagaatatactgcatcgtacttgtctgcccccatccctctcaatatttttctagcgctttgatgtgatcatcaggtataacaaaatgcctattcttagtaaaacgagagaccgtttttttttcaggcaaatttgatagcgaactgagggagacatgcacatactgttcatgttgcttaggtactgttcggttattcctgtaggagatgggattgagaaaatttgtaaaaggttttcaacggatttaaacctatcgatctcctttaatctatatagaatgtatgaattgggatgaaaatgatcagaacctaaaatgacctca

SEQ ID NO: 1150 - DNA, 4863 bp, Zea mays
tacacacaaacggtctcgccctttgcgagttgcgattgcgacgacttgttcccgcaaaagccaggaacggaaccaaacagcagcaacctcctcccgtttcatcgtcgtcctcttctggaactagaaaaggcgaggagcgatccgtttctccccttctcgcgcagccattattgcccgcccagtctgacgccgccgtatcctcgcggcgccatggttttatcattgcgtccactcctcgcctcaccttccttccacgctgagggttttcctttttttgtctcattctaacatcacagttctacacgatctctgatcgattgattcggccaagataatctgagtcttgtgcttatctactacacctcttcccattttcttcatttccagttttttcgggggcttcatatctcccacggcacgcgtcacatcttcttcatgcgttgtgtgccgagtcgaggcagacatcggaggcgcgcgactgactggttggtttagctcgcgttttctttatccggtaccctgcgctactcaatttcgattcttttagctcggatttgagtagctgaaggccttcggcggcgatgacttgattgatgcgaattggggatttcttaccgtttcctctattgatgtcggtgctgaagagctcaaaccaatttgggttttgagggttttttttcccttctgctgctgatcaagctcacaaagatcgctagctccatctaccaatggacgagtccggggaagcgagcgtcggctccttcaggatcgggccgtcgacgctgctgggccgcggggtggcgctccgcgtgctcctcttcagctcgctgtggcgcctgcgggcgtgcgcgtacgccgccatctcgcgcgtgcgcggcgcggcgctgccggtggcggcgtcctggctgcacctcaggaacacccacggcgtcctcctcatggtcgtcctcttcgccctcttcttgcggaagctctccggcgcgcggtcgcgggcggcgctcgcgcgccggcgcaggcagtacgagaaagccatgctgcgtgccggtacgtacgaggtctgggcgcgcgccgccaaggtgctcgacaggatgtctgagcaggtgaggcggatttctacgacgaggagctcatcagggacaggcttgaggagatccggagacggagggaggacgggtcgctccgggacgtggtattctgcatgcgtggcgatcttgttaggaacttggggaacatgtgcaaccctgaacttcacaagggcaggctagaggttcctaagcttataaaggaatacattgaagaggtttctactcaactaagaatggtgtgcgaatctgacaccgacgagatactattggaagagaagcttgcctttgtccaggagacctgacatgcctttgggaggacagcgctgctcttgagtgggggtgcttcactagggtctttccatgtaggtgtaggtgtagtgaaaacattggtcgagcataagcttctgcctcggattatagcaggatcaagcgttggttctattatatgttcgattgttgctactcgaacatggcctgagattgagagcttcttcacagactcatcacagaccttgcagttctttgatgggatcggtggattttttgcagtgatgaggcgtgtcaccacttacggcgcactgcatgacattagccagatgcaaaggcttctgagggatctcacgagtaacttaacatttcaagaggcttatgacatgactggccgtgtccttgggatcaccgtttgctctcctaggaaaaatgagccaccccgctgcctcaactacccgacgtcaccgcacgttgttatttggagtgcagtaactgcctcttgtgcatttcctggactttttgaagctcaagaactgatggcaaaggatagattcggcaacatagttcccttccatgcaccctttgccacagatccggaacaaggtcctggagcatcgaagcgccggtggagagatgggagcttggaaatggatttgcccatgatcagactcaaggagttgtttaatgtaaaccatttcattgtgagccaaactaatcctcacatttctccactactccgaatgaaagaacttgttagagtctgcggagggcgctttgctggaaagcttgctcgtcttgctgagatggaggttaagtatcgatgtaaccaaatcctagagattggtcttccaatgggagggcttgcaaaattgtttgctcaggactgggagagggtgatgtcaccatggttatgccagcaacagtagctcagtatttgaagatcattcagaatccaacatacgctgaactccaaatggctgccaaccaaggccgcaggtgcacatgggagaagctctctgcaatcagagcaaactgtgccattgaacttgtattggatgaatccatagcagttttaaaccacaaacggaggctaaaaagaagcatggaaatgacagcggctgcttcgcaggtccattctaactatgttcggctcaaaactccaaggaggataccatcatggagctgcatcagtcgagagaattcttcagaatctctctcggaagagattgttagcacaccaacacttgctcaccatgctcagcgcaattcttatgatggaagtaagagtgaatcagaaaccatcgaccttaattcctggaccaggagtggtgggcctctaatgaggacatcatctgctgacaagttcatcagtttcattcataaccttgagatcgacacggaattaactagggcatgcactgtggagggtaatgctgcaggtatttggtcagagcctaccttcccaagcgatccaccgccgaacaatagctcaagtgttactatgccaggtagatgcacagaaaattctgagactgaggcatgcaacactgccaacaccagagccagtcaggcttctactcccacgagcatggctgtttgcgaaggggatttgctgcagcctgagagcactagtaacggtatcctacttaacattgtgaaaagaaaagggatgccctacgggctagtgtaactgaattggccgaaagctcctgctcacttgataatgatgcttttgtagcttcgcatcaacctcgagctggtgattagattcttcttgattttggaaggtcattatatagccacagcagcaacgctgtaggacgaaattgtacttgatctatttgaagagcaactatatgcgtgaattcagcaatgatacttggaatgttcaatcatctgttggctacatgaacatgctgcggtttattagtcttgcacacacttgtcacaacagcagaagaaatagcggtaatactccctcccaatcccagagctggcataaatgcctcaactaatcctcaaacgccctgaggttattgtttacggctgtgaagcctccgtccaccatgaggttgaccgcgctgacgtacctcgcctcgtcgctggccaggtagagcaccgcctgggcgacgtcctcgggcatggcgtcgacgcccttgaggttggcctcgccgccgacaaaggccaggaagtccttgagcgcgtcatctgcgcgcgcgccctggggcaggtgcggcatcgacagcgccgtgggcacggcatagggggacacgcagttgacgcgcaccccgtggcggccgagctccgcggcgacgctcttggtgagcccgaccacggcgtgcttggacgccgtgtagacgtgcgggcccgtcccgccgatggcgctggccacgctggccagcgacacgatggagccccgcttccgcgggatcatagcgcgcgccgcgtgcttcatccccaggaacacgccgtgcacgttgacgtcgagcaccctgcgcgcctccgcgaagtccacgttgcggatgtccgtcaccttggtgcccgtcacgccggcgttgttcaccatcacgtccagcgcgccgaaccgctccgccgcagcgtccacggcgcggctcacgtcctcctccgacgtcacgtcgcagtggacgaacatggcgccctgcgcgtcacctcccagggcgtcgcgcagctgctgcccagcctcatcctggatgtccgcgatgcagaccttggcgccgtgctccatgaagaggcgaacgatggcctcaccgatgccggtggcgccaccagtgacgagggccaccttcccttccagcctgtgtttggggcaagaaacgcaagatcaaatctgaaggacaaaaacacaggcacagctactggatggagatggagcagcaccgtactatggtgttgcaactggatcgactgtatgccgatgtatactgcacgtttggaacagtagaatggttgaggatacacttggcacaccatttcctattttcctcccataaagaagagagggggaaatgaccacttcgctcgctaaaagataagcacagagcaccagtgcttggcctgggtggatccttcaattcatcgcccttcgacgcgaaaaggtggaaattttgatcaatatcttggataagcccgccttctttttggagtaacaagtaggttgaactgcaacagcaaccgagctgtgcagcatagatgcaagccatggacgggggagtggagctaggagcagggaacccacgcacgagccatggatcgggggaaaattgaagaaagaagcagggcacgcaccgcttactcgaggaggagaaggacggcgaggagcccgcggcggccatcgtctttagatcggcgcctgtgcctcctccgcgctccggtggtcgccgaatccaagtgcgcgctgtcgttgcgggagcgagcaagttgggaaggcgttgtcaaaatctgggtggaggagctggcgcacgtgggccagtaaacgacagcgcaccgg

SEQ ID NO: 1151 - DNA, 2112 bp, Zea mays
gaagaataagaccccgtctctctctctctcttgagtcttctcctccaccccgccggcccctccaccacctcgatctcatccgatgccctagctaggcgagcttcgcatggattcacctgcggctgcgtcgccttcgctgctccgggacgactcgtgccgccgccgctctccgtccaccgcgtgaccgcaccaccgcccgctgatgaccagcgccggcgtcaacgtaccgggcgacgacggggtcgggaacccggccgccgcgtccgggtccgcctccgccccagaatgccggacgatgcagcgcaggcggcggcgcctcgagccacaaggatccggcgacgccgccgcggggccgagctgggtgcgccggctccgcccggccgcctcccggttctcgccgtcgccgtcgcagggctctgcggacaggcccaacgacgaggagcaggaagaggatgacccggacgtgcaggagatggagctcgtcccgctcccgccggcggggccgcaggagctccagcctgccgacgtccccgcgcaggtgtggcccgtggcgttcggctccctgtccatggcggggcggatgcgcatgatggaggacaccatctcgctccacccggacctgtgcacctgggccgacggctcgcccgtgcacttcttcgcggtcttcgacggccacggcggctcccatgtgtccgcgctgtgccgcgaccggatgcacgagttcgtggcggaggagctgggcaaggagggggccgccttccttcggcggcggcaggagtggctggcgtggggcgacggcgccggcgccgagacgagcgccgcggcgttcgtcagggggccccgcggcgcgtggccggagcgcgaggaggaggagcgcgcgtggcgctcggcgctgcggaggagcttccgtcgcgccgacgcgatggcggcgctggcgtgcgcgtgcgggcgcgtggcgcgcccgagctgccgctgcccgctttccagcgtcgtctccggcatcgtcgggtccacggccgtggtggcgctcctcgtccgcggccgcctcgtcgtcgccaactgcggcgactcccgcgccgtgctctgccgcgggcccgccggcacgccgcccgtcccgctctcctccgaccacaagccaaaccggccggacgagagggcgcggatcgaggcggccggcggcctggtggtgttcaacaacggccaccgcgtgcgtgggatcctcgccatgtcacgcgcgctaggggacaggctgctgaggcctgaagtgatcgcggagccggagatcaccgtgacggagcggacggcggaggacgagtgcatgatcctggcgaccgacgggatgtgggacgtgatcgccaacgacgtcgcctgcaacgtcgcccgccactgcctggaggacgggaacccgcctccagccgccaccgccgccgccgccaccgccggccgcgaggaggagccgcggtgcgtccgcgccacctcgctcctggccaggctcgccatcggcagggagaccctggataacgtcagcatcatcgtcgttgacctcaagcacagggagtgaatgactgagtgcctgcctgcctcgcttgcttgctctgtcgccgtgcatcagcagcttagtcgatctaggagtgaactggtaccgtgagaggaggtgtgatcgtctagacctggcatttccttcgttctttcgattcgaagataagattctagctgtttccttttttttggagagaaagaaagtggatggaagattgccgtccttaattaaatgaagacaacaacaacaacaaaaaaagagaggaaaaagagagcaattgtacagagtatgatatggtgcgacatttctgtgcattagtgaacttgcttccattttctcaaggacaatagttcggctggtgtctctctgcttgcttggctgtcgttctctatcgtctgctgggtctgtgggatgaatttttactgcagcagctttgggggagcggcagcactgcttgcagggtgctcatgcgatcttcagctcttaatgcagcggaaggtggcaccgccagatcactgatactcttgcagtttcgttttttgttttaattgcagagtttgatctttaatgtt

SEQ ID NO: 1152 - DNA, 2377 bp, Zea mays
ttggtgtgaagtggtgggcgctgatgaagacgcaccgggcactggccatcctatagtgctaccaaacccacgaggccacaagcacgggactggcatatattatccatgtaaataaaataaagtatataaataaccccataaaaagctaccattccactacctcccaaactcgcgagcgagtcgaggctccaaccccggcacatcacaggaggaggaggacgacgcgcccaccatggccatggcgacggccctccgcaagctctccgccaacgctctgcgccgccagccgctctcccgcatcacgccgctctactacatggcgtcccttccggcgacggaggagagatccggaatcacctggactaagcagttgaacgcgccgctggaagaggtcgaccccgagattgctgacatcatcgagcacgagaaggcccgccaatggaagggtctggagctcatcccgtcggagaatttcacgtcggtgtcagtgatgcaggcagtgggttccgtcatgaccaacaagtacagcgaggggtaccctggcgcaagatactacgggggaaatgagtttattgatatggcagagtccttgtgtcagaaacgtgctttggaggctttccgtttggacccggcgaaatggggagtgaatgtgcaacctctatccggttcgcccgccaacttccatgtatacactgcactcttgaagccacatgaaaggatcatggctttggatcttcctcacggtggacatctttctcatggttaccagactgacactaagaagatatctgcaacttcaatattttttgagacaatgccttacagattggatgaaagcactggattgattgattacgatcagttggagaaaagcgctgttctttttaggccaaagttgatcattgctggtgcaagtgcatatgctcggctatatgattatgaccgtatgcggaagatatgcaacaagcagaaggcaatacttctagcagacatggcacatattagtgggcttgttgcagctggtgttgttccatctccttttgattatgcagatgtagtgactaccactactcacaaatcactccgtgggccacgtggagccatgatcttttacaggaagggagtcaaagaaataaataaacaaggaaaagaggttatgtatgattttgaggacaaaatcaatgctgctgtctttcctggtctgcaaggtgggcctcataaccataccattactggcttggctgttgcgctcaaacaggcaactactccagaatacagagcttaccaagagcaagttatcagtaattgtgctaaatttgcgcagagcctgatttcaaaaggatatgaactcgtctctggtgggactgacaaccatttagttctggtgaatctcaagaataaggggatagatggttcaagggtggagaaggttttagaaagtgtgcatattgcagcaaacaagaacacagttcctggtgatgtttcagctatggtgccaggaggcatcaggatgggaaccccagcccttacgtcgagaggatttgttgaagaagatttcgctaaagttgctgacttcttcgatgcagcagtgaatctggccttgaagattaaggctgcaacgacaggtggaacaaagctgaaggactttgttgccactttgcaatctgatagcatccaagttgagattgcaaagcttcgccatgatgtagaggaatttgcaaaacaattcccaacaattggatttgagaaagagaccatgaaatacaagaactaatatctggatgacaaggtatgctctatctttgcacggtttagtcattatgcattctaatatacagtagctcagttgtgaaagggggtaccggagctggaactgccgttttcttacttggctgagcgcttccctcttatccatttgcagaagagaatgaggtcactcttcttgcagtaagcattcgaagcaagatgccacgatgattattgggagtttaaccatggtgtaatggcatcttatgttaaagagatgttggcaatttacagcatgtggaactttcgtcaatcatattgtagacacataccgcgagatgctatattgaccggacaattgcatttccatatgtgtacatcctttgcgttcaaaaaaaaaaaaaacgtacatcctgacacacactccacccccatccccactcacaagcacacgtcaccctgcccgcaaggctatctactcatctctataatcaaactatactatgtgaaagttatagtctacggtgcaaaatagtgttttagatgactatgtggataaactaatgaagacagtataactatatgtacaacctcatttaaaaggtctctaagagattaattaaaaaaatac

SEQ ID NO: 1153 - DNA, 3500 bp, Zea mays
tccgctttattattcgaaagggaaatactgggctggctgcctgggcgcagcagcggcactgttgcgacgcggacgaactcgcacacgcgcacacgctcctgcttgacgcttcttcgcaccccgcccgcttgcttaaatgccctagacctaatcattcccatcccccctccttccttttcctaccaccccacaccctctcccatctctctctccgtgccctcctcctcccccccagtccgccccacccttccggccctccccctcttttatatccagtaccatggtgatctccgagctcgggtgagctgatgaggtaagcgtcccggcccggcccggaacccagtacagtacctttgccagcctctggtgaatgagcgtcgcctcgtctcgctgcagaatgcggccgatttgaggaaggctgtgggcgcgatggatgcggtttcgggcggattcgctaggaggctgtagaggttaggttccggtgtcccccggcccggccggtcgtgggagatgagctcctcgtccgcggccagcatcgggcagccgccgccgcccgcgccgccgccggaagaagagaagaagtgcctcaactcggagctgtggcacgcctgcgccggcccgctcgtctgcctccccaccgtcggtacgcgcgtcgtctacttcccgcagggccacagcgagcaggtggcagcgtcgacgaacaaggaggtggacgggcacatccccaactaccccaacctgccgccgcagctgatctgccagctccatgatgtcacaatgcatgcggatgtggagacagacgaagtgtacgcgcagatgacgctgcagccgctcaatccacaagagcagaacgacgcgtacctgcctgccgagatgggaatcatgagcaagcagccgacgaattacttctgcaagacgctgactgcgagcgacaccagcacgcacggcgggttctctgtgccccgtcgtgcggccgagcgcgtcttccccccgctggatttcacacagcagcctccagcacaggagcttattgcacgggatattcatgatgttgagtggaagttcaggcatatcttccgaggccagcccaaaagacacctgctgacgactggctggagtgtgtttgtcagtgctaagagacttgttgctggagattctgtgctattcatatggaatgagaaaaaccagcttttgcttggaatcagacacgctacccggccacagactgtgatgccctcttctgttctttcgagtgacagcatgcacatcggactccttgcagcagcagctcatgctgctgcaacaaacagccgcttcacaattttctataatcctagggcaagtccaacagaatttgttatacccctttcgaaatacatcaaggctgtttttcacacgcggatatcagttgggatgcgattcaggatgttatttgagactgaggaatcaagtgtccgcaggtacatggggacaataacagaagtgagtgatgctgacccagtgcgttggcctagttcctattggagatcagtgaaggttggttgggatgaatcaaccgcaggagaaaggccacctagagtttctctgtgggaaattgagccactgacaacctttcctatgtatccatccctgttcccactgcgagttaagcatccttggtattcaggacttgctgctcttcatgatgacagcaatgctttgatgtggctgagaggagtaaccggtgaagggggctttcattctttgaacttccagtcacctggtataggttcctggggacaacagagactccatccatccttacttagcaatgaccatgatcagtatcaagcagtggttgctgccgcagctgcctcccagtccggtggttatctgaagcagcaattcctacaccttcaacaacctatgcagtccccacaggagcagtgcaatctcaatccgctgttgcagcaacaaatactacagcaagcgagccaacagcagatggttagttctgatgctcaaaatattcagtccgtgctcaacccaggtgctattcagcagcagctccaccaactccagcagatgcagcatactcataatgaccagaagcaaaagattcaaccagatcaacagtaccaagttgctagcagtgcggttctcccgagtccaacatcattaccaagccatttgcgtgaaaaatttggcttctctgatcctaatgtgaactcttccagcttcatcagctctagcagcaacgaaaacatgctggaatcaaacttccttcaggtaagttcaaaatccgtggatttgtctagattcaaccaaccagtagttagcgagcagcagcagccgcaacaacaacaggcatggaagcaaaagtttatgggctcacagtcaatgtcttttgggggctcggtttcgcttaactcgcccactagcaaagatggttctgttgacaacaaagttggtcgtgatgtgcagaaccagtccctttttagccctcaagtcgactcttcctccctactgtacaatatggtacctaatcttacctcaaatgttgctgataataatatatcagcgtttccctctggatcaacatatctgcaaagtccaatgtatggttgtctggatgactcttctggtttattgcaaaatacaggagagaatgatccgacaactagaacttttgttaaggtttacaagtcaggatcagtggggagatccttggacatcacccggttctctaattatgctgaacttcgagaggaactgggtcagatgttcggcattaagggtcagttggacgaccctgatagatcaggctggcagcttgtatttgtcgacagggagaacgatgtgcttctccttggagacgacccgtgggagtcatttgtgaatagtgtatggtacatcaagatactttcacctgaggatgtgcataagatgggaaagccaggaaacgatccacgctacctatcttagctacctatcttaaatcgatacatggagctctttctggctcccatgacgattctgcggcacactgcagcactgttcacgacggccctgctctactgtgctcgcatgttcgcccgtgtcatctctactctctagcatgcacaccgtgctcgtcttcagaagacgaactccccgtcgcttgtatccggtgcaggtcacccgctcctggactgatattttgtaggttccacgtaggaatcagtatcagcaactctatcctagtttgtggtaggctcgcgcggcgctcgttcctgtgtcgcatcaggatcttcggactaaaatgcgtagtcgaaaccgttctcgtgattcgtaagctattcatgtatttgaggattcctcgacatgctttcgacgatgaactgcaataatctgaatgcaggaggattgtttgagatttgtacttcagttttgtgtctgccggtttgcagggttgctgtgatgacgtttcaggtgttctctgtctgaaactattttttatggattggcgagttggtgaccgc

SEQ ID NO: 1154 - DNA, 2104 bp, Zea mays
tcgtcgtcttcggttcgtctcttctgttgctgggctcgtcgcgagggtagcagaggccagatgagggacagagcaagcgagagaagctgaagaaacaatttgttttttttctttcttatcgaaacagcacagaccagtgaaagagggagcgaattagcgaaaagaagaagacaatataaaaaataaataaataaataactacaccgaatgcagcgagcgaggtggaggtgggggaaaaagggcgaggtgacaccgtgacagagagaaggcgagggagggatcacgaggtgtgcttcctcctccgcccaatcctgcccaaccaaatccgccagcgccgcctcctttacactcccacctctgtcccggagcaaaaaaaggagggagaggctcgcttcttggatcgcggggtcacgggacgcgcgccgcgggccggtacgctgctgctggcggactgctcgacccttgcctaccagctgctgcctgctgctgcttccttggctggcgccggcgagagacggaggcgaggcgaggcgaggcgacgacgatggaccgggcggcgctcaccgtgggcccggggatggacatgcccataatgcacgacggcgaccgctacgagctcgtccgcgacatcggctccggcaacttcggcgtcgcgcgcctcatgcgcaaccgcgccgacggccagctcgtcgccgtcaagtacatcgagcgaggcgagaagattgacgagaacgtgcagcgggagatcatcaaccaccgctccctgcgccaccccaacatcatccgcttcaaggaggtcatcctcaccccgacgcacctcgccatcgtcatggagtacgcctccggcggggagctcttcgagcgcatctgcaacgctggcaggttcagcgaggacgaggcgcgtttctttttccagcaactcatatcaggggtcagctactgccattccatgcaagtatgccatcgcgacttgaagctagagaacaccctgttggacgggagcaccgcgcctcgcctcaagatatgtgattttggctactcaaagtcatcagttctacactcgcagccgaaatctacagtgggaactcctgcatacattgctcctgaggttcttctgaagaaggaatacgatggaaaggtcgctgatgtgtggtcatgtggagtaacgctgtacgtgatgctggtcggtgcatatccatttgaggacccagatgagcctaagaatttcaggaagacaattcagagaatattgggtgtgcagtactcaattccagactatgtccacatatctccagagtgccaaaatcttgtctctaggattttcgtcgccgacccagccaccaggatcaccatccctgagataaggaaccatccatggttcttgaagaacctgccagctgacctaatggatgacagcacgatgagcaagcagtacgaggagcctgagcaaccgatgcagagcatggatgagatcatgcagatcctggctgaggcgaccattccagcagctggtccccatggactcaatcagttcctgaacgacggccttgacctcgacgatgacatggacgacctggactcagataccgatcttgacctggaaagcagtggggaaatcgtgtatgctatttgacagcagcgaggcaatgcgtatcatcagtcgtgctcagatcgtttgttgcgccgcaggttaccgagataattagagagacaggggggaggtatctgctggagatgctgctcgtgtctgatgccgtgatgcccccctttttttcatcctgttatgtttggctgttgtttggttgtggtgcacctccagtgttttacaacagtttggcccttcggaattggttgtgctagaacctcgtccatctgagaagaccctttgtttttgcatccccagctaagagagtgaagtacttgtataattatactgtttgtgtcatatgtatttggtgtaggaaaataaagaaactccattgcccgttcttgttccttccgtgtctcacgaattttttcagaaccctctcaattttagtgtctttttggctgctgtatctcacggctgaatcaccaaggcacaatattttaaacgactgtcgcc

SEQ ID NO: 1155 - DNA, 2565 bp, Zea mays
cccgggtttaaaagccgtccctccgtctccgtctctccatcagacagacgcagactctctcacccgactcgtcagacgtcagccagcagttcgaaaccaaggattgatccaggagcttccggaaggcgaggcgcgcgcgcagcgtcgaggtgctggtgccggtgccgcccatggatcgggctcgcggatccgcgttcctgctcggcgtcctgctcgcaggatccttgttcgcgttttcagttgccaaagaggagaccaagaagctcgggaccgtgatcggtatcgatctcggtaccacctactcctgtgtcggtgtgtacaagaacggtcatgtcgagatcatcgccaatgaccagggtaaccgtatcacaccctcatgggttgccttcaccgatagcgagaggctcatcggtgaggctgccaagaaccaggcagccgtcaaccctgagaggaccatctttgacgtcaagcgtctcatcggaagaaagttcgcggacaaggaagtccagagggacatgaaacttgttccctacaagattattaacaaggatggcaagccctacattcaggtcaagatcaaggatggggagaacaaggtcttcagccctgaggagatcagtgccatgattcttggcaagatgaaggatactgctgaggcataccttggcaagaagatcaatgatgctgtcgtcactgttcctgcgtacttcaatgatgcgcagaggcaggcaaccaaggatgctggtgtcattgccggcctcaatgttgctaggatcatcaatgagccaactgctgctgctattgcctatggtttggacaagaagggtggcgagaagaacatccttgtctttgaccttggtggtggtacttttgatgtcagtatcttgaccattgacaacggtgtgtttgaggtgctggccaccaatggtgacactcatcttggaggtgaggactttgaccagaggatcatggagtacttcatcaagttgatcaagaagaagtacagcaaggacatcagcaaggacaaccgtgctcttggaaagctgaggagggaagccgagcgcgccaagagagccctcagcaaccagcaccaggtccgtgttgagatcgagtccctctttgacgggaccgatttctcggagccgctgacccgtgccaggtttgaggagctgaacaacgacctcttccgcaagaccatgggccctgtcaagaaggccatggaggatgctggccttgagaagagccagatccatgagatcgtcctggttggtggaagcaccaggattcccaaggtccagcagctcctgcgggactacttcgacggcaaggagcccaacaagggtgtcaaccctgatgaggctgttgcctttggtgccgctgtgcagggaagcatcttgagcggcgagggtggtgacgagaccaaagatatcctcctccttgatgtggctcccctcaccctgggtatcgagaccgtcggtggagtcatgaccaagttgatcccgaggaacactgtcatcccgaccaagaagtcgcaggtgttcaccacctaccaggaccagcagaccactgtctccatccaggtctttgagggtgagcgcagtatgaccaaggactgccgtcttctcggcaagttcgacctcaacggcattgcgccagctccaaggggcacaccccagatcgaggtgaccttcgaggtggacgccaacggtatcctaaacgtgaaggcggaggacaagggcacgggcaagtcggagaagatcacgatcacgaacgagaaggggcggctgagccaggaggagatcgaccgcatggtgcgggaggcggaggagttcgcggaggaggacaagaaggtgaaggagcggatcgacgcccgcaaccagctggagacgtacgtgtacaacatgaagaacacggtgggcgacaaggacaagctcgcggacaagctggaggcggaggagaaggagaaggtggaggaggccctcaaggaggcgctggagtggctggacgacaaccagtcggccgagaaggaggactacgaggagaagctcaaggaggtggaggccgtgtgcaaccccatcgtgtcggccgtgtaccagcggtcgggcggcgcccctggcggtgacgctgacggcggtgttgacgacgaccacgacgagctgtagatggttgtagatggtggtggtgacgtggagtgccgggagccgagccaaattttgtaacggtgtttagcggcggacaatacttattactaatcttggtgctgctctgccaatagccgtgctgagcgtagtaactgtttgtttgtaattttttttcttctacttccttggttgttcaggattcgcattcgaattttatgtgaaaaaaagaaggcgcgcttttaaaatcttgcatttgcccccttgtggtaataatgctaattaaatggtgcaaagtagattgcttgtgactgggtttcgtgtgagttgggatgttagatttgaatgagttcttcaagagattctcatccataccaccattttaggtgcaattttaatctattcactactttttcttcgagttgtc

SEQ ID NO: 1156 - DNA, 929 bp, Zea mays
ggggactcccccgcgtccgcttccctcgcccccccagtccccagacatggcgccctgcgcgtccccgtccgccctcgcgctctccgccagcacgcgggtcagcatcctccggctcccgctggcgctgcggcagcgggcggaggcgcgcgtgcccggcgcccagttccgcccgtcgaccgcgtgctcctgggcgcgccccttgctgcccgagctcgcgggggcggtccctcgtgccggcgcccgcggcactggcaggaggacgcagccgctgttccggcctcgcgcattgacgacgacgtctcagattgccagctgcgccttcaccctgggcacggtcgccgtcctccccttctacaccctcatggtcgtcgcccccaacgccgacatcaccaaacgcaccgtggagagcggcgctccctacgtcgccctgggcctcctctacgcctacctgctctacctgtcctggacccccgacaccctgcgcgccatgttcgctagcaagtactggctccctgagttggcgggcatcgtgaggatgttcgcgagcgagatgaccgtcgcctccgcgtggatccacctcctagcagtcgacctcttcgcggcaaggcaggtgtaccacgacggcctcaggaacaacgtcgagaccaggcactctgtctcgctgtgcctgctcttctgcccggttgggatcctggctcatgtgctgaccaaggtactggcaggggcagttgcccgctcacactgatgattgcaattgggtggttgtattgtatctaggattcttccattgttaccatgtggagatgtggattgagcggaattgatagggtttaccgtttgattcaccaaatgtaacgtaaatgataagagtaacgattcacactcgaataccggtggtaataaatttaaataaggcggtatccatttat

SEQ ID NO: 1157 - DNA, 1919 bp, Zea mays
cccttgtgggcactggggccggcaacttcagcagtcagcacgagaacaaaggtagcaaagcaccgggcagctttccctttacgcttcccagttcccactccactcatcctcacgcgccgccgccaaccggcgagcaaaccgaacgaaccagcaatgccggcggccgatccccccgtcactgacgcggtccccgatgaagatgcggctccccgaccatctccacctccgccgccgccgcggccccggcccctctccctcgcctccgcgctcccattctggttctacttcgccgccgccgtctccctcctcgcgctcctcctcccccacctcctgcctccctcctctcccgcgcctctcccgcctctcctccttggacacctcgccgcaggccgcttcctcaagctcgatccagcccccggcctgttcgccgtgacctcccgccccacggccgccgccggcgactcccccgcgcaccgcgtcctcgtcctccctggcctcgccgcgggctccttgtccttccgccgcgtcctctcgtcgctctcctcccgcggcgtccacgccgcggcgctcgacctcccaggccagggcctctccccggcgtcgcccgccgcgaccgcgcccgcccggaccagcgcgctgcgggagatcatgaaccgaggcgtgttccacgccttcgagcatctcgtgcagaccggcgaggtcccgtaccaggaggaggaaccagccgcctcggcggcgcggtctccgcacgcgcccgacgaggcggccgcggccgtcgcgcgcgccgcggaggcgctcggcgtgggccccgtccacctcgtcctccacgactccgcgctcgcggccggggccgcgttcgcgtctgccaacccgggggccgtgcggagcgtgacgctggtcgacgccaccgcgtccctgccggcgttcccggccgcggtcttcgacgtgcccgtgctggggaggctggtgctccgggtgccggcgctgttccgcggcctggtgcggctgtgctgcgtccggggggtcggcgccgaggaggcagaggcgtaccgagcagcgatgcgtggggaggggaaggcagaggcggtggtcgaggcatggaagtcgatgaaccacagcttccagcttggggagtggagggtctcttcggaggaggtgaggaggctgccgatgctggtgctgtggtcgggttcttggtcagatatgtggatcgacgaggggaagaaagtggcggctgcattgcctgacgccaaattcatctaccactccggcggccgatggcctcaggtcgatgcctttgaggaaatttcaggggtgatcaccgagtttgtaacctcagctgaggaagctggaagcagcaggtggtgacgttgagtaggatatatacactccttcgaggatcgttgagcaaatgtaacctggagcagttttcagaccttttagttggtgggtgcagtgacaagtgcaacttgagattttttgttcctggagagtttctgcttgcagcgtctgtaccgagttctgactttacactagcgtgttttttttaactttaatttgttgctaaatggtgtacttgttgtcttgcttcagtttgtaaaacgtgtgtcactgactcatgctagtgtagtagcatgtactcagtttagcgtcgttttgaggtagcgtgttctgagtaatcacttgttctgagtaaggctctgcattgcagcaatggttgccgatatctctccgccaaggtggtttcgggacaggttcaggtagttgagtattcggctattaatggttatttcgactgaggtctaggtaggtgagcaagtacttcccatctccggcgacgcaccagtgccggaaaccggcaggaagccaccggacagggagccggtcgccggcgatccagcgcatcggatcgggcggcg

SEQ ID NO: 1158 - DNA, 2302 bp, Zea mays
aaccaagccagatcatactagtacacaccacactcccccggctagcaccgtgctctctagctagctagctaagctactactgccctctcctttccaggcgactttgcaaccctagcaagagcattttcgccatgtctcccactatggcttcgtcgttgtgcgtatttgcagcgatgtctggcgccagcggcaggccgtcggccggtggctcggcggtaccgggccgtctgtccagcagcacacaggggggcaagggaaagcgggccgtggtgcagccgctcgcggctagcgtggtgacggagacgccagcgccggccgtagctccggctcggcccgtcgtcgacgccccgccgcgccgccgtgggggccgcggcaccgtcgagcacgcggcgtggaagagcgtccggcaggagaggtgggagggggcgctggagctggagggagagctgccgctctggctggatggcacctacctgaggaacgggccgggcctgtggaacctgggcgactacggcttccggcacctgttcgacggctacgccacgctggtccgcgtgtcgttccgcgacgggcaggcggtgggcgcgcaccggcagatcgagtcggaggcgtacaaggcggcgcgcgcgcacggcaaggtgtgctaccgcgagttctcggaggtgcccaaggcggaggggttcctctcccacgtgggccagctcgccaccctcttctcgggctcctcgctcaccgacaactccaacacgggcgtcgtcaggctcggcgacggccgcgtcctctgcctgacagagaccatcaagggctccatcgtggtcgacccggacacgctcgacaccatcggcaagttcgagtacacggacaggctgggcggcctcatccactcggcgcaccccatcgtgacggacaccgagttctggacgctcatcccggacctcatccgcccgggctactcggtggtgaggatggacgccgggaccaacgagcggcggttcgtcggcagggtggactgtcggggcgggccggcgcccgggtgggtgcactcgttccccatcaccgaccactacgtggtggtgccggagatgccgctccggtactgcgccaggaacctcctccgcgcggagcccacgccgctgtacaagttcgagtggcacctcgagtccggcagctacatgcacgtcatgtgcaaggctagcggcagggtcgtggcgaccgtggaggtgccgccgttcgtcacgttccacttcatcaacgcgtacgaggagaaggacgacgagggccgcgtcaccgcgatcatcgccgactgctgcgagcacaacgccaacacctccatcctcgacaagctccggctccagaacctgcgctcttccaccggccaggacgtcctccccgacgccaggtacggtaccaagtttagatcagagagggaaaggctggtgtctgagtctgacgtacgggccgtggtgttgggcgggacgggacgggacatacagggtgggccgcttcaggatcccgctggacgggagcccgttcggcgagctggagccggcgctggacccggaccagcacggccgcgggatggacatgtgcagcatcaacccggcccacgtcggcaagaagtaccggtacgcctacgcctgcggagcccaccggccgtgcaacttccccaacaccctcaccaagatcgacctggtggagaagacggccaagaactggtacgaggagggcgccgtgccgtcagagcccttcttcgtgccgcgccccggcgccgtggaggaggacgacggcgtcgcgatctcgatggtgagcgccaaggacggatcggcctacgcgttggtgctggacgccaagacgttccacgagatcgcgcgggccaagttcccgtacgcgatgccctacggcttgcactgctgctgggtgcctaggagtacctcagacgcgtagcgctagcagatcgttcgactctgctgctcacatctcccacaccgtacgtgccgactcgaccgacagacatgggcatagtagtacaaacagaaaggtgtctctgctgctttatttcctggccttcggctgaatgggaaaaaggtatacacgtcgtagtgatgtattgacagacatcgtatacgtcttcccagcaaaatgtggctgtagcaattacacgcgtttaattgtacagagctagctcatgtgagcgagcccatagtattgttcattatgtacacatgtagtacagtgttttgtttttttaaaaaagatgcccagtacagtaatattccttcgtcgttcttttgcccttgcgtta

SEQ ID NO: 1159 - DNA, 1479 bp, Zea mays
cagatagacctccagtaccagtcacacacgcgaacgcgacactcgcaaagtcgcaagcgggtcgcaatcaaggctgctcccctctatctccgtgttcgcccctcggttcaccacccgccgccgccgagacctcctcctcgccggctactcctgaccccataaaggcagcgctcggaggtggccctctgtcgggtggagtggtggacacatccgcgcccatggccaaccgcggcgctgcggccggcaagctcaccgtcgccgagacattctccaacctcagggagcaaggcaagagtgcattcatcccgttcatcactgctggtgatcctgacctggcaaccacatcaaaagcattgaagattctcaattcctgcggttcggatgttatagaggttggcgtaccatactcggatccactggctgatggaccagttattcaggcttctgcaacacgggcgcttaagaaaggcactacactcgattctgtcatagaaatgctgaagggggttacacctgagctttcttgccccattgttcttttcacatactataatccaattctgaaacgtggtgtgggaaacttcatgtcttttatcaaacaagctggcatacatggacttgtagtgcctgatcttcccttggaggagacagcgttgctgaggagcgaggccattatgcacaacatagagctggtgctgcttacaacgccaaccacgccaacagatcggatgaagggaattgcacaagcttcagaaggatttctctatcttgtgagcgctgtaggggttacaggtgcacgctcaaatgtaaacttacgtgtagaacaccttcttagggagatcaagaaggtatattttttggtgtctatgacatgtggggccagtggcatacaaatggttatcttcctggctttacaggttacagacaaaccggtagctgttggtttcggtgtatcgactccagagcatgtgaaacagatcgtgggctggggagcggacggtgtgattgttggcagtgcgattgtgaggcagttgtgtgaggctgctactcctgaagagggtctggaaaggctcgaggagtacgccaggagtatgaaggctgctatgccgtgagctgatctcactccccgtcacaggcaagtgctgtacgggtcgttctcgggtggtgagaacgaagtctggctttgcctataatagaaaagggttaaactgagttagtgcgacattttgatggaaaagcgagtgattgcgagatatcagttcatgcttattggcagatcctttttttttttttttgctgaaagatggaaatgttagggatgaggttgccctggcctcttgagaggataggaataagagaggataagttcgttatgatttatatggctttccgcttgaaccccaccagctggtgtccatggggatgcgggcagagcagtgtctgattggctgcactgaaaatgacattaccttcagacaa

SEQ ID NO: 1160 - DNA, 3308 bp, Zea mays
gcctcagccagttgatattgtcccaacctggcattttgctcccattcgatgacttttcaagccgcaagcccaccgaacaacgtgcgcgcggacgttttcttggcaaggcccgaatccttccaatccaatccccatccgggcaaccgtctgccgtgttgccccattcctgccatgcaccgcgtggcgcctagcctccgcatatgcttcctttataagcttcaaacaacaactcccttttgcagattcctcgttcgcctgctgcacgctcaccactgtacgtccccgatggctgaagccatcagcgcgaccagctcgtgcctggaacccctgtgcggttgtctggaaagcacaggcgtgttcgaggcagtgggccgggaggtggccgcgttccttcgcatcaagtcgaattgtggcgacctcgagaaggcccgggacagcctgcgcgccgtcgagacgacagtcagggcgcgggtcacggcggaggaggacaagctgaacgtctgtgatcctcaggtgcaggcgtggctcaagcgcgtcgacgagcttcgcctggacaccatcgacgaggattacagcagtctgtcggggttctcttgcctctgccagtgcaccgtgcacgctcgtcgccgcgcctcgatcggcaagcgtgttgtggacgcgctggaggaggtgaacaaactgaccgaggaaggaaggcggttcaggacatttgggttcaagccaccgccgagggccgtcagtcagttaccccaaactgagaccgttgggttggagcccatgttggctcgggtccatgatttgcttgagaagggcgagtcgagcataattggtgtgtggggtcaaggaggcatcggcaagacgactctcctgcacgccttcaacaatgatctcgaaatgaaagaccaccactaccaggttgttatttttattgaagtatccaattcagagacactgaacacagtggagatgcagcagactatctccgataggcttaatttgccatggaatgaatcagagacagttgagaaacgggccagattcctattgaaggcactggccaggaaaagatttctattgttacttgatgacgtaaggaagagattccgactggaggatgtcggtatcccaactccggacacaaagagcaaaagcaagctgatcctgacatcacgtttccaagaagtatgcttccagatgggtgcacagaggagccgcattgaaatgaaggttttggatgataatgctgcctggaacctgttcttgagcaagctgagcaacgaggcttttgcagcagttgagtcaccgaatttcaacaaggttgttcgggaccaggccaggaaaatattctccagttgtggaggtctaccacttgcactcaatgtcattgggactgctgtggcagggttggaaggaccaagagaatggatttcagctgctaatgacatcaatatgttcagcaatgaagatgtggatgaaatgttttatcggctgaaatacagctatgacaggctgaaacccactcaacaacagtgctttttgtactgcactcttttcccagaatatggatctattagtaaggaaccattagttgattattggctggctgaaggtttgcttctcaatgatcgtcaaaagggtgatcagataattcagagccttatttcagcatgcttgttgcagaccggtagctcattgtcatcaaaagtaaaaatgcaccatgtaatcaggcatatggggatttggttggttaacaagacagatcaaaagtttctcgttcaagcagggatggctttggatagtgctccaccagcagaagagtggaaggaatcgacaaggatctccatcatgtctaatgatatcaaagagcttcctttctcaccggaatgtgaaaacctcactacgttgttgatccaaaataacccaaatttgaacaagctgagttcagggtttttcaagtttatgccctccttgaaagtgctggatctttctcacactgcaataacaacactcccagaatgtgagacattggttgcattacagcatctcaatttgtcacacacacgtattaggttattacctgagcggctgtggttattgaaagagttgaggcatctggatctcagcgtgactgctgaactcgaagataccttgaacaactgctcaaggttactcaatttaagagttcttaatctctttcgcagtcactatggtattagtgacgtcaacgacctgaatctggattccctgaaggcactgatgttccttggaatcactatttatacagagaaggtgttaaagaaactgaacaagactagtcctttggcaaagtcaacatatcgtctgcatcttaagtactgtagagaaatgcagtcgatcaaaatctccgatctcgaccacttggtgcaactcgaggagctgtatgtcgaatcatgctataatctaaacactcttgttgctgataccgagctgactgcatcagattcaggcctgcagctcctcaccctctcagttcttcctgtgctggagaacgtcattgttgcaccaacgccccaccattttcagcacatccgcaaattgaccatttcgagttgccccaagttgaagaacatcacatgggtcctaaaacttgaaatgctcgagaggctcgtcataacccattgtgatgggttgctgaagattgttgaagaagacagcggtgatgaggcagagacaacaatgctgggtcagggtcatccttctgaagaacaggaagataaacggattgatggtggtcaaagtgtgtgcaagagcgatgacaatgcgcatgctgagctcctgaacctgagatcaatcgtgctgactgatgtcaagagcctgagaagtatctgcaagccaagaaattttcccagcctcgagaccatccgggtggaggattgcccgaatctgagaagcatcccactgagcagcacgtacaactgtgggaaactgaagcaggtgtgcggttcagttgaatggtgggagaaactggagtgggaggacaaggagggcaaggagagcaagttcttcattccaatctgacaggcccctccgttcagctgttctcggcggttgctgtgtcagttggcaggaagcttcgttcaatgctgccacgaataagcggttcggaatctgtatatgcgacgagttgtttcttttacaggtagtctgtgtatattgcttgtgttcacaaacctgtacatgatatgattcattcatgtattgctgtaaatgcgatcaataaaattccatttgtctacttggataaaaaatagtcctctatgaccacttca

SEQ ID NO: 1161 - DNA, 2258 bp, Zea mays
cagggccccacaccgcagctgccgtggaaagttaaaagcgcccgcggggatacacgacgacaacacgaggagagactgcggcagcggagtgcagagagcggacgcaacgcaacaccgcccactctctgtcactgacgatcgaagtgaggagcgcactgaagccagccgccgatgagtcgcctcctctcgcggcagcaccttgccgccgtccgtcgatctgcaccctttgcgtgcgtgtccaggtgatcccgcctctcgccctgctacccccccccccccccccccccccccctcctcccgcgatctgtcgcgcgtgcaaactgaggtgccgttgcgtggtctgatgcgaattggggggatcgcactgatggtggtgggcagtgcggaccctgtggtggcgatagggtttcgtgccctgctaaggtggctgcacacgccgtcattcgcgacggtttctccgcaagaggtttcaggttccagcccagcggaagtgcagaattttgtgcagggcagctggacagcatctgctaactggaactggatagtcgatcccctgaacggtgataaattcatcaaagttgctgaggttcagggaacagaaataaagccattcgtggagagtttatctaaatgcccaaagcatggacttcacaacccacttaaagctccagagaggtacctcatgtatggagatatatctgcaaaagctgcgcatatgctgggccaacctgcagtcttagatttctttgctaaacttatccagagggtatctcccaagagctaccaacaagctcttgcagaagttcaagtttctcaaaagtttttggaaaacttttgtggagaccaggtacgctttctggcaaggtcatttgctgtaccaggtaaccatcttggacaaagaagtaatggctaccgttggccatatggcccagttgcaattatcacaccattcaattttccgttggagatccccttactacaattgatgggagcactatacatgggaaataaaccagtactcaaggttgacagcaaggttagcattgtgatggaacaaatgattaggttgcttcatgattgtggattgccagcagaggatatggatttcataaattctgatggtgccgtaatgaacaagcttctgttagaggctaatccgaaaatgacccttttcactgggagttcacgggtagcagagaaattggctgctgatttgaaaggccgagttaaattggaggatgctggttttgattggaaaattcttggtccagatgttcaagaggttgattatgttgcatgggtttgcgatcaggatgcttatgcttgtagcggtcagaaatgctctgctcagtctgttctattcatgcacaagaattggtcttctagtggtctgcttgagaaaatgaagaaactttctgaaagaaggaagcttgaagatttaacaattggtccagtccttacagttactacagaagccatgatagagcacatgaacaaccttctcaaaataagaggatcaaaggttctgtttggtggtgaaccgttagcgaatcactcaattcccaaaatttatggtgccatgaagcctactgctgtatttgttcctctagaagaaattctaaaaagtgggaacttcgagcttgtgacaaaggagatatttggtccattccaggtagtcacagaatactctgaggatcagcttgagttggtcttagaagcctgcgaaaggatgaatgcgcatctgacagctgcagttgtctcaaacgacccgctattcctgcaggatgtacttgggagatccgttaacgggacaacctacgccggaattcgagcgaggaccacgggcgctccacagaaccactggtttggcccggccggtgatccgcgaggcgcagggatcgggactccggaagccatcaaacttgtctggtcctgccacagggaagtcatatatgacgtcgggcccgtgcccgagagctgggcgcttccttccgcgacctgattagctagacgaggatagactattccatgtcatcacgagaaataaaaggggaagataagcgaagccagcaggactggagcgaccgaccgagagcgagtggctgcatgcctaggcattcattctctgcacgcaactgcactttcaaccctggagaaaacataataaatgctcgttcccctgtacttgagatacatggtacttggaccggaacgtcggacaactcgtctgttcgcagctgcactgggttatcttctta

SEQ ID NO: 1162 - DNA, 1098 bp, Zea mays
cgcgtgtgatcctgtggtgcggtgcgtggcctaaactcccaagcggatccatcttcatcagcatgtataaataacccctgcgcgcggtgcggccggcgccgaccggaaagagaccaaatatttcgcgctctgcccagccagcctatccactccagctccacttcttccccgcacaccacagtcacacgcgcagtgctagacgacgaacaccagagggcaggcagatgatgatggcgtccgttctcgccgtctcccggtggtcgtcgctgcttctccccctcctcctcctcctcctcctcctcctggtggcgacggcgtcgcaggccctcaacgtcggcgacctgctcgggacagcagcgccttcggggagccagggctgtagccggacgtgcgagtcgtcgttctgcatagtcccgccgctgctgaggtacggcaagtactgcgggatcctgtacagcggctgcccaggcgagaagccctgcgacgcgctcgacgcctgctgcatggtccacgaccactgcgtcgacacccacaacaatgactacctgaacacgcggtgcaacgagaacctgctgagctgcctcgacggggtgagcccggcggggccgacgttcccggggaacgagtgcgacgtcggccagacggcgtccgtcatacgtggggtcatcgagtcggcggtgctcgcgggcaagatccttcacaagcgcgacgacggccagtagccggcgtcctggcagtggcaggacaggagcgggccgacctgagtcagtgaggctagctcgcggttggtacagacagtataaagccgcttgtgctggatttcaaggttatgaacggccggaccacctgttggagttcgtttacgtattaggtttagttcatttactttaaaataaaatttagaataaatgtcaaagattcgtcatgaatctgaattcgtcttgtgcaacaaatttaaaactcaatccattaaactcaagtcagattttgtttttttaatctttttatgtgtggttatcctgaatataatctccctatataatagagttccctttaaatgtcaatgagaaacaatcaatctactgtaggttgaggttt

SEQ ID NO: 1163 - DNA, 1657 bp, Zea mays
aggaaagcccagataattacacactagcttcacggtgaaggcagtcggggtcacaattcacaactcccaacccaatccagcccagcaatcaacaattcccccggtcgttttcacttgacatcccccgtcccatagatcgccggcgatggctccggccgttgccgcggcggcgtcggcggcgatgaggcaggcactgcgggaccggcagatcctcgatgccgtgggcactggcgctgcggcgctctcgctggcaggctcctccttcatcgtgatctgctacctcctcttccgcgagctccgcaagttctccttcaagctcgtcttctacctagccgtctcggatatgttttgcagcttattcactatattgggggggccatcgaatgcattttactgctttgcacatgactacagtgctcatttcttctgtgtggcttcttttctatggacaaccaccatatcattcactctgcatcgcacagttgtaaaacacaaaactgatgttgaagaatttggatctattttccacttatatgtgtggggaacttcactatctaccactgtattacgttcgataggaagtgactacggaagaccaggcacctggtgctggattcagcagggaagcatggcaaaggtcctacatttaataaccttttatcttccactttggggtgccattttgtacaatgggtttacatactatgaagtaaaccgcatgctgaataatgcaacgcagatggctgctggcataagtgatcaatcaaatcagtctgacattagggcaggcaggaaggcatttaaccgatggggttattaccctctaattctaatcggttcatgggcgtttgcaactatcaatcgtctttatgactttgccaatccagggcacaggatagtctggctctcgtttcttgatgttgggttcgctggacttatgggcctattcaattccattgcttatgggctaaactcttctgtgcgccgagctattgcagagagaatcgacacgttcctacctgagagaataaaaaggagcctccctgctttgtcaaggctgaggagtcaacaggaaaatgaactcacttctcttatcgttgagggtaactgatatgtaatggaatttccatgcacacgaagccttttttttgtttatctgttcgttcttcaatctccaacaagggaatgcaacatcactgtaagagcagtgggttagtaacacgtcgaattggttccgctgtgtccattgttgatcgtcttaacacgagacctggggtttggggttcaccgctcccgctccggccggagtacataggagggctagagtaggaacagtcggtagatagactgatgttcatctgtagctaggtaagcagagtttgtttgttcagatgtacgagtataaccacctgtgtataatgcacattctagcgccacatggttgcaaattttcagttcccccccccccccccccttaccatttgttctggtaagggaatttttgtgtgcttttgagaactatatacttgatctttctatgtagcattcaattgattgttgtagtcggtgatggccagaactcagaagcactggagcttgcgtgctcaactgagatgacgtgcacttctaggcagcatccctccaacgatgttctcag

SEQ ID NO: 1164 - DNA, 2728 bp, Zea mays
cgcgccaggggtgagaagtatggtggccgaggagaggctggcgtgggcggtggagcgctcccctcggtcgccacgtgtgtcacgcagccgcatctcggttccctcctctctctctctcttcttctccctctccacctcctgcttgcactgttcgtctcctcagtaactgcacccacctccacacctacacccgagaggcggcggcggcagacacagacaccgtctctctcctccctttgtcgtcgtgtctctctgcatggaagcctccgccggctcgtcgccaccgcactcccaagagaacccgccggagcacggtggcgacatgggaggggcccccgcggaggagatcggaggggaggcggcggatgatttcatgttcgctgaagacacgttcccctccctcccggacttcccttgcctttcgtcgccgtccagctccaccttctcgtccaactcctcgtcaaactcctccagcgcctacaccaacacggcaggaagagccggcggcgagccctccgagcctgcttcggccggagaagggtttgatgcgctcgatgacatcgaccagctcctcgacttcgcgtcgctttccatgccgtgggactccgagccgttcccgggggttagcatgatgctagagaacgccatgtcggcgccgccgcagccggtgggcgacggcatgagtgaagagaaagccgtgccggaagggaccacagggggagaggaggcctgcatggatgcgtcggagggggaggagctgccgcggttcttcatggagtggctcacgagcaaccgcgaaaacatctcggccgaggatctccgcgggatccgcctccgccgctccaccatcgaggccgccgccgcccggctcggcggcgggcgccagggcaccatgcagctgctcaagctcatcctcacctgggtgcagaaccaccacctccagaggaagcgcccgcgcgacgtgatggaggaggaggcgggcctgcacgtccagctccccagcccggtcgccaacccaccaggatacgagttccccgccggcggacaggacatggccgcgggcggcggcacatcttggatgccccaccagcaggcattcacgccgcctgctgcgtacggcggcgacgcggtgtacccgagcgcggcaggccaacagtactctttccaccagggccccagcacgagcagcgtggtcgtgaacagccaaccgttctccccgccgcctgtgggcgacatgcacggcgcgaacatggcctggccgcagcagtacgtgccgttcccaccgcctggggcttccacgggctcttaccctatgccgcagccgttctcccccggattcggcgggcagtacgccggcgccggcgctggccacctctcagtggccccccagcgcatggcaggcgtggaggcctcggcgaccaaggaggcccgcaagaagcgcatggcgagacagcggcgcctgtcctgcctgcagcagcagcgcagccagcagctgagcctgggccagatccaggcctccgtccacctgcaggagccgtcccctcggtccacgcactccggcccggtcacgccgtcagcaggcggctggggattctggtcgccgagcagccagcagcaggtccagaacccgctctccaagtccaattcatcaagggcgccgcctccctcgctggaagcggcggcggtggcgccacagacaaagcccgcgcctgctggtgctcggcaggacgacattcaccaccgcctcgcagcggcttcagataagcggcagggcgccaaggcggacaagaacctgcggttcctgctgcagaaggtgctgaagcagagcgacgtcgggagcctcggccgcatcgtgctccccaaaaaggaagcggaggttcacctgccggagctgaagacgagggatggcatctccatccccatggaggacatcggaacgtcgcgcgtgtggaacatgcggtacaggttttggcccaacaacaagagcagaatgtatctgctggagaacacaggggaatttgttcgttccaacgagcttcaggagggggatttcatagtgatctactccgatgtcaagtcgggcaaatatctgatacggggcgtgaaggtaaggcccccgccggcgcaagagcaaggcagtggttccagcgggggaggcaagcacaggcccctctgtccagcaggtccagggagagccgcagccgccggtgctcctgaagacgccgtcgtcgacggggtcagcggcgcctgcaaggggaggtctccggaaggcgtgcggcgggttcggcagcagggagccggcgccatgagccagatggcggtgagcatctgaaagagcagcagactccgccatatattgatcgatcgaccaatcgatcgttagttctccaagttactattagctagctatagctcgaaacagctgaactgatgatgacgatggtaacctccgtcgtgtgtgctaagcatgtagcgtgctaggagatgatatattaaatataatcgagtagtagagccacccgctgtgtgacgctaaatttgtgtgcatggtttggtttgtgagttgggcccgtgcgtggctgtgtcatgtcgtggttaattagctatactagtcctgtctgtacatgcatggacatacctgatctctcggccattggtgtcggcgacgtgccattcggctaacaagacgacagctgcagcctgcagcaaaagctagaacattctacac

SEQ ID NO: 1165 - DNA, 1414 bp, Zea mays
ctcgctccctccacctccctccccccttgaccctcccagccgcaaaaccgcaggccgcatcccgcccgccgcccgccgcccacctgtggcaaccgccgcctacataaacgaccaatcgaccactcgccgaaccaagccacccacccaaaacccaatggcgtccaacctcctatccgcggtggcaatcgagaaggagacgccggagagcgagctgcccccgacgttcctccgcgaggacgggcgcggcgccgggtccgtgcgggcgcggttcgagtccatgatacggcgggtgcagggggaggtctgcgccgcgctcgaggaggcagatggcggtggggcgcgcttcgtcgaggacgtctggtcgcgccccggcggcggcggcggcatcagccgggtcctgcaggacggccgcgtcttcgagaaggccggggtcaacgtctccgtcgtctacggggtcatgccacccgacgcctaccgcgccgccaagggggaggccggcaagaacgaggtcgccgcggatggccacaagcctggccccgtgccattcttcgctgcgggtattagctcggtgcttcaccccaaaaatccatttgctccaacattgcattttaactaccgttactttgagacagatgcacccaaagatgcacctggtgcaccaagacagtggtggtttggcggtggtactgacttgactccctcatacatcattgaagaggacgtgaagcattttcattctgttcaaaagcaagcatgtgataaatttgatccaagttttcacccaagattcaaaaaatggtgtgatgattatttctatattaagcaccgtaacgagcggcgtgggcttggtggaatattttttgatgaccttaatgattacgatcaagaaatgcttctcaacttcgctacaaaatgtgcggactctgtacttcctgcctacataccgatcatagaacggcggaaggacaccccattcaatgaggagcacaaggaatggcagcagttgaggagaggtcgttatgtggagttcaaccttgtctacgaccgtggtacaacattcggcctaaagactggaggaagaatcgagagcatactcgtgtcccttccactcacagcacggtggcagtatgatcataaaccggaagaagggactgaagaatggaaacttctggacgcgtgcataaatccgaaggattggatctgattagccgaagtttctttattcttgagatcttttgttagttttcccttgtgtagcgctaagatatcagaccacgtgtagtttctttatttcttttgtatatctgtaggatcgtgaacaaatctgatataattctgcagctgtttgtatctaatctgctgctcccccccttccccccccccccatgtgaatgagagaatcattgccttgtgt

SEQ ID NO: 1166 - DNA, 1654 bp, Zea mays
  misc_feature (76)..(175): n is a, c, g, or t
atgtatattgtagaggtctgtgtcttgcacccagcttctggcttgtggctttgggctagtgtatttttcctacctnnnnnnnnnnnnnnnnnnnnnnnnnnnnnnnnnnnnnnnnnnnnnnnnnnnnnnnnnnnnnnnnnnnnnnnnnnnnnnnnnnnnnnnnnnnnnnnnnnnnccgcggccacccgcctcacctccgccgtcgaggaggacaagaggagctccccccttggggagggcgacgagcacgtggcggccagcggcgccgcgggcggggagttcgacccgggggcgccgccgccgttcgggctggcggagatccgcgcggccatccccaagcactgctgggtcaaggacccctggcgctccatggcctacgtgctgcgcgacgtcgtcgtcgtcctggggctcgccgcggccgccgcgcgcctcgacagctggctcgtctggccgctctactgggccgcgcagggcaccatgttctgggcgctcttcgtcctcggccacgactgtggacacgggagcttctcgaacaaccccaagctgaacagcgtggtcggccacatactccattcctccattcttgtcccctaccacggatggaggattagccacaggacgcaccatcaaaaccacggccacgttgagaaggacgagtcctggcacccgctaccagagaggctgtacaaaagcctggactttatgactaggaaattgcggttcaccatgccgttccccttgctcgcattcccgttatacttgttcgcaaggagtccagggaagtcaggatcacacttcaacccaagcagtgatttgttccaacctaatgaaaagaaggacatcataacatcaacggcatcctggctggccatggttggtgttctggctggtctcacctttctgatgggtcctgttacgatgctaaagctctacggagtcccatactttgtatttgttgcttggctggatatggttacatacttgcaccatcatggccacgaagacaagcttccctggtaccgtggacaggaatggagttatctgcgtggaggactgacgacgctcgaccgggactatggactgattaacaatatccaccatgacatcggaactcatgtcatccatcaccttttccctcaaatcccacattaccatctcattgaggcgaccgaggcagcaaaaccggttcttggcaagtactacaaagaaccaaagaagtcgggtcctctcccgtggcacctgtttggggtgctagcacaaagcttgaagcaagaccactatgttagcgacaccggagacgtagtgtactaccaaactgactcgaaaacgaacacctctgcacaaaaatctgattgacacagactatagaacgtagcgtattcttcatttttctcaggcgggctgtgcctgaagacctggccagcctcctgagacctctgattggtgtgtgtgtgaccgggttcgtcaattcaagaatgtaaggtggcgaagtattatcatgtatttgagtgagggtataattctttccaatggtcgaagtcggatgctgcttccgatgtaacgaactgtgattctttgggcaagaggtgtactattacagtaaagagtgaaaaaaaagagttagctacatgaaagactttctgagcactgtacg

SEQ ID NO: 1167 - DNA, 1796 bp, Zea mays
atggggcgtggcaagatagtgatccgccggatcgacaactccacgagccggcaggtgacgttctccaagcggcggaacgggatcttcaagaaggcaagggagctcgccatcctctgcgacgcagaggtcgggttggtcatcttctccagcaccggtcgtctctatgaatacgccagcacaagcataaagtcagtgattgatcgatatggtcgagcaaaggaggaggagcatgtagcagaccccaacacagagcttaagttctggcaaagggaggcagcaagcttgagacaacaactgcacaacttgcaagaaaatcatcggcagttgatgggacaagatctttctggactaggtgtcaagggacttcaaaatctagaaaatcagctagagatgagcatttgttgcatccggacaaaaaaggaccaactcttggttgacgaaattcacgaactgaatcgaaagggaagtctcatccaacaagacaacatgggattacacagaaaggtcaacctaattcgtcaagaaaatgctgaattatataagaaggtttttttataaagaaatacaatttttcaggatataagccctatcacatggttgactatgatttgtttctatgcccagctctatgagaaagaagcagaaggtgaagtcaaccgagattcaacaactccgtacaactttgtagttgcagagggtgccaacgttcctatccatcttgagcttaatattccactgcaagaaaatggtgttgagcaacctgtggctcctaaattagggttgcaattaaatcaatgaagacatgcaggacattgcctttgttctcattgtccttgtagtctgcaactcaaagcagcctaaaatgattggttgtaacaggcctaaaaacatagcaagacaaataaagtatgcatgccagagacagtggcaatggtagtgcaaatctatctcaaataacttgtgttatattgaataatccagcaaatggtttgttttttacacgttatgcaagtttgtttgaccaaaatggtatgtaacatgtacaaatttccaagtgaacttattgaaaaaattctataaagtgtgtatctggaaaattgaacttctgcttgtcttgaaagttacgtatggcagaagagcagatatcttttcccatttttatctacgcatttattccagaacaaagaagtgccataaaagggattctagataaacatatagtcgttcactaatcatttcgtcatttatggaagtataataacagtttagcaaaatgcagagaaaataaaaaagaaacaacgaattgccatatgagaacacaattccactagcttaagattatacaggaagccaagaaatatttggtatactgctacagcttggaaagctaaacctatgatcttgaaaacactggaattcaataattagacgagtatggagcaaactatttttatcctggacatgaaggcatgaagcaatacctctcaaacacgcaggcgaaaactttgactataatgtttgtattggacatgcaaatgatatgtatagattcgtctcagtacgtagttttctgctaaaattgtattgcatttaaaatatattaaggcgcacattcaaggaatcatggtagagtagtgttcataagaccatgtcaatgaccaaaacaggtccgaaagggcgctattctgcgcttgcctaagtgcacttatgtgctgggtgaggcataccacctcgcctagggggtaggtgggtacctacgcagcgcccaactgttgccggtgaaaggtggccagatc

SEQ ID NO: 1168 - DNA, 3399 bp, Zea mays
cctccctcctcttgcgcatttccaccacctcgcaccaggctccactcctctccttcccttccctccccctttcgctcccctcctcgctcgcctcgcttctcgccgagccacccgaccaattcccccgccccccgcgcgcccagatcgccgccattcccttccccgccctgccgcgacgatcccgctgccaccgcaccttctccctcccgtcgtcctcccctccccgcagctggcggtcggtcggtcggacggaggaagccacagccggcggccagagagcgccgcagcgtgcccgcggatgggctggtaggaggcggcggcggcggtgactgtgttagcggcggcggcggcagccatgtatttcgccaaactcgatgactcgcccatgttccggacgcagatacaatcacttgaggagagtgctgaattgctgagagagagatgtttgaagttccataaaggttgccgtaagtatactgaaggactaggggaagcatacgatggagatattgcatttgccagctcacttgaaacatttggaggaggccacaatgatccaatgagtgtcgcttttggtgggcctgtaatgaccaaatttacaattgccttaagagaaattggaacatacaaggaagtcctgcgctcccaggttgagcacatgttaaatgacagattactgaattttgttgacattgatttgcatgatgtgaaggatgctcataagcgctttgacaaggctagcctctcatatgaccagattcgtgaaaagtacctatcattgaagaaaggtacccgaccggacataacaacagcaattgaagatgagcttcacagtgctagatcttcatttgagcaagctcgtttcaacctggtcacttcactttcccatgtcgaggcaaagaagagatttgaatttttggaggctgttagtgcgacaatggattcacatcttcgttattttaaacaaggatatgaactattgcatcaaatggagccatatattaatcagattcttgcttatgcacagcaatcacgagaaagagcaaacaaggaacaagcttctctcgtagagaggatgcatgagtacaaaaggcagatagaccgggaaagtcggtcttctataaatggtttgaatgattcttataatggtgatcgaatgcagacaattggcagaagttcacataaacagatcgaggcagttatgcagtcaacttcaaaaggcaaggtagagaccatccgtcaaggttatctttcgaaaagatcttcaaacttgagagccgactggaaaagaaggttcttcgtacttgatagtcgaggaatgctgtactactatcgaaaacaaattactcggccacctgctggttgttccatgcaaagaaacgttaacccccctgaacatggttctgggttgttgagcagattgttctcttctcattaccatatacatgatgaaaagtctgtcgcacgtcatactgtaaatttgttgacatcgaccattaaagttgatgctgagcaatcagatttgaggttctgtttcagaattatttcacccacaaagatctacacattgcaggcagagagtgcagtagatcagatggactggattgaaaagataactggtgttattgcctctttactgagctcacaatcgccagaacagtgttttatgtcaagccctaagggcagtggtcatgataggagtaccagtgatggaagctcctttacaagttcagtggaatttgaaccttccgtaatcgatgatttagtactggagaagtactctggaaatgggcagcatgatgtaataagaggcacacatcatcacagaaccagcatgaaacctgaaaaaccaattgacttgcttaggaaagttgatggcaataatatgtgtgctgactgtggtgctttggaacctgattgggcatcattaaaccttggcgcacttctatgcatagagtgttctggggtgcaccgaaatcttggagtgcatatatcaaaggttagatctctgacacttgatgtcagagtttgggagccatcagtaatcaatctctttcagtcattaggcaacatgtttgtcaacaatatttgggaagacatgttgccagatgataattcaagtgctgatggatcagacacatcacagtacctctctgttagcaagcctaaacacaaagatgtattctctgccaaggagaagtttattcatgccaagtatgtagacaaagagtttatacggaagcgtagcatggatgagaatcaattagctgagcagatgtggaatagtgtagctgcaaatgacaagaaaacagcatacagtctcattgtgagatcacgtgccaatgtaaatttagtttacggagagatgccttctagcccatttttgactcttggaaaggcacttcagcaagagcaaccggtttcaccgcctgatggaagtcctaaatttttcgattgcaattcacatgacaagatttctcctcgggagcccctttcccctgctagcacgagttcacgcacagatgacatggaggacggttgcgaaggtctttccttgctccatcttgcatgccgtgttgcagacgttgggatggttgaattacttttgcagtatggtgctagtgtaaatatgaatgattctaggggtcggacaccccttcatcactgcattttgaaaggaagacatcggcatgcaaagcttctcctctccagaggggctgattcacaagccatggatcgagatggtaggacagcattgcagtatgcaatcgatggtggaacaagcgacgaagacattcttgcattgttagaggatcatagtagatgatcttgcaaccacaccttcagtaaattgaggttctcttggtgtggtcaactcaactaagaccttgttcggttagctctcaatccatgtggattgagtgtgattgggtgggttcaaatcccaaacaagtcaaagttcttctaatttttttccaatcctatccaatccatgtataatgggaataaccgaacaagacctaacagggatccagccccgctcggtcctagcttgtcgtgcagacaatccgaattcatggcatgaaagcaacctatgtacatgtcgttctagggcttcagtatcatgatgcgcatgttgtttctttccccgccgtttgcttgtttagcatcagtggtccttatttagtcatctggcaaacggtttggttttgtttgctgcaggtgatgcatagtaagcttgtaaatggagttgcttctcttaattttctagtcatcttttatcatgaagtagatgtggcattctaatgaaagatggttgtacatattgagatgtgctgttgtggcatatatgaaatattggcatggtgtggatggtatatacgaaagttgtgcttgctt

SEQ ID NO: 1169 - DNA, 2182 bp, Zea mays
atgtgggaccttaacgactcgccggccgccgaggctgccccgccgtccccatctgccgacgactccggcgcgtccttctcgtcggcggccgcgctagtcgacatacccgacgacgactccgccgccgccgccgtcgtcacgcgccagttcttcgtcctggccccggcggccaccatcggcgcggcgcccggctcgtcgaacgcgcgcgcgggctggctccgccgggccgccgcgccggccggcggccccgctgcggtgcaggcggcggctggcaagaagagccggcgcgggccgcggtcgcgcagctcgcagtaccgcggcgtcacgttctaccgccggacggggcggtgggagtcgcacatatgggattgcggcaagcaggtctatctgggcggatttgacaccgcccatgcggctgctcgggcgtacgatcgagcggcgatcaagttccgcggcgtggaggccgacatcaatttcagcttggaggattaccaagacgacatgaagcagatgtgccacctgagcaaggaggagttcgttcacgtgctccggcggcagagcacggggttcccccggggcagctccaagtacaggggcgtgacgctccacaagtgcgggcggtgggaggcgcgcatgggccagttcctcggcaagaagtacgtctacttgggcctgttcgacaccgaggaggaagccgccagggcgtacgaccgcgcggccatcaagtgcaacggcaaggacgcggtgacaaacttcgatcccagcatttacgccgaggaggaggtcgcgccggcggcggcgacgggcggcgccgccggcgacgagcacaacctggacctgtcgctgggaagctcggcggggaacaaaaggggcagccttgacggcggcggcggcggcggcggcgacgacaagtcctcggaccagcgcgtccccatggcgttcgacatcgactggcagacggccgcacgtcggagcaccaaggcaaagctcctgagcaacggcgatccggggaccgcggcgggaggcctttccctggcgatcggcggcggaggcgggcactggcctccgcagctgcagcatcagcagcagcagcagaggctccacggcgccaggaacaacggcggcggcacgagctggccgccgccgccgcacccgtgcccgccgccagtaccggccgccgccgcgaccgcagctgcagcatcatcacgattccatccctacgttgttacgagtacgacgcaaagcccggccggctgggtccagaagaatgggttccattcgctggccaggcccacgtagaccaagaaccaggactgggcgttcgtccttcgatcgtattccacggcgaaggtccatcatttgacccaagggcaaacggctcgtcgatccaccgatttacaccccctccccctttctttcccttttccattctctgtgttcttgattgggtgagacatggatccgaggatggatgggcctgctgcccccctgctgtaaatgaggagtttccgggaagaagacgagtgctttggtaggcgactaggcgtcgcgtcaggcagtgcgtccttttgccgctttttgttctctctcccccccttctgcattcactcaccaatcaccattggcaagcaccgatgaatggtggcatggggtgtcaacatcgcagctcattttgtttggtctcatgttgcatcactcgctgctgcacgcacgatgatggcctgctgcactgtcgtctgctgagctgctactgtcttcgatacgtgtgggtctcgcgctcgtgtaaaccttgtttctaattcgggcactgcaataactgtgggagaagagaagacgacccgggggaggccgaccggcggttaccttcctcgccggatgggacgagaccgtaccccacgccgtcatcttcatactatgtggatggatggctacattgccggcaagtgcggccactgtgcgcacagctcgcgcgcaggaagaaaagttgctagataatgctccatcgcgcgcaggaagaaaagttgctagataatgcccgcgcgcttaatttgctcgtctatctacttcactgttcctcacggcgtggcgtggcggcaggagatgaattgctcgtgtcgctccgccgtgtgctgtaggtgtgagcatgaatataatatgggtggatcttgtcggccgaatgttt

SEQ ID NO: 1170 - DNA, 2412 bp, Zea mays
agagcgcgattgcactgcaagcgcagatctcaattaggagtacacaacaagtggagttcgacggatgtgaagtgaattgcggcctttcttggttgccgtcttgctgctatggttgacttgcggtccctactcgtcgccggcgtcgtcctcctcgccggactggccgtcctcgtccacggcgccggggacgagcagttcgtctactcgggcttcaccggcgcgccgctcgcgctggacggcacggccaccatcacgccgtcggggctgctggagctcaccaacggcacggcgcagctcaagggccacgccgtgcacccggcgccgatgcggttccagcggacacccggcgggcccgtgcgctccttctcggcgtccttcgtgttcggcatcatcccgccctactccgacctcagcggccacggcatcgtcttcttcgtcggcagggacagcttcgccaccgcgctgcccagccagtacctgggcttcctcaactccagcaacaacggcaacttcaccaaccacgtcttcggcgtcgagctcgacaccatccagagcaccgagttcaaggaccccgataacaaccacgtcggcatcgacgtcaacagcctcacgtccgccaacgccagcaccgccggctactacgacgacggcaccggcgcgttccacgacctgaccctgatcagcgccaagcccatgcaggtctggttggactacgacggcgagacggcgcaggtcaacgtgttcctggctcccctcaggacacccaagcctaccaggcctctggtgtcggccgcgcagaacctgtcgggagtggtcgtggacccggcgtacgtgggcttctcgtccgccactggcacggtgaggtcggagcactacgtgctcggctggagcttcgccatggacggccctgctccggacatcgacatcgccagcctgcccaagctaccacggttcggccccaatccgcggtccaaggtcttggaggtcgtgctgccgatcgccaccgcggcgtccgtcctcggcgtggtggcggtcgtggttgcgctcgtccgacggcggctcaagtacgccgagctgcgggaggactgggaggtcgagttcgggccgcaccgcttcacgtacaaggacctgttccgcgcgacggagggattcaagaccaagatgcttctcggcgccgggggattcgggagagtgtacaggggagtgctcccgaaatccaagcgggaggttgccgtcaagaaggtgtctcacgaatcgaggcagggcataaaggagttcgtcgccgaggtggtcagcatcggccgtctccgacaccggaacatcgtccagttgctcggctactgccggcggaaaggcgagcttctcctggtgtacgactacatgcccaacggcagccttgacaagtacctctacggcaaggacgacaaggccacggcgacgctggattgggcgcagaggttccggatcatcaaaggcgtggcgtcagggttgctgtacatccacgaggactgggagcaggtggtcatccaccgagacatcaaggccagcaacgtcttgctcgacagcgacatgaacggacggctgggggactttggtctcgcgaggctgtacgaccatggagccgacccgcaaacaacccatgtcgttggcaccatggggtacctcgcgccagagctggcgcggtcagggaaagcgtcccctctcaccgacgtgttcgccttcggggcattcatcctcgaagtcgtctgtggccggagacccgtggagcagagcatgaccgacagccggctcatgctggtggactgggtgctcgagcactggcagaacggaaccctcgccgacgtgatcgacgcgaagctcaaggggagttgcgacgaggaggaggccatgctggcgttgaagctagggctgctgtgctcgcacccgttgcccgctgcgaggcccagcatgcggcaggtcatgcagtatctcgacggcgacatgcccttccctgagctcacgccgtcgcacctcagctttagcatgctggccctcatgcggagcgaagggttcgattcctttatcctgtcggcgtcgacgacgcagccgttgtcgtccacggcgatgagtatagggactatgactggcctctctgatgggagatgacgagcgcgctgtcttgctggagcatgtacattggatggcgccagtacgtaccagtagtatgctatgctgtagagttgccaattttacaatttcttgaagctggaggagcaactctagtactctaccaataacatgtaacatcccgccgattcccggaccggcgctattttctggtgacaaccatctagaaccatagaccatcctaacagacataaatattttatacgcattttatccttacttatatgtacgtaagacttttcgacc

SEQ ID NO: 1171 - DNA, 1570 bp, Zea mays
cacacggatggaattggcgcgggcggcgggctggcagttgcgcagcaataactcccgctgcccaccggctcacctgtccttcatccgccccgatccgaccccaaatcaattccaaattcaatccggtctcagtggttggcccgccgctgccagtgccagatcgaatcggactctcggctcgtgtgcagcccaccggcgagacgccgaagctatatttttatgcccatctgatccgatgcgtggtgtggcgtcgtctccgcttttactagatcatcagtagccagctcaggagccgagcctggtcagggtagccaagcccatcccggtcctctcccggcgtcttctccctccgcaccgcggctccggcgatggcgggcgtcggctccgcgctgcgtcggctctacctctccgtctacaactgggtcgtcttcttcggatgggcgcaggtgctgtactacgcggtcctgacgctgcgtttgagcgggcacaaggccgtctatgccgccgtcgagaggccgctgcagttcgcgcagacagccgccatcatggagatcgttcatgggctcgtagggttggtgaggtctccggtctctgcaactcttccacagattggatccaggttgttccttacgtggggtgtcttgtggagttttcctgagacccagtcacaccttcttgttactaccctggtcataagctggtctatcactgagatcatcagatactctttctttggaacgaaggaggcatttggctttgcgccttcctggttattatggcttaggtacagcacctttatgttgttgtatcctactggtatctctagtgaagttggtctgatctacattgccttgccttacatgaaggcatcggagaaatactgtattaggatgcccaacaaatggaacttctcatacgattacttctattcatctgtccttgccctcctgatctatgttccaggaagcccacacatgtaccgttacatgctctcccagaggaagaaggcgctatcaaaggccaaagcggcatgatgatgccaagcaagggaatcggtggactggtttgcgtgatggatgccggaacatgttcaagttttcgacatcccctgtagaatctagtggtcgggggatatatattactagaatggggctcttcatatgaactgccccgtatgcgtaatgtgttgtaccggagtcatcatttcagatatcagctgttgcgtggttaaatcgtagtttgcttccggatcacccatcagttggggggtggattaccatgttgattatataaggcaatgcgttccgcatccttccctcaactggtgctgtgctctcttgtttctagcgtacgatgaatgatggattttatcccgggcctggaacattttgcatgctctagcttcatgttgattattatatagcaaaattagcaatgtatttcttacttatgacactgatttttttttaaaaaaaaactgccaagggggatccccacctgaatagtattgatatattgtgggtcgtgtcatcaaggaggaaatgctcgaactatatcgagtgcacgttga

SEQ ID NO: 1172 - DNA, 1804 bp, Zea mays
aggtagcccgagctcggccggtcgccgccgtaccgtaccagttgcagctcgctaggatccagcgcatgtttccattgtcccacttccatatatatataaataacactactgtggctagtcgtcgtcttccccggacgacccccggccggccggagagcgcgccgccgtgctttcttcctgcggtggtggcgcgcgtatacatcgtcgactcttgacgagctgagggcgtacacacagctagcatacatacacacaaagcccagcagcaggtagtctagccaatcaaacaagcgtcgtttcgtaccgggaggccggccggccgcgcgcggagaagatgctgtcctgcatcgcgtgcgtcaataaggaagaagacggcggccgggaccgcgaggagcatggcggcgacaccccgagctgcagagaccccgtgaagtcactcacctcccagctcaaggacatggtgctgaagctgtcgggcacccaccaccgccagcacggcgcgcagcacaggcgcggcgggtcgccgccgccgccacggggccgggccacctccctgtaccgcagcggctactaccgccccggcgtcgtgcaggacgacatggccgtgcccccggccacgtacctgggaggtggaggcgccggcgcgtcgagcgcgagctccaccccggcgtgggacctgcccgccgccgcccgcgcggacggcgaggcctgcagggagtgggtggcgcaggtggagcccggcgtgcagatcaccttcgtgtcactccccggcggcgccggcaacgacctcaagcgcatccggttcagccgcgagatgtacgacaagtggcaggcgcagaagtggtggggcgacaacaacgagcgcatcatggagctctacaacgtccgccgcttcagccgccaggtgctccccacgccgccgcgctccgacgacgccgagagggagtcgttctactcgcagtctcaggtagggagcccctcggccaccccgtcgccggcgccgctcacgccggagaggatcagctggggcgcgttcgcgcggcaggtggcagcgccgccagcatcatcaggtgccaccggcgccgcgcggcagcacagcttccggccgatgtcgccgccgccgccgtcgtcctccaacccttcggagcgggcctggcagcagcagcagcagcgacacatcggtggtggtggtggcggtggagcggccggcggcaagagccccgccgcctccgaggccgccgccgccgccacggaagcggcgcggaccaccacgtcgtccagggacgacgtgtccgtcagcaacgccagcgagctggaggtgtcggagtggatcatccaggaccagcccggcgtctacatcaccgtcagggagctcgccgacggcagccgggagctgcgccgcgtcaggttcagccgcgagaggttcgcggagctcaatgccaagctgtggtgggaggagaacaaggagaggatacaggctcagtacctttgaaaactgagctggaatgaggctgaatcttactagttcagttgagcagaagctggtgataattatggtgttgtgcaaggggctgacatataattaatctggtataagtatacggggagagtttatgtttcgagttaatttggagatgggggggggggggaggagataggagggggttcatttggagctgggaaagataggaggggatgagataggggttcatgcatgtttagggcacctgacctggctgcccaggtaacttgtgattggtgtaccgtactaaagtttttaccaatccaccactattgcgtctaa

SEQ ID NO: 1173 - DNA, 3369 bp, Zea mays
ccacgagaaagagagagccaccacgccaccaacaaaaggcaagcgagggactggaaaacaaaagggagacgctcctggcgggtgagcgggcccaccggaggcagcggacgctataaaagaggcctcggcgccccaccgtaaccctcgcctcggtcacgacgcgcagtcgcccattccgcatctcgccctcccgtcccgtccgtccgttctccgattggccgccgcccgcctcgccctcctcgtcaacaaaagcccaccgcaagcgagcgagcgagccaccccgcccgatagccgccgccgccgtcccgcccccacccgactcctcctgaccgccggcgtggggtgcccgggctccacctccggcgacgacaccctccccgccgcgcgcgcccccaccgcctgctccgtttgcgggggtagccggggctccggcctcggcggctttcaaagccccctccctcacaacaggatccaaaatcccgtcctagacttcttctacctccccttccagaacttcctcttttggcatcccggacggtcgatctcgacccccttcgatttcgattcatctcttcttatcgattgatctttcttctagcttatttcgtatactgtcattttgattccttccttcttcccgccgccggtagctaatcccaaatcccaatcgaatcgactcccccctgttcgtcggattctcttcctccgtccgcacccagctaacgccaccgaaaacagaaaatttacccgccgcccaaaaaaaaacagaaaggctaacctccttttttctctctctatctttctctccatctgtggacttctccggttttgtttgacgagatgcctgcgctcgccgtcgacgccgcgacacccgtggcgcacgccttcgcgtcctgcgacgcggcgcgcttccccgccccgcccgtggtgggccccgccgccgcggccgaggccgccccctggtcggccgacctctccgcggcgctctacaacgtggacggctggggcgcgccctacttcttcgtcaacgacgacggcgacgtggccgtgcgcccgcacggcgccgcgactctcccgggccaggagatcgacctggccaaggtcgtggccaaggccgcgggcccgcgcgccggaggcgggctcggcctgccgctgccgctgctcgtgcgcttccccgacgtcctgcgccaccgcgtcgagacgctcaacgccgccttcggctacgccgtccgctccaccggctacggctcaaggtaccagggcgtgtacccggtcaagtgcaaccaggacaggtacgtcgtcgaggacattgtggagttcggcgcgccctttgggttcggcctcgaggccggctccaagcccgagctgctgctcgccatgagctgcctcgccgcgcgcggcggcctggacgccctgctcatctgcaacgggtacaaggacgacggctacgtctcgctcgcgctcatggcgcgctccatgggcctcaacaccgtcatcgtgctcgagcaggaggaggagctcgacattgtcgtcgaggccagccgccgcctcggcgtgcgccccgtcgtcggcatgcgcgccaagctgcgcaccaagcacgccggccacttcggctccacgtccggggagaagggcaagttcggcctcagcgccgcgcagatactgtccgtggtcaccaagctcaaggccatcggtatgctcgactgcctccagctgctgcacttccacatcggctcccagatcccgaccaccgccctgctctccgacggcgtcggcgaggccgcgcagatctactgcgagctcgcccgcctcggcgcggacatgcgcgtcatcgacgtcggcggcggcctcggcattgactacgacgggacccactcggcgcagaccgacatgtcggtggcgtacagcctggaggagtacgcgggcgccgtggtggccgccgtgggccgcgtgtgtgaccgcaagggggtgcagcaccccatcatctgcagcgagagcggccgcgcgctggtgtcgcaccactcggtcctggtgttcgaggccttctcggctacggcgccgggacgcctggacgcggccacggcctacctcctcgacgagctcacggacgactgccgcgccgactaccgcaacgtgatggccgccgccgtgcgcggcgactacgacacgtgcggcctgtacgccgaccagctgaagcggcggtccgcggagcagttcaaggagggggtccttggcctggagcacctcgccgcggtggacgccttctgcgagctcgtcgcccgcggcatgggcgcgcccgagccgccgcgcacctaccacatcaacctgtccgtgttcacctccctgccggacatgtgggccatcgggcagcagttccccatcatcccgatccagcggctgcaggagcggcccgccgtcgacggcgtgctctcggacctcacctgcgacagcgacggcaaggtgagcgagttcatcggcgggaggcacagcctgccgctgcacgagctgcccacccacgccactcgcggctactacctgggcatgttcctcgggggcgcctaccaggaggccctcggcgggctgcacaaccttttcggcgggcccagcgtggtgcgcgtgtcccagtgcgacgggccccactgctttgccgtgacgcgcgccgccgcgggcccgtcctgcgccgacgtgctccgcgcgatgcagcacgagcccgaggtgatgtacgaggtgctgaagcagaggaccgacggcgccacggccgccgccctcgcccgggccttcggcgcaatgccgtacctggtgttcgaccccgaggccgccgtgatgtccggcggcgagagcagcgactcggagcggtcggccgccggcgccgccgaggaggaagacgatgaggagtgggagttcatgcgcgggctcaccgtctgatgacgtgcccgcccgcccgccccgggtgaaacaaggcgagtccgtcgccaggaagttgtcagtggccggccggcgttggtttacataataacccccaccgcccggtgttgtatcgtgtcgtggtcgtagtcgtcgggtgtctcgtcgtcgccggagttgtttggcgccacctttttattccgaacgcgtcagtgtccactgttcgcctttccttttttttctctctctttcatgggaataatctgaaggaaactaatagcaagtttctctttaactggaaatttcgttttttcaagaattcattctgtctgttgctgtgtcggttccgctctcccgttgcgtggtgcgctgccaccggagaacaccttcctctcgtctcgacgtcgtcgctttctcttttcttctccatcgtcgcgtcgtgggcagggggcaggtgtcacggcc

SEQ ID NO: 1174 - DNA, 1240 bp, Zea mays
ctctgctggtcagcatcggatcgagggcatatatacaggatgcaaagggggcaagagcagcgggcgatggagctcgtcctgccgccgggcttccgcttcttcccgacggacgaagagctcctcacctgctacctcgccaggaaggccatggacggcagcttcaccacggcagccatccgcgaggtggacctctacaagacagagccatgggacctgccatgcgagcagcaggcggcggcggccggaggagacctgcacgagggctacttcttctgcaccaggggcagcaagtccccgtccggcattcgtgcccgccgcgccacacagctgggctactggaagtccacggggaaggacaagcccgtgcacagcaggtctggccgcctcgtcgtcgggacgaggaagacgctagtgttctaccgtggcagggcccccagaggggagaagactgactgggtgatgcacgagtactccatgggcgagaggaggagcagcgccctcctcagaggagcacagagtgagtgggtcatttgcagggtgttcacgaggaagcagcatccagtgatcagcaacgacaggaaactaccggaaatggaggaggctgccgtgcatgggcatggccaccgctctcctggccatctccttgccacggaggcagcagacgacggtttcgacagcgagcaggaatcggcgccaccggtcgtcgtcaccgagacccagcatacatcaggaagccacatcggcggtgcccaagccatggagggcgacgacgaccattatcagcaccgtcaaatagcccatgaggagctactgacgacgatgcaccatcaccacggttccagtcgcgtcgtctcgccagcatgttggctcaaccagcatgacgaccggctgggatcgcattattattgccccgcgttgccagtcatgcagtccgacgatgcggattactatctaccagagttgctggagtacagcggtccgctggacaccggcggtgaggaggactgccgtctccgtgctgagactcagttcaccgccgtgggctcctccgatcacatcgacgacgggctctactgggacattggcttttgaaaagcaagtttatcctttggatgtttgcgacctgatcacctgcatatgtgtatatccctagatagatagatcaaattgtgaatggggttaatgtaattatatgactcaacttctgacgcacgtgcatttaattaagtttccaatcatt

SEQ ID NO: 1175 - DNA, 1873 bp, Zea mays
ccttcccttcccagttcccatctgtctgtcgtctcgtctccctcttttctgtttatatatcctcctccccctgcctgtctgcaaccttcactcccgactccacctctctccgatcgtctcatcttcttccttctcttccaccacatccttggcatctcatccggatcgaccagtacacgccccagtagtactaaagaaccagtttctgagtaaaacatggcggcgtcgccttccccgtccggcagcggcggcggcaaggccggcgtggaccggatcaagggcccctggagccccgaggaggacgaggccctgcagcgcctcgtgcgccgccacggcgcgcgcaactggtccctcatcagccgctccgtcccgggccggtccggcaagtcgtgccgcctccggtggtgcaaccagctgtcgccgcgggtggagcaccgccccttcacgcccgacgaggacgacgccatcctccgcgcgcacgccaggttcggcaacaagtgggccaccatcgcgcgcctcctctccggacgcacggacaacgccatcaagaaccactggaactccacgctcaagcgcgagcgcgagcgcaagcgcgagtactacgccgatgcgcgccccggccccggcgaccagcgctcgctcaagcgcaccagcagcgacgggccccccggaagcccgtccgggtccgacctcagcgactccagccaccagagccttcccaccgtgatgccgtcagccgcttctaccgccgtcacctcccagcagcagctacaacacgtgtactaccgccccgtgccgcgcgcgggcggcgtggtcctgctcccggtggcgccgccttctccgcaggctcctccagcaacctccttgtcgttgtccctctccctgccagggctggaccagcagcccgaaccatccccgccgccgccgccaacacctcaagcacaagcaagctcgccgttgagcgcggagttcctgttgatgatgcaggagatgatccggatcgaggtccggaactacatgtccgggtcgggcttcgacgcacacgccgtgatgggcatggccgagatcgactagtttcagcggcaggggtccaagaccaagacaacgaatcgccgaccgatcccagattcctttgttaatcagcagagcagaggccttcgttccatgcttgctgctgtgctgcctgctggtggtactcagtaaccagtagagtttagactacagtaccagagagacggacggacggcgagacctccgatatcgtcatgctgttcttgtacaggagacagcacaaaaagggatcgagaagatggatcagggagaagagagaggactcactcgtgtttcttggctcgtgcaaatttgccttttggtttcgagtgcaaaattggaccactaagataaaggggtctcttcgattggcgggctcagaaatttggtcgttcttagattattaggctagatgttgggattttatttcctagatagtaagttttaaaaatatggattaaatcttagtttagtgtgtcctaacacccactgaccaccgtacacacagaaccgtacggacaacactagaatggtctgcctgggagctgaggagctcttttttttttggtagttgtggatcactgctgagctacttcagtacttctagatggtatggtatggatggatggatggatgggcaaggaaaggacgaagagaaaatatatggccatgatggctggcagacagggtagctagccggccgttggcagaagccgcggcagagttgagtgagtgacagctaactggctgcttgtcccagccgtcgatgacgatgaagtgtggtgtttttctttatgattcagcatgtctgtctgttccgttg

SEQ ID NO: 1176 - DNA, 1116 bp, Zea mays
cgagacacagcaacctcccactccactgtccactccacccccaccacctttgcctctcctagcttttccttggcatcctagctcttcctcctcagccgcagcagatcgactaggaaacatgtgcggcggcgcgatcatctccgagttcatcccgcatcgcggcgccaagcggggtctctgcgccgaggacatctggccgcacgcggccgccgacttcgacgacctcctccacgcgcacgcgcacgcgcacggccacgacgacgacgacttcgccgccgccgcctccttccatcccgaccaagagccgccggcccgcaagcgggagcgcaagaccatgtaccgcggcatccggcgccgcccctggggcaagtgggcggcggagatccgggacccggccaagggcgcgcgcgtctggctcggcaccttcgccaccgccgaggccgccgcgcgcgcctacgaccgcgccgcgcgccgcatccgcggggccaaggccaaggtcaacttccccaacgaggacccgccgcccgagtacgacgacgacgacgacggccacgcccacgcccacgccgccgcggcgcaggggatgctcgccatgtccgccggcggaggcagggacgaccacctagtcgactacgacgtcgtcgacgtcatgggcatgggcggcttcttccagcaccacgcgtacgtgcccgacgccgtggcgcagcaggagcaggtgcccacggtcgcgtacgtgcaccaccagccgccgccgcagcaaccgcagggcgctgccgggatggacatgtggacgttcgacgccatcaacacgcccgtgcccatgtgatgtgatcgacagggcaacgggcggatatgctagctgctgtgcggcctgctttgtgcttcttatgaatgaacatgttgctactttccaatatttatttatattcgttgcaagctttctatacctgcaatatattagtataggagcaatttatctgcccatgtaatactaggggtccaagtccaactctagcatctcacaaacactttcccttcctgccctagcggttcttgcgcaaagatgaattctccagtaataaattgccgtggattaagtcccattttattttacca

SEQ ID NO: 1177 - DNA, 3292 bp, Zea mays
tgttgcagctgtttggactgctgcagctgcaatccatagagagaaaaatactgtagaagccgcagccgcagccggattgcagccgcagcaagccgcagcgaacaagccaatagaaaaaaacccgaaggtttcataaaagttataaaaaaaccggatgaaagagagagagagagtgaccagaaaacatctattgctgctgcagagcagcagtactgtactgctattaaacaagcccagagctctgctgctactgtcctctcctcctcctcactccaccactgcccactcccatcccacgcgagcacaaccaccacctactccctactccctacactactccccccgcaagcacgcccagcgccatggccatggcggcagcgcgcacgggggcctgctactccgcctccgcttcctctcctctcctgcactactagcgggtccgctggcgacgatggcggcggtggcgagcagggagaggctctccccgggcgccgcgccgcaggtggacgcgggcaagtacgtgcggtacacgccggagcaggtggaggcactggagcgcgtctacagcgagtgccccaagcccagctcgctgcgccggcagcacctcatcagggactgccccatcctccgcaacatcgagcccaagcagatcaaggtctggttccagaaccgcagatgccgggagaagcagcgcaaggagtcctctcgtctacaaaccgtgaaccggaagctgagtgcgatgaacaagctgttgatggaggagaatgaccggctgcagaagcaggtttcccgtctcgtctttgacaacgggtatatgaagaatcgactccacagtccttctgtagccaccaccgacacaagctgtgagtctgtggtgacaagtggtcagcacaaccaacagcaaaacccagcagttctgcatcctccacaaagggatgcgaacaacccagcaggtctactcgctattgctgaggagacattggcagagttcatgtccaaggcgactggaactgctgtcaactgggtgcaaatggttgggatgaagcctggtccggattccgttggaatcatcgctgtttcgcacaactgcagcggcgtagcagcacgagcttgcggccttgtgagccttgagcccacaaaggttgctgagatccttaaggatcgtgcatcgtggtatcgcgattgtcggcatgttgatgtcctccatgttatccctacgggtaacggtggaacgattgagctgatctatatgcagacttatgcactgacaactctcgcggaaccacgagacttttggacgctccgatacactagtggtcttgacgatggcagtcttgtgatctgcgaaaggtcattgactcagtccactggaggtccttctggacctaacactccaaattttatcagagctgaggtgcttcctagtggttatctgattcgaccctgtgatgggggaggttccatgatttacattgtggatcatgttaatctgaatgcttgtagtgtgcctgaggttcttcggccactctatgaatcccctaagatactggcacagaagatgactgcggcggcgttgcgacacattaggcaaattgcacatgagtcaagtggtgaaatgccctatggtgctgggcgacagccggctgttctcagaactttcagtcaaaggctcagcagaggcttcaatgatgctgtgagtggctttccagatgatggctggtcttgtttgttgaacaccgatggtgctgaggatattacagttacaatcaactcatctccaaataaacttgttgggtctcatgtcagcgcttccccattattttctgctatggggggtggaatcatgtgcgcaaaagcatcgatgctgctgcagaatgtgccacctgctctacttgtgcgatttttgagggagcatcggtctgaatgggctgatcctggcatcgatgcttattctgtcgcctctttgagggccaacccatacactgttccaggtttaagggctggtgggtttatgggcaaccaggttatactgccccttgcacgcaccttggagcatgaagagtccttggaggttattaggcttgaaggacatggctttagccatgaggaggtgcttatgtcccgggatatgtttcttctacagctgtgcagtggcgtcgacgaggatgcacctggtgcgtgtgcacagcttgtctttgctcctattgatgaatcttttgccgacgatgcaccgttgctgccctcaggcttccgtgtgataccgcttgatgctaagacggatgtgccaacggccaccacacgcacgcttgaccttgcctctgcgctcgaggttggatcaggtggaagcggcatgcgcgcttcatgcgatggttccggcacgtgcgccacgagatcggtcctgaccatcgccttccagttctcgttcgagaaccaccttcgcgagagcgtggcggcaatggccaagcagtacgtcaggggcgtgatggcctccgtgcagagggtggccatggcgatcgctccttctcgcctcggttcgcgtatcgaactgaagcatccgccgggctctcccgaggcacttgcactagctacgtggattggcaggagctacagggcgcacactggaacggagatccgctggtcggacaccgaaggcgcggactctccactgatgctgttctggaagcacagcgacgcgatactctgctgctctctgaagccgccggctttcacgctcaagttcgccaacagcgccggcttcgacatcctggagacgacgatggtgaacatccaggacctgccgctggaggcggtcctcgacgaggagggccagaaggccctgtccgcgcagctccccgcgatcatgcagcagggcctggcgtacctccccggtggcgtgtgcaggtcgagcatggggcggcaggcgtcgtacgagcaggcagtggcgtggaaggtggtgggtgacgacggcgccccgcagtgcctggcgctcatgctcgccaactggaccttcatctgaggctcgcaacatcgctcggcagcgccagaccggatgccgccttttgccctactacgtatcattagttgcttttccgttgtgccgcctgtgttaagaatttgtgtactgtgtggatgatcgagaactgactctgtttgtgtgtgtgcgtgacaaacaactacaacagctgtatgcgtgcctggtcgtggtctcgtctccccggcttgtcgccggcgacattgatcactgttgcaggttgcagtattactatttgctagttctgcttgctcgatcagt

SEQ ID NO: 1178 - DNA, 2347 bp, Zea mays
aaggaacacccagaacggtcgctctcccccggccccgccgagatggacacgggctgcctccaaccaccctgcaacccctcctcgtcggaggcgtcgggaggcgacgcctccgacgcctgcggctccgcctctgcctcccggtcctcctccgcccgccgcagcaagggggtgcggctccggctccggctgcggcgaaggcggcaggagccgggccccgccgctacgcctgggggtgagggtcagggtggcgccggcgtgcaggtgcaggacgacctcgcgctgcccctcgggatgtcgttcgcggccgtcctcgcgcaggttgtgaatacaaagaatcgttcaggcgaaagattacagcctgcacttctttccaagatctgtacatcggcagtgaaggaatcattgagaaatatatatggtaacaagttagacagttttatgagaaactttgagaaatcattcagcagcacattgacaacgcttcatcttgttaatgagatgcctgtctatggacaaggtccagttcctcaatgttcttctaagcatgaagactctgaagcttcaagcaagttgagcactggtggtacacaaaatctaacgcgtgaaatcaagcaggagcgtttgaattcagtggaaagtcagcttgttctttatgctggcggctatcagcagatgactcgccgcgctcatagcttatcttctcctgaagctgatcagcgcatccttaatgcatttgagagatctttgaaagaacaaactcggtcaaatgagctcaaggaatttgagataagccttagcatgagaaagttgaagctaaaacagtctcaactagaacttaactcctattcacacatgttagacaagattaagttatccttgggatttcagaaagcttccttccaagtggaaaaattcaagactcagatgcaggacacgaggcatgcacaaataatgaggacactcatagattttcttgttagtgcagtgattattatgtcagtatgctttgggtatggaacttatacttattcataccaaaggataactgatattacagcagcatgttcagccacttcaaagggatctaaatcatggtggatgccaaattcagtgtcaaacttcaatactgggttgctcttcataagatgtcatgtaatagctgcaacacggatgttctttggtatagtaatgattttggcagttgtttggttagcgttccagcgctctgcggtgtctgtatcaagtatgccagtaacttttaacatcattctgttgggagttatttgtggctacgctggaaggttctgtaccaacacacttggtggtgatgggaacatgtggcttatatgctgggaggtactttgttccgtccatttgattggaaattgttatccatcggtcttgtaccgtgttctccatggtcctatatctgtatctcatagcaaggagtctgtctggttcccgtattggattcgccgttggatgttttatgctgtgctggggttttttatcccagccttgaatggcttactgccatttgcttctctttctgactggaataaccatttcactaaggagctaaaatccatcttcattgatgagagaatcgaagcctgaatgaatcatggatgcaacaattggtgcagtgttgtcctttttgtgccagcggtgcagccaaaggaaagcgaggactgaatgatctttagctgcaactagtgcacaatgtcaatgatttctgagaaatgaaatggttctgtttgagaagcgattcagaagttcagcttggtgttgtctcaagagaataatatatgggatggaagttataggcaccgttcaaggaataagttgactgtacactactgcaggagacgctagcattttgatccaactcaacgtgctttcatcagtgcctcctaccaccgcagtcaaagcttcagatgatctaggattttgacttttgagatcttcgtgtctcttcgacttcaaatgcctcgatttgccctaggcattttatgatgcaagtttacattacagttcagcgtgtaggcaggttcaccaccagttggaaattctgttgaattcgtttttgttgtctttgttgtagctcgataatttgtttttttcactgtaaatatcaagagccgtttatctggtactggctgcttactctttgtggttagtttatgtgcatgttatctccgggcttgagagaacacagcctgatgttgtacttgttcagtgtgttcatgtattgtaagtgcacttgcatttaagcccaaaaactaatgtaagattttgatgtgtacaatttttttatgggatcatatacccaatcatgtactccttc

SEQ ID NO: 1179 - DNA, 2296 bp, Zea mays
atcaacggagcttagcctgggcagcagtgagcagccgccttcccctgtgctgcggatcgctacactacaccaccactcaccactcagttactcaccacacatccatccaactatccaagcccacagtgaggcagtgagcagcatcccctctcctgtagggggagtctgtagtagcaacctgttgtcgatcctactcatcagtcatcttccctgcgcaaagcctgcagctttaccaccgccgccgccgccgccgcctcctctccttcgaaagcgcgcctcctgctagctggctgtcctgagctcgggcctgtcccgcgcacgcaatcgcgccctgcctagcaagctagacaggcgccgccagttattgcaccgggtgcgatatcgcgctagccgcggagtgcggagtagtgggcggcggataggctgcgccgctactccttcgtgcgtgtgtggggaggattagtaactgtagaggaaggcaggcacgcaaaaggacgccctcgcctccgcctcccgcccgcgcactcacgtgattcatacttgcggccttctcgctcgctcccttcttcatcaccacccctctcgcgccgcagcgggcgggcaactactatatcaagcaccaaattaaacccacccagctcctctctcgccccttcgttcctgggagaccgtaccggccggccgcgggagatggtcgaggcgccggccgtcgtggtggtggtgcgggcgtacgacgccgcgcgcgaccgcgtcggcgtggaggaggtggagcgcgcgtgcgaggtcgggtgcagcggcggcggcaagatgtgcctcttcacggacctcctcggcgacccgctctgccgcattcgccactcgccggactccctcatgctggtcgcagagacagcaaccggccccaacagcacggagatcgccggagtcgtccgcggctgcgtcaagaccgtcgtctctgctggcaccaccaccacccagcaggctaataaggacgaccccatctacaccaaggttggctacatcctcggcctccgcgtctcgcccagccaccggaggaaaggggtggggaagaagctggtggatcgtatggaggagtggttccggcaaaggggggccgagtactcgtacatggcgacggagcaggacaacgaggcgtcggtgcggctgttcacgggccgctgcggctacgccaagttccgcacgccgtccgtgctggtgcacccggtgttccggcacgccctgaggccgtcccggagcgcggccatcgtggccctggagccgcgggaggcggagctgctgtaccgctggcacttcgccggcgtggagttcttccccgccgacatcggcgccgtgctatccaacgcgctgtcgctgggcacgttcctggcgctgccgtcgtcgccggcgcggtgggagggcgcggaggcgttcgtggcggcgccgccggcgtcgtgggccgtgctgagcgtgtggaactgcatggacgccttccggctggaggtgcgcggggcgccgcgcctgatgcgcgccgcggcgggcgccacgcggctggtggaccgcgcggcgccgtggctcgggatcccctccatccccaacctgttcgcgccgttcgggctctacttcctctacggcctgggcggcgccgggcccgacgcgcccaggctcgcccgcgcgctgtgccgcagcgcgcacaacatggcgcgcgacggcgggtgcggcgtggtggccaccgaggtcggcgcctgcgagcccgtccgcgccggggtgccgcactgggcgcggctaggcgccgaggacctctggtgcatcaagcggctcgcggacggctacggctccggcccgctcggcgactggaccaaggcgccggccagacgctccatattcatcgacccgagggagttttaggctgataagtagtaaatacacttaggcctagctttagggtttttttttggttctccccgggtcgtcgtccgttggatcccgtatccgacggctcctagtagctagctctagagaaggtcccacccttttgtgtttcgtttcaaaacatgtggtaacgcgcgcttgcttaggcgtaatttctgctagcgaaccgaattagttaaccttttcgatcttttgattgatgcatgtgaaacacacagctgctacaccctttttagttgttgtaactcgttggtggaccagggtggagaccagggccagtaccttctcctttttgggtccatcagagattaagctgagaccgcgttgagacaacgatctggacaggagctgagaacatgatttccca

SEQ ID NO: 1180 - DNA, 2419 bp, Zea mays
aatcctagtcgttaataatttgattagggataagcgcccgtgccatccatcgccgtcgctccccggctccaccggcaactctctataaatacagctcccagcgcacagcgagactctctcaattccccactcatatagtcatatttgctcagccttttgcaaacgagttgaaatcaccttgttcaaatcgtcccctcctctctctcgctcgcttgccaagcacaatcttctgcgcgttcgtcttgcggatttgttaattggttggtcagctcctctctgacccagaggcaaagccatggctctcacgctgcgttcctcgacatcgttcctgtcgcctgtggaccccacgtccaagctcctccacaagcccgccgacgaggcgcagccctgctgcgtcgccgtacccccagcgcccggccgcaggccgcgcgcgctcagggcggccgcggccgctgcgacctcaccggcgacgggccgcgcgccggcggaggcgggcgagctgctgcacggcggcggcgcggaccagcaccacgggctgccgcgcggcggggtgccggtatacgtgatgctgccgctggacacggtggggccaggcggccagctgtcgcggcagcgcgcgttggcggccagtctgatggcgctgcggggcgccggggtggagggcgtcatggtggacgtgtggtggggcgtggtggagcgggagggccccggccgctacgactgggaggcctacgccgagctcgtgcgcatggtggagcgagccggcctccgactccaggccgtcatgtccttccaccagtgcggtggcaacgtcggcgacacctgcaacatcccgttgccgccatgggtgctggaggagatgagcagcaacccggacatcgtgtacacggacaggtccggccgccggaaccccgagtacatctccctcggctgcgacacgctgccggtgcttaagggccggacccccatccaggtctacaccgactacatgcgcagcttccgcgagagattccgtgactacctcggcaatgtcatcgcggagatccaagtgggcatgggtccttgtggagagctgaggtatccttcataccctgaggccaacggaacctggcgtttcccgggcatcggcgagttccaatgctatgataagtacatgcgggcttcgctggaagcggcggcggtggcggcgggtcaccaggagtgggggaggggcggaccccatgacgccggggagtacaagcagatgcccgacgacacgggcttcttccggcgcgagggcacttggagcacagagtacgggcatttcttcctggcgtggtattcaggcatgctgctggagcacggcgaccgcgtccttgccgcggccgaggccgtgttcggcggcacgggcgcaacgctctccgccaaggtcgccggcatccactggcactaccggactcggtcccatgcggcggagctcacggccgggtactacaacacgcgggaccgcgacgggtacgcgccgatcgcgcgcatgctggccaagcgcggcgccgtgctcaacttcacatgcatggagatgaaggacgagcagcagccgaaacacgccagctgctccccggagctgcttgtgcagcaggtcaagaccgcggccagcgccgccggggtggagctcgccggcgagaacgcgctggagcggtacgacgaggcggcgttctcgcaggtggcgtcgacagcgcgcggcgccggcctggccgcgttcacgtacctgcgcatgaacaagacgctctttgacggcgacaactggcggcagttcgtgtccttcgtcagggccatggccgacggcggcgcgagaccagcactgccacggtgcgacacggggcactcggacctgtacgtcgggttcctcgacgccgccaagaagagcaaggcgccggaggctgagggcgccgccaccgccgcggcattgtaggtggatgctcatgcctgtgcgtgcacacagacacatgcgccgtgctgttgtataacgtgcaccggagaaggggaactgtatgtatagattcagggccttgcaggttgcagagttttataggctgtaatcgagcaggtcggtaaggaggcaggcatgtcagaacttaggctgtcttcagttcatttgtcccatttggaactgtattgttataagtctaatctctgtagagagaattctatatggtgttattttccatactaacataatatacatataataaaatataatataaggatgaaacatatacttttaatagaaagttctatattttttatagatatttaattataaagataaatgcatcggtggcagctgatcttgttaagagatgtcacttaggtcgtgtttgtatcccactggctaattatttgctagtggctaacaattagtcggtaaataattagctag

SEQ ID NO: 1181 - DNA, 1540 bp, Zea mays
ggcctgtgacctctggcacgtgtgtgtggcggtggcggggcctcgcacgcccacacgcccctccctcaggcctcacctctctataaaacatcacgccggccaaaccacacgcacagcgccaagggcaccaccagcaaggaccaagacagagcacagcgcagctcgtcggcctctcgacgccggttgctgcaaccaccgcctttattgcccacgcgggccgtgcggaagaagcaagaagacacgccaatggaggtcgccgcagcatcggcagcgagctacggattcaaggccgacgacgacgttgacagcctcagggcgacggagctcaggcttggcctgccgggcacggaggagaaggaggaggccgaggagccccagcacaaggcggcaccgccgccgccgtccacgcccagaggcaagaagcgcgacgtcgtcgccagcagcgggcccgaggacgcgcccaagaagcgcgactgcgagaccgacgccgacgccgacgccgcgccgccgccggccgccaaggctcagctggtgggatggccgccggtgaggtcgtacaggaagagctgcttccagcagcaggcggcggccaagaacaagccggcggcagccctggcggaggaggccccggccgccggcgggttgttcgtgaaggtgagcatggacggcgccccctacctcaggaaggtggacctcaagatgtacaagggctaccgcgagctgcgggaggcgctggaggccatgttcctctgcttctccggcgccgccgacgcgcccgccgtcaacccctccgacttcgccgtcacctacgaggacaaggacggcgacctcatgctcgtcggcgacgtgcccttcggcatgttcatcagcacctgcaagaggctgaggatcatgaaagggtctgaagcgagagggctcggctcggccaagaacaactgatgatgaggcgtctatcgcatgcttgtgctgtgcgtgcgtgcatgcgccagcaaattcttttgttcttttggggtcttatttcttctccaaggcgtccctgcatgggtgtgggcgtgtggtgttgagtattatgtaccttctcccctagcattgtctgtgccaacaatggagcagcagctagcagcaaaccagagacatggcgaggcgaaagatgaagctgcttgcttggaaggagagagagagagagagagagagagagagagagagagagagagagagagggaagctttgtgcatgcgtggaatgatgtgtggtcgctttgttctttttcttttgtgccccttgtaggggtgtgtgtgtgtgtgtttagcaagacatgcaaaaggagtggagagtcgagttgaatctccatgatgcgtggttgtacaaagccaaagatcactcttctttcttgtctatcagtctattgtctatctatcgatcagcagcctggtcgttgcttctgtaattgcgagtgttgaaattgcaggggaggaattgttttcctctctgtccctggtgagttgagttatctatccgaataacacgatcgaggaactag

SEQ ID NO: 1182 - DNA, 3206 bp, Zea mays
aagaacacaaagctagagataatgctagttagatgtttttttgtatctttgaattagattgtgtgatgtaattttacttttgttatgaacattagacaataaactgaacttacgaactttgtatacatctgattatactctttttccttctaacaaaatgcgaggtagacattgcatagatgtggtaactttaatacaaatattaagtttgattttgtataaatttatttgtcttatattttatttgttttattatttttttgaatttagggctctaatatgaattttgggccaaaaactgaatttcgggccaaaaattgaatttcaggtcctaatgtgaatttcgggcttttataattttgggccgcccgaaataagcccggcacgtttaagcaattacgggccgggccgtgggccgagggctaggcccatgggccggcccggcacggcccgaaattcaaacgggccgggccggcccaaaattcaaacaatacgggccttttcgggcttgggccggaccgggccgggcggcccgaatgtacacctatagcgacaatgtcaaaacttgagatacagcccaagtttacactccagaagatgggccctaaccatcagaccaaatcaagcacaacccaccgccgcgtgcctccaccgctccggtctgtctccagcaacggcggcggccatgcaggtgccgggccgcctccggcgcgtcctccgggcgccgccacccagaatcctactctaccgcgcgatctcctccccgccgcccggtggcggcagcggggtggcggtgaagcaggtgacgcgggggaacatggaggaagccctggagaagctgcggggacgcgtgcgggaggccgcattcgtggggttggacctggagatgagcggcgtcacgagcgcgccctggagagacaccttcgagctcgaccgcgccgacgtgcgctacctcaaactccgcgactccgcggagcggttcgccgccctacagctcggcgtctgccctttccgatgggaccctgccaagtccgccttcgttgcccatccgcataacttctttatcttccctcgcaaggagctccctagtgattgttcatctcatgagtttctttgtcagacaacttcaatcgagttcctagcaaagtaccagtttgatttcaacacatgcttccgtgaaggaatatcttatctatccagagcacaagaggaagaagcgctacagaaatttaacatgttgcatcatggccgaacagttacatcttccactaattctgaagaggatggagacatgcctttaaagagtgcttctgatattcttttcacggaaaggatgaaaatgaacttcaaggaatggcgtgatgcgatagccagcaagccaatggttgacaaccatttgtcaggaaacattaaatgtggttcaggacaattccagacagttttcttcaaaatgcgccctgctattattcttaatggattctcatcacatcaattgaagttaattcaacaggttttgagaaaaaactttagggatcttatttttgtctgtacatttggtgaggatgacacatctgaaaagaaagtagtttattcagacactgatgaggacagaatattattaatgaaagatgtgcaggaagatctactaaaaaacagggaagaaagaatcaaatcagcaataggaatccgccatgtcatcgaccttctttcatcagaaaggaaattgattgttgggcatagttgtttcctagatattgcacaagtgtacagcaagtttgtacgtcctcttccatcatctatcaaggaatttgcgttaagtttccacaaatttttcccacacattgcagataccaggcatcttatgtctgtcaatcaagcagttcagaaactgatgaagcacaaaagcaaatcactatcttcagctttcttattgttgtgccctgcatcttattcatctgttgagaagccatccagtcattctcctgtgacaattgaagttgaaggagatgaaacgatgtcttctcgcttcatttctggtgccaagcatgaagctgggtacgatgcatacatgactggatgcatttttgcgcagttgtgtgcttatcttggcatacaatttgagcagttctcacctctggataacctagcaacgaacactaagctgcagaaacacatcaattttttgtcccctagctggaacagtggaacagtgcttgatttgagcactggcatggagacaccagatccaggttatacgagaaggtaccctgctgctgtgtatgataacattgttgtcatctggggattcctgtctaaggttagaccgaaggaaattaaggattgcatctgcaaagtatttggttcaggttcagttacaaccgtcttctcaattgattccactgctgcccttgtgcagttcaagaaacaagagtctgtaaacgatttcttggatttgaaggctgttttggagagggcagatagtgctatctcaattctacaccccctgtcaactatattggaaggaggccaaacacgagctgcaaagtatgatacctacagagacatatgcagctcttctgaatcaaaatatctctttgctgatcaagctgaagcagtctgtgcaacctcaaagaatcaactcatagaaaatgttgatggcaatcttatatctgatgttcttgatggagtcgcactcgcctctgtaaccgaggaagatggaataataccgagttcgaagaatcaaaacgttgctgaagctacatgttaggatatagcttagatgctctatacgatggcaaaacattgtttgtgcagacgaatgtgaagctaattactactatcgacctttttcagcaggttattggcctggccttctatttgaggctcactgactaggccaatattttgatgggtattctttttaccagtatctttaggcacagtgccatctctagcatccgcacggtgcaagctctgaactacagagtaaatctatacttatgcagggaagcattcttcttgatgccatttactaggatgatcaatgcattgttacatcatctatcttgggtgtagtagctgtgaactttttattaatgtaatgacaagatagagtaaaatatggccagtccctaaacttgttacggggcatattttagttcctcaaacccccacaatgtattttcaagtttctatggttcctcaga

SEQ ID NO: 1183 - DNA, 4117 bp, Zea mays
ttctagccggacgaatgtgacttatgtgctggaatcagtggcgtgaatgtggtccagaatattgggtcaagttctaatcgcacaataatattatgtctatctgcttttttggggagcattgtgatatcaatagttaaaactacgcacaaaagagggattcaaacccacaagctttatgcagatgagaaagttctccaggcaccaagtactaaaataagtcgaaagtggtcaaagagagccctgcttattggtgtcttatttgggctctgtagctctgtatgcatattttcatgcatgtatgccgatgttgttgctcggagaattgagaatcttgctaatatgtgtgatgagagagcaaggatgttacaggatcagtttaatgtaagcatgaaccatgtgcatgcgttggctatactggtctcatcatttcaccatgggaaggatccttctgctattgatcagaaaacatttgaggacttcacagcaaggacaacatttgaaaggccattgatgagtggtgtcgcctatgcattgaaggtattacacaatgaaagacaacagtttgaggaacaacatggatggaagattaagaagatggaagatggagatcagtcccttgttcatgactacaaccttgaaaagcttgaaccatcaccagttcaagatgagtatgcgcctgttattttctctcaggaaactgtgaagcacattatatctgtagatatgatgtctgggaaggaagatcatgacaatatattacgttcctggtcaacaggtaaaggggccctaacatccccttttaagcttctgaagtccaaccatctcggtgtggtgcttacattcactgtatataaatatgatctgcctccaaatgcaacaccacaggagcgtattcatgctacattgggctatcttggtgcctcatttgatgtcccttctctggttgataaactcctagaacaactcgctagcaaacgaaagatagtagttaatttatatgacaccacaaatcatacctctcctattgaaatgtatggttctgattttactccatctggtgatctgcatattagtagcattgattttggagacccaacacgcaaacatgagatgcattgcagatttaaacatgaaccttcactgccatggtctgcaataataatatcaacagctgtagctataattgttttgcttgttggacatattatttatgcaactctgaactcccttgaaaaggctgaacatgattatagagtaatgagagaacttaaaggacaagctgaagctgcagatatagcaaaatctcagtttctagcaactgtttcccatgagattcggactccaatgaatggtgttttaggtatgctgcagatgctaatggacactgaacttgatacaactcagcaggattttgtagtcaccgctcaagaaagtggaaaggtattaataaacttaataaatgaagtccttgatctggctaagatagagtcaggaaggattgagctggaagcagtgccttttgatgtccgtgatattcttgacaatgtgatatctcttttctacgataaatcacaagctaaaggcatagagttggccgtgcttgtatctgaccaagttcctgatgtcctaattggggatccatggcggttccggcagatcattacgaaccttgtggggaattctatgaagtttactgaacagggccacatctttgttcaagtccatttggtcaaggaactaaacaggaaaggaaacaatttttgtgatgtttctgctcataacagagaaattctgtatgattctgacaactcgatgctatggaacacactaagcggacttgaagtagcagatagctggaggtccttggagaattttacgatgttcaagaattcaaatggtgaaacagatacaattaggttagctgtcagagttgaagacaccggcataggaataacaaaagatgctcaaatgcgtatttttacacctttcatgcaagctgacagttccacctcacgaacatatggtggaactggaattggcttgagtattacaaaacgtttagttgaattgatgggtggagaaatagggtttactagtaaatcaggagttggtagtacattttcttttactgccattttcaaggagaacagaggatgtcctggagatatgaaaagatactattctgaacctactccgttggattttcaaggaatgagggctcttattattgatggaaggagtgcacgtgcagaggttactatgtaccatcttcgtagacttggaatacagtgcagtcttgttgccacatctgaatctgaatctgcatcttcagctttgatgaaagcctgcacctcaagcaaaaacaatccggacatggtccttgttgatacagaagcttggggtaaaggttcaggtttggcattctatcatcgttttgtagattgtcaactaaagggcgcacacaagttttctcagcccatgccaaagactattcttttgggaagctcaataagccctgttgaatctgattatttaagattgacaggatttggtgattgcataaggaaacccctccgtcttagtactattgttgcctgtcttcgcaaaaccttaggggttggggttacaaggcagcagagtagagaccaatctttggttcttcaaagtgtactaactggaaaacagattctggttgtggatgataatgcagtcaaccgtaaagttgcagctggttctttgaagaaatatggatctaaagttacatgtgttgatagtgggagtgatgcaattgatatgctcaagccacctcacacatttgatgcttgcttcatggatgttcagatgcccgagatggacgggtttgaagctacaagattaatccggtccatagagaaaaaaataaacgatatgatcatgatgggtgaaatatccgctaataattatggaaataaggcccattggcatgtaccaatattagctatgacggcagatgtaatccaagcgacttttgaaaaatgtatgcagtgtggaatggatggatatgtgtcaaagccatttgaagaacagcagctctactttgctgttgctcatttcttagagactgatgaaacagaataacaaatccaacttcgtaggagattgatttgccgcaacactgtttcaacatctgccaaaagaccatctgttcaacaggttctgaaaaacagcgatcggcagcatatttggtgatttcctctacatgctttttaagagcaagctaatgcaattaaatatttccccatgcagttctacaagcttatgcatttacattctttgtggagcgataaaactttgcttgtatacttgtctgccaaatatctactataacatcttgttatcaagaaagaaacctattgtaacattgacttgcctagctctgaatgcagatgaagcatcaatatttttgaaacaaaaatactaatttgctcattactcattgaatcattgtagaaattgctgatttggtaattttatctttgttttggagcaatggaattgaggtcccagttcttatatatagaacttgctccaggaaacaaaatacattggactcccactgaccagaagaaagaagataagatagtagggggtacaaaatgtttggtctggtttccgcagcaattttttttctggccgtgttttctggaaccaatacaacatgaccttgcaacagtggtgtcagttgcttctgtaatgccttatgacaccacgatatttccaaatgctgtgttgtaagtgctttacagacaaaccgaggtccagctttctaaaacattgagttcaatgacatcacttcatccattatttaagaaagcgagggtcttcaaatcaggaggatacaattgtatcaccaagtcaggcacacagtttcaaggtgactttgttctgatctgattgttaatgcaatctgtaaagaggcaactatgagttagggattgtttgatgccttgaatgtcgtatattcatattccatcatttttgtgggcacttgtatatacattgatgattaattgtattgttagataattgtgcattttaagattaaatgaattcctaaagcaaatcgttacataaacaa

SEQ ID NO: 1184 - DNA, 2852 bp, Zea mays
aagagcggaagcggaaatccaaaccaaccaaaccaaagtaccaaacgacgctgcgctcccgttcccccgtcacaaacacacacactgcggagaggaccgcaacgcgagcccaccccaggccgaacgccgagagcgatccctcccgtccgtgttgccctttgcgctccgccttcctcctcttccaccccgtcacttccgtgccatccgcggctcgcctccccaccccccattcccgccgccccatgcctccggctcgaccgtagccgcccgacgacgaccgccatggccgccgattccggcagcggtgcccgccgttcccccccttaatccttgattggtccgtcccgattcgatttctgtcgatcgttcgctgagggatcgctcaccttgagttgcccacagggatggccggcctggagatcgggccggcgtcgccgggctcggagggggcgccatcgccggcgtcgagcgtgggcgcctccgtggagcggcccgagcagtcgtcgccgcgggtgaccaagcgcccaggcctcgtcatgtccttctccgggaagcggctggaccagtcgccggccgggtcgccgtcgccgtcgccgtcgctgtcgcgcccggtgctggtcatgtcccactccagcaaccgcctcgaccagtcgcccgcgcgcccggtgctcgtcatgtcccgctccagcaaccggctggaccagtcctccccggcgtcgtcgccggcgccagtgaaggcgcccgtgctggtcatgtcaggctccagcaatcggcttgacagctcgcatccgtcgccgtcgccgtcgccgtcgccgaccgccgcggccgccgctgcgccggttctggtgctctccaactccggcaagcggatggaccaggtggggcggaagaagtacgtcaagcaggtgacgggccgccacaacgatacggagctccacctcgccgcgcagcgcggggacctcgaggccgtgcgccagatcatcgccgagattgacgcccaaatgaccggcaccggcgaggagtttgacaacgaggtcgccgagatccgcgccgctatagtgaacgaggccaacgagatggaggcgaccgcgctgctcatcgccgccgagaaggggtttcttgacatcgtcgtcgagctgctcaagcactccgacaaggacagcctcaccaggaagaacaagtccggattcgatgctctgcacgtcgctgcaaaagagggccacagagatattgtcaaggtacttctggaccatgatccatcccttgggaaaacgtttggccaatcgaatgtgactcctctcataactgcggcgattagaggccacactgaggtggtgaacctactgctggagcgagtttctgggttggttgagttatcaaaagcgaatggaaagaatgccttgcactttgctgcccggcaggggcatgtggaaatcgtgaaggctttgctagatgctgatacccagcttgctcggaggactgataagaaaggccagactgctctacacatggcagtaaaaggtactaacccggaagttgttcaagcgcttgtgaatgccgatccggcaatagtcatgctacctgacagaaatggcaacttagctctgcatgttgcaaccagaaagaaaagatcagagattgtaaacgtgcttctgcttctcccggatatgaacgtgaatgcgttgactagggaccggaagaccgcattcgacatcgccgagggcctcccactatcagaggagtcccaagaaataaaggagtgcttgtcccgcgctggcgcggtcagagcaaatgagctgaatcagcctcgggatgagctcagaaaaacagttacagagatcaagaaggacgtgcatactcagcttgagcaggcgagaaaaaccaacaagaatgtctacggcatcgcgaaggagctaaggaaactccacagggagggcatcaacaacgcgacgaattcagtcacggtcgtggcggtgctcttcgccacagtggcgttcgccgcaatcttcacggtgcccggcggcaacaccgacgacggcgtagcggtggccgtgcacgcgacatccttcaaggtgttcttcatcttcaacgccgtcgccctcttcacgtcgctagcggtggtggtggtccagataacggtggtcaggggcgagaccaaggcggagaggcgggtggtgggggtcatcaacaagctgatgtggctggcctcggtgtgcacgacggtcgcgttcatatcctcctcgtacatcgtggtggggcggcacttcaagtgggcggcgctcctggtgaccctgatcggcggggtgatcatggccggcgtgctcggcacgatgacgtactacgtggtgaagtccaagcgcgtgcgcaagatcaggaagaaggtgaagtcgacgaggaggagcggctcgaactcgtggcaccacaactcggagctctcggattcggaggtcgaccgcatctacgccatatgagggggccggtgcagctggttccttccttcagaccgtctggccgtgatgcagcacggatgcatactgtaaacatcgaatcacggcccttgagatggagatgcgctagggggtggttaactctgtacattccaataagctggtgtaaactgccattccccttgttcatggatcgggcgggaggcgactgtcttggctgtatactactcacagatagatttgtcatcaggttatatatagtgtattatatatgtgcagcctgctgtgtgctccttgtgcgtgaccttcatcagattcatgtcaggccgctgctgagttcgaatggcagctgcatgacatgtttcgataccggcccttgtggctttgttttgatattctgctctc

SEQ ID NO: 1185 - DNA, 5245 bp, Zea mays
ccatcgccccgtcagcgccaacgtgtcccggctcccgccaccaaatcctcctcccccttcaccgaggcactccctccgccgctcctctcctctcctcctccaggagacgacggacgaggacacggacaacctatacattctcccgcctcccgcgctctcatgctcgcttattcttcttcttcttcttcactccctctgctctgtttctgagggacggcggccgccaagaacaggcgcaggccaccgagaacaatcctccagccacaagccaagaacaggcgccttactctagtgtagaacaccccaacacacacactgactgagttcgagcgtggcgttcgtgttcaggcgtgcgtttctccgcccgccggctccgtccagtgagcaggcgccatgtcgtcgtctctagtgtccaccccatttgccgccgcggcgcagaagcgcctcctggcggcgcccgtgccgctgcactcgttcctcctgagcggccggcgccagcctccgcgccgcgccggcaccatccggtgcgcggtcgccggcggcaacggcctcttcacgcagaccaagcccgaggtgcggcgcgtggtgccctccgacccgcggggcctgccgcgggtcaaggtcgtctacgtcgtgctggaggcgcagtaccagtcgtccgtaaccgccgccgtgcagcagctcaacgccgacccgcgccgcgccgccgcgttcgaggtcgtgggctacctcgtcgaggagctccgcgacgaggacacctacgccaccttctgcgccgacctcgccgacgccaacgtcttcatcggctccctcatcttcgtcgaggagctggccctcaaggtcaaggccgccgtcgagaaggagcgcgaccgcatggacgccgtcctcgtcttcccctcaatgcccgaggtcatgcgcctcaacaagctcggctccttcagcatgtcgcagctggggcagtccaagagccccttcttccagctcttcaagcgcaacaaggccaactccagcaacttcgccgacagcatgctcaagctcgtccgcacgctgcccaaggtgctcaagtacctgccctctgacaaggcgcaggacgcccggctctacatcctcagcctccagttctggctcggtggctcgccggacaacctccagaacttcctcaagatgatcgccggctcctacgtgcctgccctcaagggcgccggcatcaagtacgacgaccccgttctctacctcgactccggcatctggcacccgctggcgcccaccatgtacgaggacgtcaaggagtacctcaactggtacggcacgcgccgggacgccaacgacaggctcaaggaccccaaggcgcccatcatcggcctcgtcctgcagaggagccacattgtcaccggcgacgacgggcactacgtcgccgtcatcatggagctcgaggccaagggcgccaaggtcatacccatcttcgccggcggcctcgacttctccgggcccacacagcgctacctggtcgacccgattaccggcaagacgttcgtgaacgccgtggtgtctctcaccgggttcgcgctcgtcggggggccggcgaggcaggaccatcccaaggccattgccgcgctgcagaagctcgacgtgccgtacattgtcgcgctcccgctcgtgttccagaccacggaggagtggctcaacagcaccttggggcttcacccaattcaggtggcgctgcaggtcgcgctgccggagctcgacggtgggatggagcccatcgtgttcgccggccgggaccccaggacagggaagtcacatgcattgcacaagagagtggagcagctctgcactagagccatcagatgggcagaactgaagaggaaaactaaggaggagaagagactggcgatcactgttttcagtttcccacctgacaagggcaacgtcgggactgcagcatatctgaacgtgttcagctccatttactctgtgctctcagacctcaagaaggacggctacaacgtggagggtcttccggacacacctgaagccctcatcgaggaggtgatccatgacaaggaagctcagttcaacagccccaacctgaatgttgcttaccgcatgaatgtgagggagtaccagtcgctgacctcctacgcctccttgctggaggagaactgggggaagccacctgggcacctcaactctgatggcgagaacctcctcgtctacgggaagcagtacggcaatgtcttcatcggggtgcagcccacctttgggtacgaaggtgatcccatgcggcttctcttctcaaagtctgccagccctcaccatggatttgcagcatactacacctttgtcgagaagatcttccaggccgatgctgttctgcactttggaacacacgggtccctcgagttcatgcctggcaagcaggttgggatgagtgacgcctgcttccctgacagcctcattggcaacatccccaacatctactactatgctgcaaacaacccatcagaggccacggtggccaagcgccggagctacgcgaacaccatcagctacctgaccccaccggccgagaacgccggcctctacaaggggctcaagcagctgtcagagctcatctcttcctaccagtctctcaaggacaccgggcgtggtcctcagattgtgagctccatcgtcagcactgcaaagcagtgcaacctcgacaaggatgtcccgctgcccgaggaaggggaggagctcccaccaaaggagcgtgaccttgtcgttgggaaggtgtacgccaagatcatggagatagagtcacggctccttccctgcggtctgcatgtcatcggcgagccgccgagtgccatcgaggcggtggccacgctggtgaacatagctgccctcgaccgccccgaggacggcataacctcgctgcccggcatacttgccgccacagtgggcagggacattgaagatgtgtacaggggaagtgacaagggcatactggctgacgtcgagcttctgaggcagatcactgaggcttcgcgcggcgccatcaccgccttcgttgagaagaccacaaacagcaaagggcaagtcgtcaatgttgccaacaacctcagcaagatacttggtttcggcctgtcggaaccatgggtgcagtacctgtccgcgaccaagttcgtcagagcggacagagagaagatgagggttctgtttgggttcttgggggagtgcctgaggctcgtcgtgcaagacaacgagctgggaagcttgaagcttgccctcgagggaagctacgtcgagcctggacctggcggcgacccgatccgtaacccgaaggtgctcccgacagggaagaacatccacgctctcgatccgcaggccatcccaaccacggctgccttgaagagcgccaagatcgtcgtggaccgtctcctggagaggcagaaggctgacaatggcggcaagtaccctgagacggtcgcacttgtcctgtggggcaccgataacatcaagacctatggtgagtcactagcccaggtgctgtggatgattggagttcggccagttgccgacaccttcggccgtgtcaaccgtgtggagcctgtcagccttgaggagcttggacgcccgaggatcgatgtcgtcgtcaattgctcgggtgttttcagagatcttttcatcaaccagatgaacctgctggacagggcagtgaagatggtggccgaactggacgagccagcagagatgaactacgtgcgcaagcacgcccaggagcaggcggaggagctcggcgtgtcgctaagggaggcggcgacaagggtgttctcgaacgcatcaggctcctactcgtccaacgtgaacctggcggtggagaacgcgtcatggaccgacgagaagcagctccaggacatgtacctgagccgcaagtccttcgcgttcgacagcgacgcccctggggcaggcatgaaggagaagcgcaaggcgttcgagctcgccctggcgacggcggacgccacgttccagaacctcgactcgtcggagatctcgctgacggacgtgagccactacttcgactcggacccgaccaagctcgtgcaggggctgcgcaaggacgggcgggcgccgtcctcgtacatagccgacaccaccacggcgaacgcccaggtgaggacgctgtcggagacggtgcgcctcgacgcgaggaccaagctgctgaaccccaagtggtacgaggggatgatgaagagcgggtacgagggggtcagggagatcgagaagcggctcaccaacaccgtcgggtggagcgccacgtctgggcaggtcgacaactgggtctacgaggaggccaactccacgttcatcgaggacgaggcgatgaggaagaggctcatggacaccaaccccaattcgttcaggaagttggtgcagaccttcctggaagccagtggcagaggctactgggagacaacggaggagaacctggacaggctcagggagctctattcggaggttgaagacaagattgaggggattgacaggtaaattgatttgccagatcggtcggccgatcggttccagcattcaacccataacgagcttggaactcttctgcctcattgggactcttgtacaatgtctgggtgtgtgatttatatatataaaaagttgtaacatgtaatactggaggatacaatctttaacaaagagggtggcggttgttccattcacagagactgagttacaaagatgcagtatatatgagcctcattttctgcctttgaaacatttcttattctttcagtttacgtgcttcatcactcgtactgttgtgcatttgcttttgttggcttctcaagttcccatccaggacatgtataatacgtgtcttcgagtgtgtctaatataatgaatgtaagtgtcttaactctatgctcgagacgaacaactagataattggtcaacttaatttattactagtagggtgcccgtgcgttgctacggcaacttaaaattgatacaaaacaatgacgcaatataattacaatatttgattgatgattttgtagctaacaaacaacgccaccatcagaaaggacacatcaatgaacagaccaaaatccacctttagctaagaaatttacttgtgagaaacccctagctgcaaattccaattcagcataactaaagcagtgaggatgctttcagaaattcagcttggaaaacttttccaataaaacatatgcttgcattacga

SEQ ID NO: 1186 - DNA, 7457 bp, Zea mays
cagcaggccaccatcaccactaccaccagcagcagcagcaacgcaggcacgctccatccactcgtcattcctccgccctgttgctcgcctccaccaccctgctcccgacctcgctccgccaccaaaccctagcctacctgcctttcccacaatcccaccccgtccccccccccccgacccgagggcgactcgcccgccattttctccgcccgatttttcggacaagtgatcgacctcgcttccgacttcttcccgctcggccggcggggggtggggagtaccaggccactgccggcgacgctatcttttcttcttctcgctcttccaggcagacaggcttgccggccggcggctgagtgaggacaaataaaagaggcttcccccaccccggtgccgtcgcggagcgccttgattcgtgctcatgccgggggcgccgctcaggtgacttgcttgggggtgggggtgccatgcagaggtatgctgggttcagcggcagcagggacggggcgaggttggaagcctcaccgttttcgtcctcctcctcctctggttaccccgtcagctccaggcggcagcagcagctaactccgtacaagctaaagtgtgacaaggacccacttaataacaagcttgggccacctgacttctatccacaaacactaaactgtcccgaagagacattaacaaaagactatgtacaatatggttataaggagactgttgaaggaattgaggaagcaagagagattgtaataagtcagatcccatacttctgtaagccagatgttgtcataaagtgcaaggaggcactaaagaagcgtttaagagctatcaatgaatctcgtgctcaaaagagaaaggccggacaagtttatggagttcctctttctggatctctattaatcaagcctggagtttacccagagcaaaggccatgtaatgaggacacacgtagaaaatgggttgaggcccttgctcagccaaacaagcgactgcgttcattgtctgagcacgttcctcatggttatcgtaggaaatcactttttgaaggtctcattcgatataatgttccattactaagagcaacatggtttattaaagttacatacctgaatcaggcccgaccggcacctaacagtacttcagtagttgcttctgataatcaacgatctaatcaatggacaaaggatgttgttgaatatttacaacagattttggacgaagtttgttctaaagagggtgccattgtacctccatcttttaaagagcagtcatcaccaggacttgctgctggaaccaatcaaataaaaatgaaaacggaatcatctccagctggagacagtgaagaacccttggtgcacttcaaatggcggtatatggttcgcctcatccaatggcatctcacagaagaattgcttgttccctcagtacttatcgaatggttatctaaccaacttcaggagagggattcagatgatgttttagagcttcttttgcctattatacttggtctggttgacaccattactctctcacaaacatatgtgcgcatgttcgtggagctactagtgagacgtctcaatgtcgatcgtccaaaaaggttttcagtttcttctgttatagcagagttactgcgatacatggtacttgcagtgccagatacatttgtttctttggattgctttcctttcccatcatttgtggttcctgatgtatatggtagaggtgctttgttgaagataaccagtggtggtggaattttatgttctaagaggcgtgatgcttatcggtatttgtcctgtggttatgctgtttcttccattcagaaacgtgcacatgatcttgcagcagttgctaaccctagccttcaagcacgtggtgcagccaaagtggtacaggctttggacaaagctcttgtcacaggaaatttgtcagtggcatatttttcactctttaatgatttatctgatgcgttaatggaagaaagatggattaaagaagtgaatccctgtttgcagtcttctctgatgtggattgggactgttgagctatcccttatctgttctatatttttcctttgtgaatgggcgacatgtgattaccgtgattgccgagcatctccctctcagaatgtgaaatttacaggaagaagagatttgtctcagatacacatggcagtgtctatcttgaagaataaaatggatgagatgaataacttgtctcgtcctaagagtagtactcgcatcacccttaataaagttgccaaaggttctttgaatgatgcttgtttgacagcagctgctgtggatgattcttctggactgagaagtaatgcaaaaaatgttgatgagaagaaggatacaaatgatatctttgaaagccctggtccactgcatgatattattgtgtgttggttggatcagcatgaagttagcaacgttgcaggttttacccgggtggatgttcttatcgcggagcttatccgcaatggtatatttttccctcaggtttatgtcaggcagctaattattagtggaattactgataagaacgatacaatgctggatgttgaaagaaaaaggaggcatcacagaactttgaagcagcttcctgggtcttctttatttgatgttcttgaggaaactaggactgcagaagagcaacagctatatgagatgatgtcaacatactctagtgagcgacgccttgttctctcagaactttcatgtggtcattcattttatgcaagtggcagaggtgagtacacttcaagttcctgcattcggaagcagagtgatcttccagttgcatcagaaggtgataagcatggaagagtgctagaacaagtagaagatgttaaagctcttttgtcaagtctgttgggttttacatatcctcccctagtggaatcaaaactttgtgaaatcaaaacaagctttcaagaatcagtaacgtcaacgctcacacaagttgagactggggaagccaaaagtggatgcgaggattgtatgaggtccaaggggcagaaattggatgacagcgccactcctttccaagggtttccattgattcaatcaggcgaggaggatatttggtgggtgaagaaagggacaaagttacaagaatctttcaacgttgaacctgtacagaagtctgttaagcaaacttctagaggtagggcaaaagttgttcgtaaaacacaaagtcttgcacagcttgcagctgctagaatcgaaggtagccagggggcatctactagtcatgtttgtgaaagcaagatgagctgtccccaccatgaacctaataacgatggtgacaacgtcaaagattttgatcacacaagggcagcaaacgtgactgcaatagggaagtcactaaaaagacttagattgctcgaaagacgatctgtctcttcatggttgttgaaatcaataagacagcttgttgatggaaacggaatgacagcttctaaagctaccaattctataagcatccttcctttgcagcctgatgataaaactgcatccaaatggaggctaggtgatgaagaactgctgtcagttctctatgtactggatacatgctgtgattcagtctctggagtgaagttcctcatatggttactagtgaaaattcgtggagtgggctcctcaggtcaacctgggaggacttatatgcttatgaggaacagagatcaccaagtttgtcaggtcaacgaggcacttgtgttctcatctctgcttaggtatgagaacatacttcttgcgaccgacatcttgcctgatgttctaagtgctttagtgaacagaaattctatgtcagcaactaccaggcatcctggttcaacagcttttgcttatgttcgatattttttgaagaaatatagagatgtggctagtgtggccaagtgggagaaaaactttcggaccacttgtgatcaacgcctgttagctgagcttgataatgggcggtccattgatggtgatttggtatcttcttcgggtattttagcaggcgaggagattgatgagcaggtccgccaaaagttgaatggaaggagttcaagactcgtgcagaatatgaaagagatagtgcaacggcaagctgatggaattcagcgcagtttaaaggaaaagaaagttcttgcaggcgcagcacccaggaatccactcacttttgagaaagaagatagttatcaaattgcacatgacattgttttgggcttagtagaatgcatcaggcaaaatgggggtgcaaatccagatggagacctttcaatagttgcttctgctgtttctgcaatcgttgtgaatgctgggcatatgatagcaaaacatttggattttgcaggaggaaactatcaaggtgttaattctgtggctacttcgctaaattttgttcggcacactttacttattcacataaattctctttgcttactaaaagaaactcttggagatcgcttcagccgtgcctttgaaatagctctggcggttgaaacttctgcagctgttacagcagcttttgctcctccaaagatgcaccgcaatcagtttcaaccatctcctgaggcccatgatgcatatggaaatcatacaagtgagctcagcaactcagggaaaggttttgttgggagaactgcaaaagtatctgctgctatttctgctcttgttgtgggggctgttgttcatggagctgttagccttgagcggatggttgctactctaaaaataaaagatggtctggatattatgcagcttttgagaggtttgaaatcaaatacgaatggtgtatcccatcctactggaggttttaggattgaaaattccacggaagtttcggtacattggtttaggattttattggggaactgcagaactgtctatgatgggcttattgcagatattcttggagatccatacattattgcactctcaaggttgcagcggatgcttcctctaactgtaatttttcctccagcctactcaatttttgccatggttctttggagacgatatatttttaactgtgaagatccacaactttatcagtctttttcaaatgcaataaacgatattaccagacatcagccttttcgagagatctacttccgtaatacacatcggctgtataatcttctggcttctgatgttggtgattcgaagtttgcagcaatgcttgaaagtcatagtccggaccggaattcaaaaatattgccatttatacctctccgtgcacgcctttttctggacgctattattgattgcaacacaccaactattcagggggatggtgcttcagagccttgtgatcccaaagataatgaactaaagctttcagagaggcttatgcaacttcttgatactcttcaacctgcaaaatttcactggcaatgggttgagatgaggcttcttttagatgaacaggctcttatggaaaaagttgcagcaggcaagacaacacttgaatcacttcggtcattatcccctaaagctgagggttttgccctttctgatagtgagaaaggatttactgaagtcattctatcaaggctacttgctagacctgacgctgctcctctgtattcagaacttgtccaccttcttggaaagcttcaagagtcacttgttatggatgtaaaatggattctacaagggcaagatgctattcttgggcgcaggtcaacaagacaacagcttgttcatattgcccaacgaaaaggtctttcaacaaaggcacaggtttggaaaccatggggttggtccagcttgcttagcgatgccattcctaataaaactgcaaaaaggaagttggaagtcacatcaattgaggaaggagaagttgtggatgacactgttgatgctaaaaggactaccaagactccccctcatagtgttgatagaagctttgaagggattagatcgataaataaatatttaactgagaaagcccttgctgaattagtattgccttgcatcgacagaagttctgctgatatccgtggtatactttctgttgatttgaccaaacagatgggggctattagtgaacatatcaaagcaatagcattgaatggtgctaaacaagctggttcagtttcttcaggaaatgaagtgccatcgaacaaatcaagtggccgtagaggaattcgaggtggaagcccaaacattggtagaagagctccggttggtaatgacccaagtcctccttcggcttctgctctgcgggcagcgttgtggttacgcctccagttcatcattaggttgcttccagtaatcatggcagataggagcatgagacatacgcttgcttctgcaattctaggcctgcttgcaacgcgcatgatttatgaagatgcagatttgccccttcctcctaccaacgcaactgctttaaggcgggatgtggattccttgctggaacctcccctggatgtcctgcttgaccggcctggcgaaagcctttttgagaagcttttatgcgttctccatgcactgcttggtagctacaaaccaagttggctgaagtcaaggtcagcctctaggtcgtcaattaaaagccaacgagatttctcagcatttgataacgaagcagccgagggcttacagtccgcgttggaccacatggaattgcctgaaacaatcaggcggaggatccaagcagccatgcctcttcttccaccatccaggcgcccttgtatgcaatgccaacctccgcagttgtcgttggctgcattatcaccactccagagcagtacctctggtgtaggtcctcaacagaaaagttcttgtgtgagttgggtgcccactaacgtatcagtcagaagcaaggcagcattgccttctcatgaccctgaaacggaggtagatccatggagcttgctggaagatggcacaaactgccccccctccacagcatctggaagcaatggctcgagtggagtgacgggagaccatgctaatctgaaagcttccagctggcttaagggtgccgtgagggtgaggaggacagaactgacctacattgggtctgtagatgacgacagctgatacgtgtatgattatcttggtgaattggaggcaaagaatttggtctcacttgttggcatttgtgtcgtgtgcaagttaaaagcaccaactgcatcgaattctttgagagctctgtaccacaaggtggaatggaaaccatatggcttttggttggttgttgtagtgttagaatacatcgctgcccccgatttgttttagttagggcctgtgggggcggctgtatatagttggaatccatttctggattcaatgggggagcttatttgagaatcaggcaggaagccatgtagtagatttctagccaagagccctgtacttgttttttttttgggtctgagatgtaattgtcatgtcacatatattcttttgatctaaggctgacggaagttgcattgcctatttgcttta

SEQ ID NO: 1187 - DNA, 1914 bp, Zea mays
gaaagatctagagcatgcattcatgcatccatcgatctgcaactgcaactatatataaccgcgtgcggcggcagcttgcaattgcattgtgttgaatcctcatcgatcgtcagctaatataatagcatatatatactccgatctcagaattgaagctccgatccatccgtcgaccacctatggctgccgctgcagctttctcctccacttccgtcgtcgctgctctcgcggcgagcggcttcctcggcaagaagctcgtcaccagcatcatcatcaggaataagaagaaggggtacgactccctgcatggcgccacgaccaccatcagagtcagagccatggcggtgaacaaggagacggagcaggacaggtggaggggcctggccttggacacctcggacgaccagcaggacatcaccagggggaagggccgcgtggacccgctgttccaggcgcccatgggggacggcacccacgtcgccgtgctcagctcctacgactacatcagccaggggctcaggcactacagcttggacaacatgatggatggctactacatcgctcccgcgttcatggacaagctcgttgtccacatcgccaagaacttcatgcccctgccaaacatcaaggtgcccctcatcctgggtatctggggaggcaagggccaagggaagtccttccaatgtgagcttgtcttggccaagatgggaatcaaccccatcgttatgagcgccggcgagctggagagcggcaacgccggcgagcctgcgaagctgatccgccagcgctaccgcgaggcggccgacatgatcaagaagggcaagatgtgcgtgctgttcatcaacgacctggacgccggcgcggggcggatgggcggcacgacgcagtacacggtgaacaaccagatggtgaacgcgacgctgatgaacatcgccgacaaccccaccaacgtgcagctcccggggatgtacaacaaggaggagaacccccgcgtgcccatcatcgtcacgggcaacgacttctcgacgctgtatgcgccgctgatccgcgacgggcgcatggacaagttctactgggctcccacccgcgaggaccgcgtgggcgtgtgcaagggcatcttccgcagcgacggcgtccccgacgaggacgtggtgaggctggtggacgccttcccgggccagtccatcgacttcttcggcgccctccgcgccagggtgtacgacgacgaggtgcggcggtgggtggccgagaccggcgtggagaacatcgccaggaggctcgtcaactccaaggagggcccgcccacgttcgagcagccgaggatgacgctggacaagctcatggagtacgggcgcatgctggtggaggagcaggagaacgtgaagcgcgtgcagctggcagacaagtacctcagcgaggcggcgctgggcgacgcaaacgacgacgacgacttgtatggcaaggcggcgcagcatgtccgcgtgcccgtgccggaggggtgcactgaccccaaggccggcaacttcgaccctaccgccaggagcgacgacggcagctgcgtgtacaactaatataattgtccaaacaatttctgtggcacgtacttaagtttgagccaggatacaaactttggccgctaatggttgctgtcgccggtcaagagggcgttggctacttgagttagattttggttgtgtttcatccccacgtacgtccagcaaagaaaaattgaagctagtgcatgcatggttcgtcatcaaatgcatggccggccggatacaaatttgaactgtagctatcgacgtacgcatgtattaatttatatcagagaagacaaggaacacagatacatacatgtcgaaacaatcattttctatggcacttgagctagctagcatacaattttgttttaaa

SEQ ID NO: 1188 - DNA, 1516 bp, Zea mays
gagaaaataataattaaaaaaaagcagtgaaccttctcgcgctcggcagttggcagtcctgtcctgtggaccgtatgacgtgtttatttatgggcggcgccttcgtctccactccccaccggaggaaggaagcgagaagaccagaagggatggcaaccggtagtgaagcctcgaaggcagctgaggctgtggttgactggcataaacacgacagcaagaggatgctccatgcggtttaccgtgttggggatctggaccgcacaatcaagtactacacggaatgctttgggatgaaactgctgaggaaaagggatgttcctgatgagaagtacaccaatgccttccttggctttgggccagagaacaccaactttgcagttgaattgacatacaactatggcgttgacaagtatgacattggaacgggctttgggcatttcgcaattgctaatgatgatgtgtacaagttagctgagaatatcaaatccaagggtggtaagatcacccgcgaacctggtcctgtcaagggaggatccactgttattgccttcgcacaggatcctgatggctacatgtttgagcttatccagagggctgacacacctgagcctctttgccaggtcatgcttcgtgttggtgaccttgagcgttctatcaagttttatgagaaggccctagggatgaagctcctaaggaagaaggatgtacctgattacaagtataccattgccatgttgggctatgctgatgaggacaagacaactgttctggagctgacgtacaactatggagtcacagaatacagcaagggcaatgcatatgctcaggttgccattggcaccaatgatgtgtacaagagcgccgaggcggttgatctggcgaccaaagaactaggtggcaagattttgcggcagccagggcctctacctgggatcaacactaagatcgcctcttttgttgatccagatggctggaaagtggttctggttgacaacaccgacttcctcaaggaactccactgaaggctcgggatacccaggtgctgtgctaggatgtagtaatgcttgtctgtggtgtaataagatgtgggtggtttgtttctgccctgatgaacttataatactgaatgttgctacagaggttgtgcttctgccagtgaggtttgggatttgctatgtaactgtgcctgcgggctccgattctggcgctgttcgtacactgtagaagccagtgaatcccaataaacccagcttcacaggctcctcttatcccgtagaccctagttgtttttgggtggagctggagccactgaccctagtcctttttttttacccgtttcatctcatgcatccacattcaataggaggtagcagacttacccattgcctgcttattgatgctaaacaaagcgatctgaagatcgtgtaatgcctgaccctttgccgtcgccgatcgctcgacgtgagcacaggaagttcacgatcggatcgagaaaccctgggtctcgtgttttgtt

SEQ ID NO: 1189 - DNA, 4634 bp, Zea mays
tgccccctctcctctcctctcgctcgtgcagaggaggagacagactccccccgtcgccgccctcgcgcctcctccgcccgcagctcaagccgagcgtcaccccgtcggctaccttccattctcgccgcacttctcccactgggcacctcgcgccctcgtgacggtataaatagcccctagtcactcctcggcgctcctcaaacccaccaaaccctagcccacttagcggcggcggcgctagaggtggaacgagaccttggcggaggtagcgagggtagcgctgctcgctcgctcgttgggtttccatcccctactgcctagagcgagctctacgcgacgatgagcagccttgtcgagcggctgcgcgtgcggtcggagaggcggccgcggtacgcgctcgacgagtccgacgacgacctcccgctgcgcgttggggccggaaaggggaaggatcaacagaacgacgcgcccgccgagcggatcgagcgcgaggacgcgaaagaagaagcttgccagcgctgtggaaaaagtgataatctagtctcttgttcaacatgtacatacaaatttcacagaaaatgcttggttccttgcttaaacatcacatctgataaatggagctgcccagaatgtgtaagtccattaacagagatggagaggattctagatattgaagtgctggaagcacctcgtgaagattctagttccacagagcctcgatcaaagaagatggagcgatatcttatcaagtggaaaggattatcatacattcactgctcttgggtttcagaaaaagaatattcagaagccgcgaatatacaccctcgtctgaggactaggttgaataacttcagaaggcaaaaggaagccatgaaaatagaagcagaaagatctggtgaggacatcgttgcaattagaccggagtggacaactgttgacaggatccttgctagcagaaaaaacttagttggcgatcgggaatactatgttaaatggaatgaacttacatatgaggaatgtacatgggaaaatgagtctgacatcacggtgttccaacctgagattgaacgcttcaatgagatccagttcaggcgtaagaaatctggtgacaagggcaaggccactcgggagccacgccaattcaaggagagccctacgtttctttctggtggcacactacatccctatcagcttgaagggttaaactttttgcgatattcgtggtttcataacaaacgcgtaatccttggtgatgagatgggtcttgggaaaacgatacaaagtattgcttttcttgcctcactctttgaagacaagtttggtccgcatctggtcgttgctcccctctcaaccctgcggaattgggagcgtgaatttgcaacttgggcacctcaaatgaatgttgtaatgtattttggagctgctgcttctcgtgacattattaggaagtacgagttttactacccaaaagagaaactgaagaagctgaagaaaaagaaatcttctccatctaatgaagataagaagcagtcaaggataagatttgatgtcttattgacgtcttatgagatgatcaacatggactcgtctattctaaaaaatatagaatgggagtgcttggttgtggatgaggggcatcggttgaaaaacaaagattccaagttgtttggtcaacttaaagattataataccaaacatcgtgttctattaacggggaccccagtccagaataatcttgatgagcttttcatgcttatgcacttccttgagggtgaaagttttgggagtataactgatctccaagaagagttcaaggatataaaccaagacaagcaaattgagaagcttcatggaatgctgaagccacatcttcttcgaagattcaagaaggatgttatgaaagaacttcctccaaaaaaggaattgattctacgagttgaattgacaagaaaacagaaggagtactataaggcaattctcaccaagaattatgaagtgttagcccgtcgtaatggtggacatacatctctaataaacgttgtaatggagttgcgcaaactctgttgccatggattcatgattgatgaacctgatcttgaacctgccaatccagaagaaggtttaaggaggcttctagattcatcaggtaagatgcagctgctggacaagatgatggtgaaactgaaagagcagggtcatagagttctaatttattcacagttccagcacatgttggacttgctggaggactatttaagttacaggaaatggacttatgaacgcatcgatggcaagataagtggcgctgataggcagatacggatagatcgcttcaacgctaagaattcaactaggttttgctttcttctttctactagagctggtggtctgggaataaacttggcaactgcagatactgtaatcatctatgacagtgattggaacccacatgcggatttgcaagctatggcaagagctcatcgcttaggacagactagtaaggtgatgatatacaggcttgttagccgaggtacaattgaggagcgaatgatgcagcttacaaaaaagaagattttattggagcacttagttgttggtcgactcaccaaagctaataatgtcaatcaggaggagttggatgatattatacgctatggatcaaaggagctttttgaagacgagaatgatgaatctcgccaaattcattatgacgaagctgcaattgagaggttgttagaccgtgatcaagttgacggtgatgaatctgtggaagatgaagaagaagatggattcttaaaaggattcaaggttgcaaactttgaatatatcgatgaggcaaaggctcaggcagaaaaagaggaggcacggagaaaggctgcagctgaggctgaaaattctgaaagaaactactgggatgaactattgaaggatagatatgatgtacagaaagttgaagaacatactgctatgggaaaagggaaaagaagccgcaaacagatggctgccgctgatgaagatgacattcatgatttaagttccgaagatgaggattactcattggaggatgacatttcagataatgacacaagtttgcaaggaaatatttctgggaagaggggccaatattctaagagaaaatcacgtaatgttgattctattccattgatggagggcgaaggacgtaccttgagagttcttggattcaaccatgctcaacgagcaatgttcctacagacactcaatagattcggttttcagaattatgactggaaagagtatcttcctcgtcttaaaggaaaaagtgtcgaggaaatccagagatatgctgaacttgtcatggcacatcttgttgaagaaattaatgattctgactatttttcagatggcgttccaaaggaaatgatgcgtgttgatgatgtactagtcaggatagcaaacatatcccttattgaggagaagatggctgccacaggaccaggaaaaattacaaacatttttcctaattacttgctctatgagttccaaggcttatctggtggaagaatatggaaagcggagcatgatctactgttactgagaggcatactgaagcatggatatgcaaggtggcagtatatatcagatgacagagagaatgggctttttgaggctgcacgacgagagcttcatctcccttcggttaatgaaataattggtgctcagttgaacgaggcaaatgggaatttggaaggtgcacaggaaggccaagcgaacacaacaagcatgtcgcattacaaggagatccagagaaagatagttgagttcttgagaaagagatatcatcttatggagagagccttgaatatggaatatgctgtgataaagaaaaaaattcctgttcctgatgatattactgaacaaggtgttccagcaggacatgctccttttattccagatatcagtgaactgttgcgggaattgcccaatcttgagccaatttctaccaatgaattggtttctgagggcacagctggtcagttacaagttccccatctctacaataagatgtgtggagtgcttgaagagagtggtgcttatgcgctcagttccttctttggagacaagtccgcatcttctagtttggccaatagccttcgacagtttgaaactgtgtgcgagaatgtcgtcgaggccttgcgaccacaccaaaatggtactggcagtgccatcaaagaggaattggtagatgcagccaccaaagcagcagcagcagcagctcctcaacaagattcaggccatgatgcaccgcatgggcagtcttcgacagccaaggcggacatggaaatcgatggttgatttgtaggttccagagtggtaagaaagggaatccccctctaatcattatgtatactgtggtcagaatgtgcgctatatattgtaacatcaaagaaagcacctccaggcctgagggtgttactgctaatgcgtttggtttacttgttgtccttgtaatatgcatacacatttagaactcatgcagccattttgtgtgctcgaaccggtggatcgctgccctgttgtcttgtactgtgtttagggcctgtttggatacgaatggttaattataagacggggctaaagataagtacggataa

SEQ ID NO: 1190 - DNA, 1500 bp, Zea mays
gaccactacaactacactactccaaaacgaccctcaagcaggcaggccacccagcactcaggctagatagctcatcacagccacagcagctagaccctagtagctcactcgcgctcgtgccatgatgaatacccgagcctgtggcagcggcagtggcggcaggaacgaccagaccatgatgggcttctccgagcatccgaagccggcggcgtcggggcaggcgcagccgtccccgccgtcgtcgccgagcgagcgtccgccagcaggccgcgggcgccggcgcgcgcaggagcccgggcggttcctcggcgtgcggcgccggccgtggggccggtacgcggcggagatacgcgaccccacgaccaaggagcggcattggctgggcacgttcgacaccgcgcaggaggcggcgctcgcctacgaccgcgcggcgctgtccatgaagggcgcgcaggcgcgcaccaacttcgtctacacgcacgccgcgtacaactacccgcccttcctggcgccgttccaccacccgtcgtcggtgcagcagcagcattacggcgccgcgccgcacgttggctcgtacggccaccaccactaccaccaccagggctcgtcagcagctgtcgtcggcgcgtcctcgggcgagtgctcgtcggcgttgccgcccgtggagcgcgccgacggcacgctgctgctggaccgcggcggcggcggcgggcaccaccaccaccaccaccaccaccccgagttcctgttcgcgagcgcggacgacaactccgggtacctgagcagcgtggtcccagagagctgcctccggccgcggagcagcgcggcggcggtggaggacctgcggcggtactcggacgcggacgcctacgggatgggcgtggggctccgggaggacgtggacgacctcgcgcagatggtggccgggttctggggcggcggcgccggcgacgcggaccagctgtgcggcggagggttcccgtcgggcggagccggggacagcatggccgtggcgtcgtcgcaggggtcgtccgacggctactcgcccttcagcttcctctcccactgatgacaaatgagctagctgccgcgcgcgcatggattgcattgcatctgctgcgcacgtaatgtagatcgatcgatcgatcgatcaccagttagcctagctagctagtttgcttatcatgcatggtgatcgatcggtcctgatcatcggttcttccgatccctgctgtttaattcctttcgagagagtacgttgggtcgaccagtgtgagagtgagcagtatagtagtgttagcatttagcatcagaagtagagggaggagcgatcgagagagaagaagagagagtacgtagctgcgtgccctagcttcttcatgtgtactccgtcttcgttctagtacgtcctacaagacctacgtactctcgatctgtagctttaaccatccaactttattattaagatcatcaactcggtcgaacgcttgctcttatata

SEQ ID NO: 1191 - DNA, 2073 bp, Zea mays
cacagccgcagcaaaacgacagtcgccacccttgtccccaaccaccgttgggagccggcagccccgcacgcttcttcttcccgccgcgccgccaccccaccaatccccagtcccccacgaaagaccaaacccctcgccctcctccgctatttcccagccgaatcccacccatcccgaccaattctgtggtccgccgcgccctccatacccccgcccctgtggcgcactcatctctctcgccgcggcaaaatcgtttagccgtcccaatccgaccacttttctccgatcgagcatgagcatggcgttctcctgcgcgggcgcgcgcctccacggtcgcaccggcgtcggcggcgccaaatgccgtcccggcgcggctctgctcgggcggcggggcacctgcttccgtccgaccgcctggaggtggagcaccgccaggggaatccgcgctgacctcccgccaccgccgcgggcgagcgcggatggcgccgccacctccggcccggacgtcgtcgtccccgaagcgggggacgctactgaggaggtggccgcggttgttcaacctgttgtgctcccggagaagcttgatgtcgatgatggtggaaatggcaagctccctcccgccgccggcggcggtggggacggcgagaatggcggcggtagcggcggcgggggtgacggtgacgaggaggaggatgagttcggacccatactcagcttcgaccaggtggtccaggaggcggagaagagaggggttagtctgcccagtttgcccacggacatagttgaggcggccaagagcgttgggattcagaaactgctgctgctgagatatctggacatgcaggcgtcggcttggcccttggggcctgcaattaggtcctgctcgcttctccggaataggatgctggttgatcctgcattcctcttcaaaattggcactgagatagtcatcgatacatgttgtgcgacatttgctgaggttcagaagagaggggaggagttttggtcagaatttgagttgtatgctgcagatatgttggtaggagtagttgttaatgtagctttagtcggcatgttagcgccatatgctcgatttggtagcagatctgcatcagaaggtctccttgggcgcgttaggcatgcttatgatgccctcccaagcagcgtttttgaagctgaaaggccaggatacaaattttctgtgcagcaacggataggaacatactttttcaagggaatattgtatggttctgttggattcttttgtggtcttgtgggacaagggattgctaatttgataatgacagccaaacggagtgttaagaagtcagatgatgatgtacctgttccacctcttctcaagacttctgctttgtggggtgcattccttgctgtttcttccaacacacggtaccagattattaatggattagagcgcctggttgaggcttcacctgttgggaagcgtgtcccggctgcttctttggcattcactgttggtgtgaggtttgccaataacgtgtacggagggatgcagtttgttgactgggcaagaatgagtggctgccaatgagttgcgagctttcatttctgtggtgaggtcttccttcttctatacatgccccctctcccccccacaataaatgcagttctcttctcttgatgtagccaatggatagataacattatgccaataatgcagatgctttttattgcagtcactattcaccgcgatgctgtattgttgttgcttgctgtctgctacctgttattccacccaaattcgtcgaattttcatcatggcaaagtcaaagatgtggtataaatatcttggggggcaaaagatataaaaaataaatgtggaggtttctcggagaatgatgagtttagcattaggagtgcttagcgcagcatagaaccaggagaggttgaattgcttgttttgttgttgaagatgtcaccgtcttgatttggatagttgagtgtactagtacttgcttatactctattgaatttgctgttctcatattttcatatgttctgtggactactttggaagtccaacatcttgtc

SEQ ID NO: 1192 - DNA, 2714 bp, Zea mays
aaaattgatttattttaagaaaggggagggagagagagagagagagagcagtattttaaagtagcaaagagaagaagcctgggggagagagagacgagagcaggagacagaggggctccccccccacccccgagcccaaacgcagctagctccccattccacccaagctcccgcagccagatgctctcccccgctcgagccccaccgccgccgcccgtccccgccgccgggtagaccgcccgatccgacggcgcccgccgcacccatgggccgcggcggcgcgcgcgcggcccccgccgccgcggtgccgccctggcacgcgctcccggacgaggtctgggagcacgccttctccttcctccccgcggactcggaccggggcgccgccgcgtgcgcctgccacgcctggctccgcttcgagcgccgctcgcgccgccgccttgccgtcgccaactgctacgccgcgtccccgcgcgacgccgtcgagcgcttccccgccgtccgcgccgtcgaggtcaagggcaagccccacttcgccgacttcggcctcgttccgcccgcctggggcgccgacgccgcgccctgggtcgccgccgccgccgccggctggccgctgctcgaggagattagctttaagcgcatggtcgtcaccgacgactgcctcgagatgatcgcggcctccttcaggaacttccaggtgctgcgcctcgtctcctgcgagggcttcagtacagccggcctcgctgccattgccgctgcttgcagaaatctaagagaacttgaccttcaggagaatgagattgaggattgctctattcattggctcagtctatttccagtatctttcacttctttggtaactctaaatttttcatgcctagagggggatgtcaatatcactgtacttgaacaattagtaaccagatgcagcaacctcaagactctcaagctcaacaatgctatacctcttgacaagcttgctaacctccttcgcaaggctcctcagattgtagaactcggaacaggaagattctctgcagattaccatccggatctcttttcgaagcttgaagcagcatttgctggctgtaaaagcttaagaaggctctctggggcttgggatgccgttccagaatacctgccagcattttattgtgtatgcgaaggcctcacatcactaaatctgagctatgctactgtacgaggccctgaactgattaaattcattagcagatgcaaaaatttgcaactcttatgggtgatggacttgattgaagaccatggtcttgctgttgtggcatcgtcttgtaacaaactgcaggagttgcgggttttcccttctgctcctttcgaagcagctgagcaggtctctttgactgaaagaggtcttgttgatgtatctgccagttgcccaatgctggagtcagtcctctacttttgcagacggatgaccaacgaggcccttattaccatcgcgaagaaccggcccaacttcacttgcttccgcctatgcatcattgagcctcacacaccagattacattacacaccagcctcttgatgcaggttttagtgccattgtggaatcatgcaagggcctcaggcggctttctgtttcaggccttctcacggacagtgtatttaaatccatcggggcacatgctgaccgtcttgagatgctctcgattgccttcgccgggaacagtgatttgggcctccattacatcctatcgggctgcaagagcttgaagaagctagagattagggactgcccatttggtgacaagcccttgctggcaaacgctgccaagctggagacaatgcgatccctttggatgtcgacgtgctcaatgaccttgggcgcatgccggcagcttgcgcgcaagatgccccgtcttagtgtggaggtcatgaatgatcctcgacggggattccccttggactctctaacagatgagagccctgttgagacgttgtatgtctaccggacaatttcaggtccaaggtccgacacaccagcttgtgtccagattctctaaggggcagctgtggtctacaaaggtactatggaagcatccattttcaatcacatcatgtaccttcaacaccttactagcataacctggatcgtctccttgaagtagcaaggctggtgacctcggtaatcctgtcataatctctgcttagctgtacaactgtttctgggagtttagggtgagagactcagggtccctttcaggtgttaataactgtagggaggacactcgatgagttacaggaactactagatagcgtcttgaggaaacttgggtttgttttcttagcgtgcctagttcttttcatgtataaaaaaatatgggatcattccaatgctgccacaatgtactgtactattggaacaattgtacttggagcctctacttttttgagttttgaccccctccccccccccccccccccccccccccactgattatgggttgctgttgctcccgcctgtgatttgtgaatgctatataaaagcttgtacgtggctctgccttcatgtagcgcctccctcgttttggagaacggtaacttcactggttgtagtctctacccttatcaaggcttaggcatctgaactgctggaagtctatgcccccttgaccctggatgatctgaaggtatagtttgcttctggttctggccttctactttgacttcgaatcactt

SEQ ID NO: 1193 - DNA, 1481 bp, Zea mays
atggcggccacatcgtccctgaagagcagccttctcctcccgtctaccatctccgacttcagtggcgcagccgcagccgtctccatctcaacgcagaagaggagatcacggggggcgagggtgcaggtctcagcggctgcggactccaagaacattctggtcatgggggggactaggttcatcggggtcttcctgtccaggctccttgtcaaggagggccaccaggtcacattgttcaccaggggaaaggcacccataactcagcagctgccaggggagtccgacgcggagtacgcagacttctcctccaaggttctgcacttgaaaggtgacaggcaggacttcgaattcgtgaagacaagcttggctgccaatggatacgatgtggtttacgacatcaatggacgtgaggctgtgcaagttgagcccataattgaggccttgcctaacctgcaacagtacatctattgctcatcggcaggagtgtacctgaaatctgacattcttccgcactgtgaggttgacgcggtggaccccaagagccgtcacaagggcaagctggagacggagagcctgctgacctcgcgcggcgtgaactggacgtccatcaggcccgtgtacatctacggcccgctcaactacaaccccgtcgaggagtggtttttccaccgcctcaaggccggccgccccatccccatccccggcgccggcaaccagatcacgcagctcggccatgtcaagcaggatctggcaagagccttcaacctggtgctcgggaaccccaaggcgagcaagcagatcttcaacatctccggggccaagtatgtcaccttcgacggccttgcgcgggcatgcgcaaaggctggagggttccctgagccggagctcgtccactacaaccccaaggaattcgacttcggaaagaagaaggccttcccattcagagaccagcacttctttgcgtctgtggagaaggcgacgagcgaactcgggtggacgccggagtttgacctcgtccaggggctcaccaactcgtacaacctcgacttcggccgcggcacgttccggaaggaggcggacttcaccacagacgacatgatcctcgacaagaagcttgccaccgtttgatgcatgtctcgggctagctgtacgtacgtacgattagagaagagataaatgatagcaaatcaaaatttgttgttaagtaaagtgagctcttagcttctatcagggacgattattaaggatacccgaattattcctcccaagaacacactcagagaagtaaggtacctcttaggccgaggcttctcctcgagagtctcccacctcgggcataactccgcctcgccccgagctgatccccgacagataagataaaagcgcctaaaaataggaaggaaacactcgcatttaatgtatactagttgtgtgctcgtgcgttgcaacgggaacatataataccattgatagcttatgta

SEQ ID NO: 1194 - DNA, 3386 bp, Zea mays
ggattgcattatccgctcgctgtgcctgccctgcttcttccgccattctttccgtctctgctctactttcttggtcgcctgtccggaggctcctccccgcggcccctgagcaaactgtaccatagccgcgtgattgattggttcacgggagggacagggagcggcgtcaagctggttttggtagtaaaaaatcacttcaattgtcccctcattcccatactaaagcaggctgcccaaaatttctcaatattgtcctcagaatttgttgctgtgcttttgccagaagcggtgcttgcttcggcagatggttgttctcccgcacctgtcctaccgccgttgatcgcgagagtctcgtacgtagtcttcgggggcaagcatccatggcggagtcatcgtcaaggcaagcggccgagatggtggagaagtggatggcgttcccgtctggctccgacgccggcagcggcttcgcgttcccggcgccacgctcagtgtcgggcgcgggcaaggagatagtggagctggcgtcgccctccacagccacggccacggccacggccacgaccacggccagtgccggcaacaggcaggcctcgttccagcgcggccgcgacagtggcgtgggcagcaccaggtcgtccatggacggcgcgcgcgcgtcgggggactcgtcgatgccgcgggtgtcgcaggagctcaaggacgcgctgtccagcctgcagcagaccttcgtggtctccgacgccacccgcccggactgccccatcatctacgccagcgccggcttctacaccatgaccggctacacccccaaggaagtcaccggccgcaactgccgcttcctgcagggccccgacacggacatgaacgaggttgccaagatccgggacgccgttaaaaccggccgcagtttctgcggccgcttgctcaactaccgcaaggacggcacgcccttctggaacatgctcaccgtcacccccatccgcgacgacaacggcaaggtcatcaagttcatcgggatgcaagtcgaggtgagcaagtacacggaggggctcagcgaaaagcgcatgcggccaaacgagatgccagtgtccctcatccactacgacgaccggcagaaggagacggcaatgtcatcgatcacggaggtggtgcagacggtgaagcacccgcgcgctcgctccgagggtgaacaggagcccgtggagcctgcaccgcccgtcatggcgtcgccgttggtggcccctggcacgccgtcgggcggtgccagcctcaagtccccgctctgggacgtgaagaaggaggactcacggctgagccggaagtcgagccgccgctcttccctcatggggttcaagatggggaagaggagctcgataggaagcaaggatgcccttccagcggaggtggaggccccggcgccggcgccggcgccaccggagtcaacgacggagaagcagcgcaagaacagctgggagcaagaggggagggagagggacatcaggcaggggatcgatctagccacgacactagagcgtatcgagaagaacttcgtcatcacggatcccaggctccccgacaaccccatcatcttcgcgtcggatagcttcttggagctgacggagtacacgcgggaagagatcctcgggaggaattgcagatttcttcaagggccagagaccgacatgtccacagttgataagatccgggaagctatccgggaacagaaagaaatcactgtccagctaatcaactacaccaagagcgggaagaagttttggaacttgttccacctacagccaatgcgagaccagaaaggagagcttcaatacttcattggagttcaattggatggaagcgaccatgttgaaccccttaggaatcgtctctctgagaacactgaactacaaagtgctaaattggtcaaagctacggcagagaatgtggatgaagcagtcagagagcttcctgatcccaacctgagaccagaggatctatgggacatttactcacgatatgtttccccaaagcctcataaacgttacaactcttcttggattgcgatggaaaagattataaaatctggtgtgaagattggcttgaagcacttcaagcctataaaacctttgggttatggtgacactggcagtgtacatttggtggagttgcaaggaagcggtgaattatttgcaatgaaggcaatggacaaatcagtgatgttgaaccgcaacaaggttcatcgagcttgtatggaaagagaaatatactcactattggatcatccttttctcccaacattatatacttcattccagacaccaacacatgtttgtctcataacagacttttgtcctggaggagaattatttgcactactcgatatgcaaccaatgaaacttttcagagaagaatctgcaaggttttatgctgcagaggttgtaattggcctggagtatctccattgccttggaataatataccgtgacctaaagccagaaaacattttgctccaagaggatggccacatcgttctgactgattttgacctctcttttttgacttcctcaaaacctcatgtgataaagcattctacatcaaggcgaagaagatctaaggagtatctgcccccaagttttgtttcagatcctgccactccatcaaattcttttgttggaactgaagagtacatagctccagaggtcatcactggtgtaccacatacaagtgccattgattggtgggctcttggaattctcttgtatgaaatgttgtatggacgtacaccttttcgaggaaagaacaggaaaaggacatttcataatatcctgcacaaagaccttacatttccaagtagcattccggttagtcctgcggctaagcaattaatccatggattgctacagagagatccctcttctcgacttggttcaagtgctgctgcaaacgatatcaagcaacatcccttttttgaagatatacactggccactcatccgttgcatggagcccccagagcttgatgttccactgaaactaactcggaaggaacctgaacaaaaagtgaagcctgaggaggatatatactcatgttcagattattgagacattttaagggcaggttgtacgatcccccctcccgaccccgtgcatgactttcagcctgaagagattttatattaccgagtggaaataacgttgctgagcatgtacatagtaataaaagaggtttataggcatgcaagatttccagcctgaattgcacaagaggtcgttgtaagtcattcttttggttaggttaagtgaataatccatcaacaggataaagttcttgtaaatgtacactttctttggcatatataataaaaatcttactaatttccgttggtcaaa

SEQ ID NO: 1195 - DNA, 981 bp, Zea mays
atggctctgacggccagagtgaggaggcttccccagttgcacatctcgctcgacgtcccctcgtgcgccttccgtcaccacaacccgcccgcggcggcctcgacgtccgcgtcgcgagccagcggtgagttccggctctcggacttcgacaggctcgccgtgctggggcgcgggaacggcggcacggtgtacaaggtcgcgcaccgccggacgtcggcgctgtacgcgctcaaggtgctgcaccgcggcgaccccggggccgcgtcggaggtggacgccctgcggcgggccgacagctcgccgcacgtcgtgcggtgccactccgtgctccccgcggcggcccccggcgaggtcgcgctcctgctcgagctcgtggacggcggctcgctggacgccgtcgcggcccggcgcggggcgttcgccgaggccgcgctcgccgaggtcgcggcgcaggcgctggccggcctggcgcacctccacgcgcgccgcgtcgtccaccgcgacgtcaagccggcgaacctcctcgtcagcgccgccggggaggtcaagatcgccgacttcggcatcgccaaggtcctctcgcgcgccggcgaccactgcgccgcctacgagggcaccgccgcgtacatgagccccgagcggttcgacacggagcgccacagccacgccgacccctgcgccgccgacgtgtggagcctgggcgtcaccgttctggagcttctcatgggccggtacccgctgctccctgccgggcagaagcccagctgggcggggctcatgtgcgccatctgcttcggcgagctgccgtcgctgccggacggcgcagcgtcgccggagctccgtgcgttcgtcgccgcctgtcttgagaaggactacaccaagcgcgcgtctgtggcacagcttattgcgcacccgttcgtcgccagaagagacgtcgcggcctccaaagacgcgctccggcgactggtggccggggcctga

SEQ ID NO: 1196 - DNA, 3146 bp, Zea mays
gcccaagggcaagcacaattctacttccgctgccgcacctccataaattagcgcctcctaacctcttgtgcttacgcccttgttcgtctcccggcggcgtcttcctctttactcctcccgctctccctccctcgcaccgtccgtctgctagctcagcctactcactccactcaactcacccccaactccactccgctcccgagcccggactgactgactgactgtggtggtggtggtgcatcagcagcccgcgcggcgccaaaacacgcaaactgctccctccctcactcacccctatcccccgcgctgggtcgcccgatcgccatgcgcgcggcggcttcctcttggcgtttctagatgggctcctcctcctccctcctcttctcctcgtcctcctccgccgcatccaccgccccccactcctttccccactctcatgccaccgccaccgcctccgcctcctctcactccttattgccgccgctgccctcccccacacctccctccgcctcctccttcttccccaaaccacttcctcctccactacctccatcagctagaccaccaagaagccgccgccgccgccatggtccgcaagcgccccgcgtccgacatggacctcccgccgccgcgccgccacgtcacgggcgacctctccgacgtcacggcggccgctgccgccggtgttggtggtagtggcgcgccgtcctccgccagcgcgcagctgcccgcgctgcccacccagctccaccagctgccccccgcgttccagcaccacgcgccggaggtggacgtgcccgcgcacccggccccggccgcccacgcgcaggcgggcggcgaggcaaccgcgtccacgaccgcgtgggtggacggcatcatccgcgacatcatcgggagcagcggcggcgccgcggtctccatcacgcagctcatccacaacgtccgcgagatcatccacccctgcaaccccggcctcgcgtcgctcctggagctccgcctccgctccctcctcgcagccgacccggccccactgccgccgccgccgcagccgcagcagcatgctctcctgcacggcgctccggccgccgctcccgcggggctgacgctccctcccccgccaccgcttccggacaagcgccgccacgagcatccaccgccgtgccagcagcaacagcaggaggaaccgcatccggcgccgcagtcgcccaaggccccgaccgcggaagagaccgcagcggcggccgccgccgcacaagcagcagctgctgcggccgccaaggagcggaaggaggagcagcggcggaagcagcgcgacgaggagggcctccacctgctgacgctgctgctgcagtgcgccgaggccgtgaacgcggacaacctggacgacgcgcaccagacgctgctggagatcgcggagctagcgacgccgttcggcacctcgacgcagcgcgtggccgcctacttcgcggaggccatgtcggcgcggctcgtcagctcctgcctgggcctgtacgcgccgctgccgccgggctcccccgccgcggcgcgcctccacggccgcgtcgccgccgcgttccaggtgttcaacggcatcagccccttcgtcaagttctcgcacttcaccgccaaccaggccatccaggaggcgttcgagcgggaggagcgcgtgcacatcatcgacctcgacatcatgcaggggctgcagtggccggggctcttccacatccttgcctcccgccccgggggcccgcccagggtgaggctcaccggcctcggggcgtccatggaggcgctcgaggccacggggaagcgcctctccgatttcgccgacacgctcggcctgcccttcgagttctgcgccgtcgccgagaaggccggcaatgttgacccggagaagctaggggtcacgaggcgggaggccgtcgccgtccactggctgcaccactcgctctacgacgtcactggctccgactccaacacgctctggctcatccaaaggctggcccccaaggtggtgacaatggtggagcaggacctgagccactcgggctccttcctggcgcgcttcgtggaggccatccactactactcggcgctgttcgactcgctggacgcgagctacggcgaggacagccccgagcggcacgtcgtggagcagcagctgctgtcgcgggagatccgcaacgtgctggccgtgggcgggccggcccgcaccggcgacgtcaagttcggcagctggcgcgagaagctggcgcagtccgggttccgcgccgcctcgctcgccggcagcgccgcggcgcaggcgtccctgctgctcggcatgttcccctccgacgggtacacgctggtggaggagaacggcgcgctgaagctcgggtggaaggacctctgcctgctcaccgcgtcggcctggcgccccatccaggtgccgccgtgccgttgatgagacctctgcctgctcctgcttgcgttgagaggccgccactccacttgttttgcatctgtagctgctcggtttggtcatcagctgggagataagaaaagcggaaacgtactaattgctctggagtagatccatccattcacagtgatagttactgatgtactaagctttaattagttcaatgctagatcgttcttgttcaggtgtcgatcgcgtatccttgtccttggtctccttttcattttggtgctttgtctagtcgctttcccgactaatgccgtgctcttcatgcgcgttctagtgaagattcttgccgagaatattagcatagttttcatgtaaagtagccatcaagcaagtattaatttgtggctacttcaatgacatcctaaggccatgttttgaacaccttttgcatcctaatcctagaatccatgtctaaaactgaaactgctgtgctactactccactgttgctgctgattatagcagagagtgatgagtatttgtgcagctgtggtttatttcggtgttcttgacttgacattattacttttcttgggtggagttccaccctttcacatgtgtgggcatgcgctctgtctactttcaacatcaccttttatttttatttttgtatttccctctaatcctccatgggctgaggtcattagcttgtcaattcttgcgtcttgacattctga

SEQ ID NO: 1197 - DNA, 2223 bp, Zea mays
atagcggacgcccccccccccccaagttcccacgagatcccgactcggacgaagctctcctcgccggccaccgtcgcggcagcttgctacgcacagggagtctgcggcgcgcgaggaatacagcgagggatggggtggggcacagtggtttacgagggcgcggtcgtcggctcgtcgctggtggggctcggctgggcggggctgtggttcctgaaccggcggctgtacaaggagtacgaggagcggcgggtgctggtgcagatcctcttcggcctcgtctttgccttctcctgcaacctcttcgagctcgttctcttcgagatcctgcccgtcctctccaagcacgcgcgcttcctcaactggcacctcgacctcttctgcctcatcctcctcctcgtcttcgtactcccctactaccactgctatcttctgctccgtaactcagggatgaggagggaccgggcgtggctcgtcgcggcgctctttctgctggtcttcctatacgggttctggcgcatggggattcacttccccatgccttcaccggagaagggtttctttacgatgccgcagttggtcagtaggattggggtgattggagttagtgtcatggctgttctttctggttttggtgccgtcaatctgccatacagttatctgtcgctattcatcagggaaattgatgaaacagacatcaaaaccttggaacgccagttgatgcaatccatcgagacatgtactgctaagaagaagaaaattattttgtcccagatggagatggagaggattcaaggatcagaggagaagttaaaggccagatcgtttctgaagcgtatagtgggaacagttgttagatctgtgcaggaagatcaaactgagcaggatataaaaaacttagaagcagaagtccaggcactggaagagctttccaaacagctgtttcttgagatatatgaacttcgtcaagctaagatagctgctgcgtattctcgaacttggagaggtcatcttcagaatctacttggatatgctttatcagtctattgtgtttataagatgctcaagtccttgcagagtgtagtctttaaggagtcaggctctgttgatcctgtaacaatgtcaataacgattttcctgagacattttgacattggcattgatgttgcactgttatctcagtacatatctttgatgttcatcgggatgttggttgtcatatctgttcgaggtttcctggcaaatgttatgaagttcttcttcgctgtttctagagttgggagtgggtcgacaaccaatgttgtccttttcctatcagagatcatgggaatgtacttcatatcttccattcttcttataagaaaaagcctggcaaatgaatatagggtgatcattactgatgtcttgggtggtgatatccaatttgacttctaccatcgctggtttgatgctatatttgtggctagtgcgttcctctccttgcttcttatatctgcccaatacaccaccaggcaaacagacaagcatccgattgattgatgcatcttgcccacaatgtgtgcatgttgtctttttaaccagtattcatccaaggttgacccattctttgtaccacagttttccagagcactgtttctccatacacttccatacacagttacaaaacataatacgtcagttaacttgaacaaagtctctattttgtaatatgtttcccgattgcattggtttatggtaaacagttcctccaacagcggctatctgagtcacgtctggtgatgcagtgacgggacacgggattcattgtaatgcagtctgcacgatactactttttgactaggacaattgtggaagcccatattaggaattgattatgactttgtaaaatagcttgaaactagtgtcgtagcaccgtagcacggtatgttggtgtatcttatatatttttttggctgtttcatgtataacacacttcgcgacaactctgaatggtagatagatctgtttcttcatgtgacttcaggatgacaactatatacctgaatccttataggtacgtactttgcaatccgtaagcatatgctcttatattgatgatgtttctttggtgacccatcccatgcatattactccctcggagttccaaaatatagttctttctagctcttttttttcgtccacattcattcgaatgataataaatatagacatacatataaactacaa

SEQ ID NO: 1198 - DNA, 2611 bp, Zea mays
cgcaggcgagcatccgagcaccacccgcctcccaattccagttgtcttccttccccgtccccggacgtgccagctcagctcgaggccccgcctcctccgccgttctctccgatccccaattttaaacgcccccccttctctctcctgcccactcgcctccctcccggtcccggtcccggcctcccccctccccctccgctccccccaaccccagaacatccggcgctttcaccccccttcccctcccctcccctcgtcctccgcgatggcggcgtccatggcgtcgccgcgggggcggtcgatccgggagacggtgctggagaccgtggcggcgtaccaccagcagcagcgggccaaggggaagctgcgcaagagcctcacctacgccggaggcgagctctcgtccgcgggccgggcccgcggggacggccccgcctccacctccgtctcctcgctctgcgggcccgacgacgacgacgagcccttctgggaggaggaggagggcaccgtcgagctcgtccagctcggggccaaccgcgctaagaacgtcctcatcctcatgagcgacaccggcggaggccaccgcgcctccgccgaggccatcaaggacgccttccgcatcgagtttggcgacgagtaccgggtgggtgggtgcgcgcgcgctctctctctctgttcattcatcactcgtgctgtcctcctgcaccacggcctctcctcgacggcggatttcgtaatcaccatcaatcgtctcgtctgccaggtcttcgtcaaggatctgtgcaaggaccacgccggctggccgctcaacaacatggagagctcctacaagttcatggtcaagcacgtgcagctctggaaggtggcattccacagcacctcgcctagatgggtccataacttctacctcgccgctctcgcctcattctacgccaagaaggtggaggctggactgaagaagtacaagccagacatcataattagtgtccatcccctcatgcaacacattcctctgtgggttctcaaatggcaaggcctacagaacagggtagtctttgtaactgtgatcacagacctcaacacatgccaccctacatggtatattcagctaatgataaggaaaacatatagtaaagcaatttgttcacttgatctgacaattagaagaaaaaaacgcaggtttcatgctgatgtgaatagatgttactgcccttcagaagaagttgccaagcgggcagcactggatgatctacaaccatctcaaatccgcgtgttcggtcttccgattcgaccatctttctgccgtgcagttcttgttaaggatgatttgaggagggaacttgaattggatcctgagcttcctgcagtactgctcatgggaggtggagagggcatgggtcctgtcaaaaagactgccagagccctaggagaatcattgtttgacaaagagcttggaaaaccaattgggcagcttattgtcatttgtggccggaacaaaacgctaagctcctcactgcaggcagttgaatggaaaataccagtaaaggttaggggatttgaaacccaaatggagaagtggatgggagcttgtgattgcattataacaaaggctggaccaggtaccattgctgaagccttgataaggggtcttcctataatccttaatgacttcatacctggacaggaagttggcaacgtaccttatgttgtggacaatggtgcaggtgtgttctcgaaaagccccaaggaaactgctagtcttgttgcccgctggtttggtccagattcagaggaattgaaaaaaatgtcagaaaaggcactgaaattggcccaaccagaagctgtctttgacattgtcaaagacatgcatgagctctcccaggagcaaggtgtcatatcacagatatctagttccttgacttcatccttcttcttaccatcgcctgaaagcacccctctccaacttatctgaaaccatcaagctaggattgatattgttgacatcgtgaacttggcattgtccctacagtgtgggcgtgctttcggctgatccgctcacatggtagttatgggcagggtcgtttgactgacaggttctcgcgtgtgatgatgtttgccttcatgttaacttttgtaaaaaaaacattcattcatattatgtttctggctcccttcgtcatcaaaggggaattggtggtggtggtggcttgtaaaatacactcaaattttgtgcatggacatgtcagacccttatcatgtatactagctgatgtgatccgttcatgtaagtggaagatgtgtataatatgattacagattgttggagtggaaatttatctctctctctatctctatctgtttttagtttggtatatggtcggctgttgtacgagtattttggtggtgaactgaatgtgccttttgtcctgcactgcgctcttacagcaggcattgaatctctatctgcacagctgaatgaagtcgataccagaattgcattcatcaccctcctcgtcctcgccctcgtccgtgtccgcgagcgagccgccgaggtcggagcgctgcaggcagaggaggcgcttcacgaggccctcggcgaggagcgcgtcca

SEQ ID NO: 1199 - DNA, 4428 bp, Zea mays
gtgttgtgttgtgttgtgttgcgtgctgtggagggggaggaggagatggggaagggggcaggagcagcggagccgtcgacggtggtgctggccgtcaacggcaagcgctacgaggcggccggcgtggctccgtccacgtcgctgctggagttcctccgcagccagacgcccgtcagaggccccaagctcggatgcggcgaaggtggctgcggtgcatgcgtggtcctcgtctccaagtacgacccggccacggacgaggtgaccgagttctctgccagctcctgcctgacgctgctccacagcgtggaccgctgctcagtgaccaccagcgagggaatcggcaacaccagggatggctaccaccccgtgcagcagcgcctctccggcttccacgcctcgcagtgcggcttctgcacacccggcatgtgcatgtccatcttctccgcccttgtcaaggccgacaacaagtccgatcgcccggaccctcctgctggcttctccaagatcactacctcggaggcagagaaggctgtctcgggcaacctttgtcgttgcaccggatacagacccattgttgacacctgcaaaagctttgcctctgatgttgacctcgaggacctaggcctcaactgtttctggaagaagggcgaagaacctgcagaagtcagcaggctgccggggtacaacagcggtgccgtctgcacctttccagagtttctcaaatccgaaatcaagtctactatgaagcaggtgaacgatgtccccattgcagcctcaggtgatggctggtaccatcctaagagcattgaagagcttcacaggttgtttgattccagctggtttgatgacagttctgtgaagattgttgcttcaaacactgggtctggagtgtacaaggatcaggacctctacgacaagtacattgacatcaaaggaatcccagagctttcagtcatcaataaaaacgacaaaggaattgagcttggatcagttgtgtccatctctaaagctattgaagtgctgtcagatggaaatttggtcttcagaaagattgctgatcacctcaacaaagtggcttcaccgtttgttcggaacactgcaaccataggaggaaacataatgatggcacaaaggttgccatttgaatcggatgttgcaaccgtgctcctagctgcgggttcgacagtcacagtccaggtggcttccaaaaggctgtgcttcactctggaggaattcttggaacaacctccatgtgattctaggaccctgctgctgagcatatttatcccagaatggggttcagactatgtcacctttgagactttccgagccgccccacgaccatttggaaatgctgtctcttatgtaaactctgctttcttggcaaggacatcaggcagccttctaattgaggatatatgcttggcatttggtgcctacggagtcgatcatgccatcagagctaagaaggttgaagatttcttgaagggaaaatcgctgagctcatttgtgatacttgaagcaattaaactactcaaagataccgtttcaccatcagaaggcactacacatcatgaatacagggtcagcttggctgtcagtttcttgttcagtttcttatcttcccttgccaacagttcgagtgcaccatcaaatattgatactcccaatgggtcatatactcatgaaactggtagcaatgtggactcacctgagaggcatattaaggttgacagcaatgatttgccaattcgttcaagacaagaaatggttttcagcgatgagtacaagcctgttggcaagccgatcaagaaagtcggggcagagatccaagcatcaggggaggctgtgtacgttgatgatatccctgctcccaaggattgcctctatggagcatttatctacagcacacatcctcatgctcatgtgagaagtatcaacttcaaatcatccttggcttcacagaaggtcatcacagttataaccgcaaaggatattccaagcggtggagaaaatattggaagcagcttcctgatgcaaggagaagcactatttgcagatccaatcgctgaatttgctggtcaaaatattggtgtcgtgattgctgaaacacaaagatatgctaatatggctgcaaagcaagctgttgttgagtatagcacagaaaatctgcagccaccaattctgacaatagaagatgccatccaaagaaacagctacatccaaattcccccatttttagctccaaagccagttggtgactacaacaaagggatggctgaagcagaccacaagattctatcagcagaggtaaaacttgaatcccagtactacttctacatggaaactcaagcagcactagcgattcctgatgaagataactgcataacaatctattcctcgacacaaatgcctgagctcacacaaaatttgatagcaaggtgtcttggcattccatttcacaatgtccgtgtcatcagcagaagagtaggaggaggctttggtggaaaggcaatgaaagcaacgcatactgcatgtgcatgtgcccttgctgccttcaagctgcggcgtccagttaggatgtacctcgatcgcaagacggacatgataatggctggagggagacatccaatgaaggcgaagtactctgttgggttcaagtcagatggcaagatcacagccttgcacctagatcttggaatcaatgctggaatatcaccagatgtgagtccattgatgccacgtgctatcataggagctctcaaaaagtacaactggggcactcttgaatttgacaccaaggtctgcaagacaaatgtctcatcaaagtcagcaatgcgagctcctggagatgtgcagggctctttcatcgctgaagccatcatcgagcatgttgcctcagcactcgcactagacactaacaccgtcaggaggaagaaccttcatgattttgaaagccttgaagttttctatggagaaagtgcaggtgaagcttctacatacagcctggtttccatgtttgacaagctggccttgtctccagaataccagcacagggctgcaatgattgagcagttcaatagcagcaacaaatggaagaaacgcggcatttcttgtgtgccagccacttatgaggttaatcttcgaccaactccaggcaaggtgtcaatcatgaatgatggttccatcgctgtcgaggttggaggaattgagataggtcaaggattgtggactaaagtgaagcagatgacggcctttggactgggacagctgtgtcctgatggtggcgaatgccttctggacaaggttcgggttatccaggcagacacattaagcctgatccaaggaggtatgactgctgggagcaccacttctgaaactagctgtgaagcagttcggcaatcgtgtgttgcacttgttgagaggctgaagcctatcaaggagagtctcgaagctaagtccaacacagtggaatggagtgccttgattgctcaggcaagcatggcgagtgtgaacctatcagcacaggcgtactggactcctgatccatctttcaagagctacttgaactacggagctggcaccagtgaggtggaagttgatatcctaacaggagcaaccacaattctgcgaagcgacctggtgtatgactgcgggcagagcctaaaccctgctgtagacttgggccagatcgagggctgctttgtccaaggaatagggttcttcacgaacgaggactacaagacgaattccgacggcttggtcatccacgacggcacatggacgtacaagatccccacggtggataatatcccgaaggagttcaatgttgagatgtttaacagcgcccctgacaagaagcgtgtcctatcttccaaagcgtcgggcgagccgccgctggttctcgcagcctcggtgcactgcgcgatgagggaggccatcagggcggcgaggaaggagttctcggtcagcaccagccccgcgaaatccgccgtcacattccagatggacgtgccggcgacgatgcccgtcgtcaaggagctctgcggcctcgacgtcgtggagaggtacctcgagaacgtgtctgccgccagtgccggcccaaacacagcgaaagcatagatccagcaggcctcagggtgcagtcggcgcactgccagagatgatgtgtgctgccctgatgtacagacagtacagtacagaggagagagaattgggggaactcaggaactgcgaggagcgatgaacagtatatagagtgaaaaataaaagtgcttcgtactaataatcactagaaaaaattatgcacatctcccacgcactaccggcacgactgttgaatattttgtaaaataagatgtcataagctatttattttctgtatgattagatcagcaaataatttaattcaagtataaatcacagaaa

SEQ ID NO: 1200 - DNA, 2129 bp, Zea mays
tgcttctcgccctaccatcgcctgaccgacgcgcccgttttctcctgaaaacagaaggctccggcctccggcatccgccaaaaaggggaaaaaaggagagataacacacacacacacaaaccccaatcccctgcggcggcgatggacccgtcatcggcgggctccggcggcaactccctcccgtccgtcggccccgacgggcagaagcggcgcgtgtgctacttctacgacccggatgtgggcaactactactacgggcagggccatccgatgaagccgcaccgcatccggatgacgcactcgctgctggcgcgctacggcctcctcaaccagatgcaggtgtaccgccccaacccggcccgcgaccgcgacctctgccgcttccacgccgacgactacatcaacttcctgcgctccgtcacgccggaaacgcagcaggaccagatccgcctgctcaagcgcttcaacgtcggcgaggactgccccgtcttcgacggcctctacagcttctgccagacctatgcgggcgcctccgtcggcggggccgtcaagctcaaccacggccatgacatcgcaatcaactggtcggggggcctgcaccacgccaagaagtgcgaggcgtcgggcttctgctacgtcaatgacatcgtgctcgccatactcgagctgctcaagcatcacgagagagttctgtatgtcgatatcgatatccaccatggtgatggagtggaggaggctttctacacaacagatagggttatgactgtctcgttccacaagtttggtgattatttcccaggaacaggggatatccgtgacattgggcactcaaaagggaagtactactccctgaatgtccctctagatgatgggattgatgatgaaagctaccagtccctttttaagccaatcatgggcaaagttatggaggttttccgccctggtgcagttgtgcttcagtgtggtgctgattccttgtctggggataggttgggctgcttcaacctctcaatcaaaggtcatgcggaatgtgttaggtatatgaggtctttcaacgttccattgttgctccttggtggtggtggatataccataagaaatgttgcacgctgttggtgttatgagactggagttgctcttggccaagagcctgaagacaagatgcctgttaatgagtactatgaatacttcggtccagattacactcttcatgttgcaccaagtaacatggagaacaaaaatacacgacaacaactggatgatatacgatctaaacttctggataatctttcaaaacttcgacatgctcctagtgtccactttcaagagagagttcctgacacagaaatacctgagcaagatgaagatcaagatgatccagatgaacgacatgatcctgactctgatatggaagtggatgaccacaaggctgtggaagagtcatcgaggaggagcattctaggtataaaaatcaagagagaatttggtgaaaatgcgaccagagtacaggatggtggcagggttgcatctgaacatagaggactggaacccatggcagaagacattggttcctccaagcaagctcctcaggcagatgccagtgcaatggccatcgatgaaccaagcaatgtcaagaatgaacctgagagctcaactaaattgcaaggccaagcagctgcgtaccacaagccatagctgcgaccatcaagagttgctgggtttctgctaggcaacttcctgcttgatttggacagtccagaaaacagaagtgaatccgcaatacgtccctgccatttcaaatttgacttggttacacctatctgtgacaatgttaatgtaatgagatcccatggcactagtgaagttcccaggtgtccacctgggattgcttgcggttgagagagacgatagtctgatgacccatgtatacatgaagcccatgatctcagttgtacagtcattagccaatacaaatatgcagtggactaaagggtgattcattgcgtgttcttaatggttttgtgtcctgactcgtccttttttttgtgcggaagcaaggtaggcagttgctgtgccgcaaatttgccgagtttgtagaatgctgatgcaaatacatgcgctatctgcct

SEQ ID NO: 1201 - DNA, 3999 bp, Zea mays
actgaggaagcttgttaggttatccatttatttgtgccccacagcaggtgggcgttggtttcctggtggggggtggggtggggtggggaggaaactgagtttgtgcgagttgtattatgtgcgtattgtatgtatatcttcttaatactagcaacaaagaaaatggtgtctggttatcagtcagtggagaataagttcggtgaatggtgaacccattgtatatatagcgctatgttgctcaacagagcacaccacaccacaccagagttacatcattagttccagtcctgcttcacacctggccctgttttgcttgaccttttagctgtgatcaacctatatggtcagctaaagaaaatgctttacttgtccatggaacttaccagattaccagtagtttacacttcacccatgagattttttttttgcttctgttaataccctcattaaaatcagaagtgcataaaaaaacttgacctaagggataagacagcccctgggtattaaaaagaccttctcatgcatgttgagaaaactccggaaccctaccccacctatacacagcggcaccgtaacacacatgaaaacgaccgtgactaggagtcctctgctttgtcatgggatagaagaggagatttttttaacccagcctgaaatttgtttccatggggagttagactcaggacataaaagtaagagacttagagtaggtaaggtggaaagcaaattagcagtaggttaaggtagtaagatagtgaggaaagttcccttgagtttgaaactttattgaaatattcaaccgcccatcattgcattatattcttttaattatgggcaatttttggttcgtttgagtagattatgggattttggctgagctcaacagcaattctggtcattcttgtttgtttggagttgacgtttagaattgttaggccctaccatggagagatgttgggaacaccactattttgtagggatcttctgaatgcaaaaaaatgaaattaggtacagcacttggccagtcagtttgtagggggttatttgtcgggtgcaatgccacgatagtgtgttataacatagattgctgacgtctgacaacataggtctaataattccttgatgctgtgttggaaacaagatgatccatgaacaacccattgaaaaagttcaagaacgctgaaatttccaatttacctgggcccagccgtttaatgtcccaatccaaggaatcgtcataaaaattgtttttggctagtgattttcatggtaccagacactgatgtagctacaattgtgccagatgctgatcagtgcttattgttcgtgcatgcttctaggatattgtttcaggagaattgtttgtggatgcttctagaatattgtttcaggcgaacaattctgtggatacttctaggttagcttcaggaattgaacacacatttggtaacatagtagcttacataactctttgagaatcattcatatttaactgcacgagatcattggtggagaattagatatggcagaataaatcatggcacacaaggtctttggttgcagtacgttgcttttgctaatatattaacttctatccattttacgcatctttgctatagcaggcctagcttttacagtttaagcatttactatgtacttcaatcttgccatgaaaataaaaagtatattctcatccttgttgagggctattacacctcatgtacagttctgtgattaaactatatcactagggtctcatgtcctatgcatgttctcttttgtgagaccttgccacatgtctgcctgagtcacttagtgatcctccatgactcacctttctatattattttgggatgggcgtacttgatctgaatcaaaatgagactcttagagtatataggggcatagagcacacaactagcttagctaggccatgccttcaaaaactgtgcatgaaactctagaagacagacatcttcaaaacttcctcctctctactcgtatttccctactgtcttctaactcgtcaaacaacaaagagtcacaccagattgcccaggcaccgacctcttgaaaagaaccagggttcttataaatcattcgcatcagtcctcacagtgtcttctggagatgcacacaacatatctcccccatccttctctctcacccatgccttcataaacagcaaagttggctagctggttatttgtatcaagatgaagtttgaagccaacacatccatttctcgctagtaagatcaagaaaaatccattgaagcctacttcctacctaaatcttcatggatccttggagtgaaagtgagggcaagagagcccatgatcctatcttcaaatgtttcagccaaaaccaaggtcaccatcacttcatggaaaggagcacagatgctgctgttgctctctctgagagatgtagatgcatctgggtttcaggtccaattatcgtgggtgcaggaccatcagggctcgctgctgctgcatgtctcaaggagaagggaatcagtagccttattcttgagcgctccagatgcctagcttccctctggcagctcaagacatatgatcgtctcagccttcatcttcctcggcaattctgtgagcttcctctcatgcctttccctgccgactatccgatatatccctcaaagcagcagtttgtagcctacctggagagctatgctgcaagttttggcatatgtcccacatacaatcgcacagtggtgtgcgcagagtatgatgaacagcttctgttatggcgtgtgaggacgcagacttctgacacaacgggagaggaggtggagtatgtatcccggtggcttattgtggcaactggtgagaatgctgaggccgtgcagccggatatcggtggtctacaagagttcccgggaacaatcatgcacaccagtgcatataaaagtggcagtgcattcactgggaagcgtgttctcgttgtcgggtgtggaaactccgggatggaggtgtgcctagacctctgcaaccacagtgccgagccccatattgttgtaagagatgctgtacacatcttgcccagggagatgcttggccactccacctttggtctgtcaatgtggctcctcaagtggctcccggtccacgttgtggaccgtgttcttctgtgcatagcgcgggccatgctcggggatactgctcggcttgggctaaagcggccggcctctggtcctcttcagctcaagtcactgtctggaaagaccccagttcttgacgtcggcacatttgcaaagatcaagtctggagatatcaaggtacgacctgccgtaagacaggtatcaggaagagcggtagaatttgcggacggtgagttggaggagttcgacgccattgtgcttgcgactggctacaagagcaatgtccccttctggttgaaggaccgagtgttattttctgaaaaagatggattgccaagaaaagcatttccgaacgggtggaagggtgagaagggcctgtactcggttgggttcacccggcgtggactgatgggcacctcggtcgatgccaggagggttgcccacgacgtcgagcagcaatggcggaaggccaaagggacgcatcgggacggcgttcctctacctctggtcgctgttgtttaccatggtgatgggttgtgattgtgagttgccaaagggtgtatgtacgtacgcatgcattctgctgcttgcttgtgtagtgctttgtatagggtattgtactgtcaatttctttttctttttttcttttggcgtgcgttcgttttgatgactaaccatcctacgtactataggggagggggtgaatactgaggtggccgtgttcttccaaagtcggggctcagttgacttggcctctagctactgataatgaaagaagcttgcctggttttgttctgtgtacggtttcgtggcgcttgcgaagcaaatttaatttaatagtgatctggggttcttgttgctagctgtggtcactg

SEQ ID NO: 1202 - DNA, 1564 bp, Zea mays
cgtgcccacgccgcgaccacctcacatcccccacctacgacgcaacttcccacgcccatcacaaccgccaccgctttaaaacctcctcctcacactcccctcactcacacagcgccacgccaagcaaccagtaaccacagccagccaccaccgcgagaacaagtcgcagccaagagaagtcgtcctcgcgcgcgtctcgatctcccagcgaagctagagcttgccgtgtgccgtgacttccatggagctactccacgccgtcatccatggagctgcgacgacgacgacgaccaccaccaccaccaccacgagcagcagcgccaccgtcaccagcggcgacgagggcgcccacctgccccaggggtgggccaagaagaagcgctcgcggcgccagcgctcagaggaggagaacctcgcgctgtgcctgctcatgctctcccgcggcgaccgccaccgcgtccaggcgccgccgccgccggtcccgtccgcggagttcaggtgctccgtctgcgggaagtccttcggctcctaccaggcgctggggggccacaagaccagccaccgggtcaagctgccgacccctcctgccgctcatgtccagctcccggcaccaccggcagtggccctcttggtggaggcccccgcaccaccaccagtcactgccaccccgcccccgctgccgctagtcgcggtcgccgtcgccgtccgtgagccggccacgtcgtccacctccgacggggcggccgcgggcagagtgcacaggtgcaccatctgccacaaggagttcccgaccggccaggcgctcggcggccacaagaggaagcactatgacggaggcgccgcggcggccgagacgtccgaggtggggagctccgggaacgaaggctccgccgcccgcgcgttcgacctcaacctcccggccgtgccggagttcgccttccggtgcggcgccaagcccggcaagatgtgggacgaggaccaggaggtgcagagccccctcgccttcaagaagccccgcctcctcatgaccgcgtgagcctgagcctgagccgaggcgcggatctgatgttgatccgcacgagacttttttggatgttcggtggaacactattcgttcgttcattcgtgtggcgcccgccagtgctattgtttgatttgttgatgctcttcttgtacagtacagagagagctggtgtgagagatgcgtagtcaccacactcacgcatagtataccatacaatacatatagccatataggtcttcctgttcctgggatctgtatccttagctgtcagtatagtgtagtccatacatacttcgttctcattgcaagagatgattgatggattagttagtgctctgtaacataagcttatttataaatggattaagattactgtggaatcagataccatcttctcgcagcactctgtgttcatgtatcggttgctcaaaccatccgtttgcttgcttgctttcatgtgaagaaaaggagcagtctgcatcgcctctctctctgaagcagctagcgtcctcttgctttttctatccacgagcttccatc

SEQ ID NO: 1203 - DNA, 1565 bp, Zea mays
ggaacgggcacggactttgtggccacgaagcggcccattctcccagagtcaagtccaatttcaacgcaaaactcagacaagttttctttcttctctcccaagtcccaatccacaaaaactgtctacgggcccacgtgccatgacacagacccgccgcttccgaccttcttatctcgcaagaaatgggcggacctaacgcgcaagcgcaataaaacccctgcaaaaacccgccactctcagatccgcacagcgacgccgccagccagacccgatcccctccctcgctagggttttcgtccccgcgccgccgcgctcccggatcccaccgaaacaaccatggccggcggtcccgcggcggtgtcgttcctgaccaacatcgcgaaggtggctgcggggctcggagccgcggcctcgctcgcctccgcgtcgctctacaccgtcgacggcggcgagcgcgccgtcatcttcgaccgtttccgcggggtgctcccggagaccgtcggcgagggcacccatttcctcgtgccctggctgcagaagcccttcatcttcgacatccgcacgcgcccgcacaacttctcctccaactcggggaccaaggacctgcagatggtcaacctcacgctccgtctcctctcccgccccgacgtccagcacctccccaccatcttcacctccctcggactcgagtacgacgacaaagtgctcccctccatcggcaacgaggtgctcaaggccgtcgtcgcccagttcaatgccgaccagctcctcaccgaccgcccccacgtctccgccctcgtccgcgacgctctcatccgccgcgcccgcgagttcaacatcatcctcgacgacgtcgccatcacccacctctcctatggtatcgagttctcgctggccgttgagaagaagcaggtcgcgcagcaggaggccgagcgctccaagttcctcgtcgccaaggcggagcaggagaggcgggcggccatcgtgcgcgctgagggagagagcgagtccgcgcgcctcatctctgaggccacggcgatggctgggacagggctgatcgagctcaggaggatcgaggcggccaaggagattgccgcagagctggctcgctcaccgaatgtggcatacattccttctggggaaaacggaaagatgctgcttggtctcaatgctactggatttggccggtgattcactgtttttttagtctgcttgtgctatgtgctgatgcatgactaaaacggaggttcgaactttgaaggacagtgatatctgctatccttgcttatgttaagttttccttgtcttggaactaaatgtgtctgttgtgctccaaataagttttggtttttgactgcatatttgcaattggtagggttaatgcgacattgtgttaagcctgcatagtgcattctaattttcccttacattgcattctcatgttaaaattcattgatatctaacattgctggaatagtagatctgtttcggtccccttcatatattatttttgcatgatgatttgtgttgttaataatcttctggatattgtttatttatgttgt

SEQ ID NO: 1204 - DNA, 1952 bp, Zea mays
ggcacggccaaaaatcacggcacttcctcccataaaaaacttggctggccgctgcccctgacgcatcggcatctgtctcggcacggccgtccgatcaaatcgggctagcacagcacagccagcacgcgccgcgctcagcgctgtacttgcacaaaatatcgccttgctcacgcgctgtctagcctgtctggactctggattagtatatccttgagcgcagacaaatcacccccttcctcctgttcatttcctcctgctcccctctcctcccttccccccctcctcgccgctcgccgttgaagaggtaggcccacgggccggcgagaatggaggcggcgacgatggtgtggacggcggcggtggtcggggcggggctggtgtactggttcgtctgggtgatgggcgcggcggaggtgaagggcaagcgggcggtggatctcaagatgggatccatcacgcgggacaaggtgcaggacaagtacacgcagtactggtccttcttccgccgccccaaggagacggccaccacggcggcgtcggcggagaaggtgccggccttcgtcgacaccttctacaacctcgtgaccgacatctacgagtgggggtggggccagtccttccacttctccccgtccctccccggccgctcccaccgcgacgccacgcgcgtccacgaggagcgcgtcgccgacctcctcggcgccaggccgggccaccgcctcctggacgtcggctgcggcgtcggcgggcccatgcgcgccatcgccgcgcactcgggatccaacgtcgtcggcatcaccatcaacgagtaccaggtgaaccgcgcccgcgcgcacaaccgcaaggccggcctcgactccccgcgctgcgaggtcgtctgcggcaacttcctctccatgccgttcccggacgcctccttcgacggcgcctactccatcgaggccacctgccacgcgcccaggctgcaggacgtgtacggcgaggtctaccgcgtgctcaagccggggggactctacgtctcctacgagtgggtcaccaccccgctgtaccgcgccgaggacccggaccacgtcgagtgcatccacggcatcgagcgcggcgacgcgctcccggggctccgccgccaggacgagatcgcgtccatcgccaaggaggtcggcttcgaggtgctcaaggagcaggaccttgcgctgccccccgcgctgccctggtggacgcgcctcaagatgggccgcatcgcctactggcgcaactccctcgtcgtccgcgtgctcaccatgctccgggtcgcgcccaagggcgtctccgaggtgcacgagatgctctacgagaccgcgcagcacctcacccgcggcggcgagaccggcatcttcacgcccatgcacatggtgctcctccgcaagcccgccgccgccgcctccaccgaggaggccaactagtgtaagactacacaccgccaccaatcagttactactcgcccaccgcaagggggagaaaatggggagggaggaaaaagatgcaagcagcagcagcaccagaggtaagaagagcaggctaatcggcgacttgaagaagttacaaattgatctattagagaagaagatactactaggaacgatgcttctctccgtttactcttttccctgttcgtagctttgagttttaatttttgttttttggtggacggattgttccggggaggtcgaggttgggatctaaatttattttcaatcggtggagatccatctatcagcagcagcagcagcagccatgttttctctccaacaatacactggaattgaattcctaacgggcagatcggatccttgaaattgaatttaattctaataatatgaatttagataaagatcttttaaactaacatagttttatctaaaatatatttatgtactattgttatcggagatatttatgtgatacatttttatttt

SEQ ID NO: 1205 - DNA, 2331 bp, Zea mays
ccggtgaccccagtctctcttctatctatatattacccgcctccttttctcctctctctccgccccaccctccttcctcagctccgttgcgcaccgccaccgccggccggccagccgccggagcaccgaaagacccccgttctttcctgtaaaaaaaaacccgccgcctttagctagctaaccggtcgtcctcttcaccccctagctttgctagctctagctaggaacgaaagaaattaaaggataactgagattgctgattggtggtccgggtacggtgttcttgagtcgtgaagcgacagtacagtggctagggtcgtgccgcccctgcagtctccggggttgcgtgcaggatggtcgtcagggatcgggagtgaggaggcatcagctctcgcggtcgtggagcctaaatgtaccgcaacaacgactcggcactctcctgcttctacctcttcctcctctggttcttcttcttgaagtagacaccaccagttcgccaggtagttagcagcccagttgcgactggggatcggtggcgggctgccgcttgcgagttgtaagcttggaggggaggggagcaggagcaggagatgcagttggatctgaacgtggccgaggcgccgccgccggtggagatggaggcgagcgactcggggtcgtcggtgctgaacgcgtcggaagcggcgtcggcgggcggcgcgcccgcgccggcggaggagggatctagctcaacgccggccgtgctggagttcagcatcctcatccggagcgatagcgacgcggccggcgcggacgaggacgaggacgccacgccatcgcctcctcctcgccaccgccaccagcaccagcagcagctcgtgacccgcgagctgttcccggccggcgccggtccgccggccccgacgccgcggcattgggccgagctcggcttcttccgcgccgacctgcagcagcaacaggcgccgggccccaggatcgtgccgcacccacacgccgcgccgccgccggccaagaagagccgccgcggcccgcgctcccgcagctcgcagtaccgcggcgtcaccttctaccgccgcacaggccgctgggagtcccacatctgggattgcggcaagcaggtgtacctaggtggattcgacaccgctcacgccgctgcaagggcgtacgaccgggcggcgatcaagttccgcggcgtcgacgccgacatcaacttcaacctcagcgactacgaggacgacatgaagcagatggggagcctgtccaaggaggagttcgtgcacgtcctgcgccgtcagagcaccggcttctcgagaggcagctccaggtacagaggcgtcaccctgcacaagtgcggccgctgggaggcgcgcatggggcagttcctcggcaagaagtacatataccttgggctattcgacagcgaagtagaggctgcaagagcctacgacaaggccgccatcaaatgcaatggcagagaggccgtgacgaacttcgagccgagcacgtatcacggggagctgccgactgaagttgctgatgtcgatctgaacctgagcatatctcagccgagcccccaaagagacaagaacagctgcctaggtctgcagctccaccacggaccattcgagggctccgaactgaagaaaaccaagatcgacgatgctccctctgagctaccgggccgccctcgtcagctgtctcctctcgtggctgagcatccgccggcctggcctgcgcagccgcctcaccccttcttcgtcttcacaaaccatgagatgagtgcatcaggagatctccacaggaggcctgcaggggctgttcccagctgggcatggcaggtggcagcagcagctcctcctcctgccgccctgccgtcgtccgctgcagcatcatcaggattctccaacaccgccacgacagctgccaccaccgccccatcggcctcctccctccggtactgcccgccgccgccgccgccgtcgagccatcaccatccccgctgagagaatcaagaagccgcactgtaaatctgccgggaagctagcattttccccccggcccctccccctctccgggcgttgcgactttttcagttttgcgccgccggccggggtggtggtttcttgtagccgatcgattggattcctcgtattactgctgcttacactcccaattaagtgaaaaaaaaacgctcctctactctttacactacacacactgttagctgatcgattggacgtacttgctagctgctgttgctgctgctagcttgagattgactaacttcagcacttggattgatctatatctatatgactatatagacgacac

SEQ ID NO: 1206 - DNA, 4929 bp, Zea mays
atgcctcccggcggtaggcgcggcgccaagcagcggcccaactggaccagggaaccccagctaggtgacctcgtcctcgccaagatcaaggggtacccgcgttggccagctaagatcagcaggcccgaggaatttaatcatgagccaacgccaaaaaagttctttgtctacttctatggcaccgatgagattgcttttgtaccgctggcagatcttgaggaatttactgagaagacaaagaatgatctgttagaccgagctccaaatatgaaagttaaaagaaaatatgttcaagtatttaatgatgctgtggagcagatctgcaaggcctacaatgagttgccaaaaacatctgaagctgcaaatggagcattgcctgatcagagtgaaaagccttcagagcaccttgtgaggtcacaggatgttggtgagattccaggattgggacaaatggaaggtgatagccctactgattactcgcatacttcagcgaaaaggccagggaccgaggaggatgtcaaagatgatggtcatgaaatatgtgatcattctttagcagtttatcaaaagaaaacatctttactagaggatcctaagcatcccatgacaaagaagtctgctgcatccaagtcttctcttgacatttacatggaacaggagcattcaccaacatctgtccgtgctgaaagggaggctgaagaggtgaaaattgaaaaagagagctgtcccctagatggttttattttggaacctaacttggaggtagtttgtgcccttgaagtgccaaagaaatctaaatccaacaagccgttgaggaatgctgaaaggaaggaaaacaaacgtgctggtattggtagccctattgaaaggattgttgctgaggctgcatctgatgttgtattaaacatgagtgctgacaaagagagcagagaatttaagaagtcaaaaatcatgacaaaacaatcactaactactgattcagagaaaatggattataataaaattgtgcatggcgggcctgacgagcaattgactggaaaatcatctgcagggttttcttccaataagaaatcgctgccagatagtgggcagcacaagatggacagtagtgctgatacacgtccgggaaaaaagccaaggcttatggacagggctggtgaaacagataagacagttgacaagagtgagatgaagtcaaacattgattatggaaagcattatgctgtgaaacatgagcggcctacctctatggaaacgtgtaaaaacacgattcttaagaccagtaccagcgatgatagggcactgagatcaggtggtgttgtatcacccatatcaaggcttcattctgaggtcatggaaccagcatgtggttctgtgacactgtcaactgttgctgattctgttaaaaagggttccagcatgaaggaggatgcctcacgtgttgataggcaattggtgaaacctaagagaagagcatgtcgttttgatgaagatgaggatgaaggacagcgaacaccacttcatagaacttctgctaaatctctctctacacatatagtcccaactgagaaagcaggtattcggggaaaattttcttctcatgttggcaatgtttttggaaaaaagttaggccctgcaagagaagagaaatcaaggagtgttaggatgtcacctgtgaagcatgagccaattttttcttcaccgagtcaggataaagtgcatgctagacaccaggtagtcgagaaaagactgatcacagggttggttgagactcctgctgtcattggtaacaaaatgagcctggttgatggcaaatcctctgctcaagtaaaaatgccggcatcctctgaggtgaagaaacttcgtagtagttcttctaaaccatcacacctaacatctgggaactcccattcccgaaactatcctgccccagaaaagatccccttgctgccccaaccagaagaaacaaaggctaaatctaagctagctacgtctgttgagcataaggtgggcaccactttgtcaactgaacagagtgggaagcgggatcacttgaaagaggaaagatccagttatgttgataaagcagtttcttctgaacctaaccctggctcggccaagtcaataaaacatcttattgcagctgcccaagcaaggaggaaccttatggcttctgttcatgcaaaatttgatgggtcttcgactgataatgctgatattacgtccacaccatatggtttgccgggactaagccctagtcctgttttccgcattccatccccacccagaattgcttttcccgggagtcctggtcaacgtattctgaaaagcccaatagagtttgacaatggtcatggaaagagtcccaaatctaggcaggccagcggttcacctagtggtggtactgatgcagctattgctcgtgatgctttggagggaatgatagagactttatcgaggacaaaggatagtataggacgtgcaacacgccatgcaattgagtgctctaaatatggcattgctggagagattgtcgagcttctcatacagaaattgcagagcgagcctaattttcatcgcagaattgacctcctttttcttgtagattccataacacagtgttctcattctcagagaggagttgccagggcttcatatgttcccactgttcaagcggcattgcctcgtcttctcggtgctgctgctccacctggagctggtgctcgtgaaaaccggcgccagtgccttaaagttttaagattgtggcttgagagaaagattatgccagaagacatactccggaagtacatgggcgacattgaggtgccaaatgatgatactagcactactttaatgttgaagcgaccatcccgtgctgaacgttctgtagacgatcctattagggagatggatgacatgcttgttgatgaatatggaagcaatgcaacttttgagctttctggaattttatcatcaaaagtgtttgaagatgatgaagacttccctaaaaataatgggtcatcaccatttgtttcacaggcacggcctgttgaaaatgatgtcatacgaaaaactgaagatactattgctccagtatatgttgaggaacacattattatagtagagaatgtaactactgatgctgctatggaagatgctttagagttaccaggcaacaaacaacagactgatggagctgtccttattgaacacgactctattcaagatccaggttcagagcaggcaattgaccagaatgactttccctctctacccgatggccctccaccgcttccgtcagattcaccaccacctccacctcctttgcctccttcaccaccacctgttacaccgccgcctccgccaccacctccactttctccagcttcaccacctccgccaccacctcccccactgccatctggaccacctcctcagcctgctccaccacctctggcaacccaggtcacacctcttccttctattcctccgcctgttccttcatctccaccatcattgagttatcagcctccagctcctgagtactttgtgacggccaatggtgatcaattaacccagatgacaggaaatatattgattcaagctattggaaatgcaacaaccttcattcctagtggaccagttaatggacaagctgcggttaattttgttacttcgatgcaggcagaatatggaaacaataacatatttatggcaccacaagcttctaatggtaattaccagtttcggcccactggtgtaccttttcagcaagggaatttcagtgcctttccatctgcacaaacacatccagttcaacctcactctcacatggcacacatgaatcccatgggccaacaagctgtaccacccacgctcaatccttatgctgtgcagtcatttccaaacagtcagagccattatccatccgaggaacattggcggatggcatctggtaacttcagcccagatggccagcataattggctagccggtggcggagcattaccttgctcagaagggccatatgtgcaggatggatattcaaggtcaaacattgacagatcttcaattaatcctatgaaccatcaacatactgttctgaatcatttgccgtatggagcaccactaccaggccatgttccgcagatgctaccagccaggtctgatgtccacactcttaattgctggaggccctcttgatagagttgtaaactgaacttctttatggttttaacgtggaaagctcagaacactggaggcaatttgaattgagtgcaacaattcatggctttgttagtctgtgagatgcacttgcctcattgcctgggtgtaacgatgagatctgccatagtatatggaatggacattttacaatgtaactagtcttggcaacagcatccagcagactaatctctcttagtgtctgaagaacgatagccgaacgatgacagggtttgatttgttgatgcgtcgttttggttctcacccgagccagtttttgaagtgaaagcaataataatgttgttggtgcaccgctgaggtgtttaggttttactgctggtttggtgttgggtgatggttcctatcatctcactaaacaagattgttgactgtacatctgggagggaggtgatctgggatattgaggtgggtatcatcatgtgacggcgaggcacttggtgccaaatcgtactgaattttgttatctgggtctcagtctgctgcttttgtcccgcccgtattcgtttattcccgcaggggcaggggcaggaccctgttggctggccaggccacatatcctttttagtcccaagcaagttggagagccacacagtatatattatataaataatagtgagacatatttttttatgagattacttaaaagcaaatcatctctcgtcgtcgtgatacatggtttgtttt

SEQ ID NO: 1207 - DNA, 2866 bp, Zea mays
attgtctttgtgaataatctaaactatcaaacaactatatatggattataatatatttagattataatctagattatataatctataagctgaaacaaacggacctaaggctatacagctgagagatcgatggggggaggcggggacgcgcagcctttttgccctgccttcgcgagtcgcgccaaccccccccctccccccccccccccccaaaaaaaaacccccagaaccctagcagaggtctcgagcacgagcccgcgatggcgtcggacagcgaggcggcagcgcattctacctttaacgagcacgacagtggaggacggtggtgcgcacgagagcaagcaggaacacctcaatggcgcggtggggcacccccacggttgggcaggaggaagagataatcgggccgggcccagcgccggcgaagcagcggcggaagcgccctctccagttcgagcaggcgttcctcgacgccctcccctccgccgccatgtacgagaagagctatatgcatcgggatgtcgtcacgcacgtcgctgtatctcctgctgacttcttcatcactgggagcgcagatgggcatctgaagttttggaagaagaaacctgttggggttgaatttgctaaacattttcggtctcatctcagtcccatcgaaggtctagctgtgagtgttgatggattgctttgctgcacgatatcaaacgatcggtctgtgaagatatatgatgttgtaaactatgacatgatgttcatgatacgtctctcatttgttcctggggctattgagtgggttcatcgagaaggagatgttaaaccaaaacttgccgttagtgaccgaaatacacctttcgttcacatatttgatacccattctggttcaaatgacccaatcatgtccaaagagattcatggtggccctgtcaaagttatgaaatataaccacattcatgatgttgttatatctgctgatgccaaaggactgttggaatattggtctccatctaccctcatgtttccagaaaatgaggtgaggtttcgcctgaaatcagatacaaatctatttgaaattgcgaaatgcaagactactgtgtctgctattgaggtaagcaatgatggcactcaatttgctgtcacatcccctgatcgcaggatacgtgtattttggttcaaaactggaaaattaagacgtgtatatgacgagtccctagatgtggcgcaagatcttcaaagaagtgatgttccattgtatcaccttgatgctattgattttggacgacgaatggctgtggagaaggaaatagagaaaacagaaaatgttccacaacctaatgctgtctttgatgagagttgcaattttcttatttatgctacccttttgggtgtaaagattgtgaatttgcacacaaataaggtttcccgtatcctggggaaggtagagaacaatgagaggtttctgagaattgcactataccaaggagacaaaggcaacaagaaggttagaaaaattccttcagtagctgccaatgtcaatgatagcaaggaaccattatcagacccaacgctgctgtgttgtgctttcaagaagcatcggatatatctctttagtcgtagggaaccagaagagcctgaagatgcaactaagggtagagatgttttcaatgaaaaaccaccgccagaagagcttttgtctgcatcagacctaggaaaaactgctacaacatcattgcctgataatttggtgctacatacttctatgggtgacattcacttgagactatatccagaagagtgtccaaaaactgttgaaaacttcactacccattgtcggaatggttattatgacaatcttatatttcatcgtgtgattaaaggattcatgattcagactggagatcctttgggggatggtactggtggacaatcaatctggggcacagaatttgaagatgaatttcacaagagcttgaggcatgataggccttttacactttccatggccaatgcgggacctaacaccaatggttctcaattcttcttcaccactgtagcaactccatggctagataacaaacacacagtgtttggtagagttgtgaaagggatggatgttgtccagcaaattgagaaggtcaagactgacaagaatgacaaaccatatcaagatgtaaaaatcttgaatgttacagttcccaagacataagcgcgtgatcagttgggttcggaaattgtgcctgcactccttggttggacatattgctaaacctgtagaagctggagtcttacgagatcagctgtaatgctatgggtgaattgagcacaccttgggctgctcttgacgtcggggtattggaaccttgcaattttcaggatcgatggtaccacaggaattttaggtttacttgctttgattgcagaattatagggcagaaggttgtagttttgtaacgttgagttaattttaagtttagctgctttgattctagaatcctggggccaccgggcctgcggcgtagacactcactggttttgggcgctgacctggccttcccccaatttctgcgtcagcaaatgtacggcctgggaagaatctttgatgggtcgtcgctgtctgcagggtgcagctggcagaatggcctttgattacactacactaaggtcttgttcagttattttaatttcatgtgaattgaagtgtattaaaatggattgggataaattttgacttgttatgtatttaaaacaacataatatcacttaatccacatggattaatgatgaaaccaacaatccataatgtgagccgtgtgtaccgtgtatcacgatgcaaaccttgactatggagaaggaatgcatcgctcggtgg

SEQ ID NO: 1208 - DNA, 1215 bp, Zea mays
ttcgtctcccccctcgcccagcgcccacctcttccgtcctcctgtttcccgtcccgcacagcgctacgcacacagactatatttctctctctctctcgtcctctatcgctcgtccgatctgcatctgcttttcttcccccccctccgcgtgtcccctgtcccttccggcgtgcgcgaagatttgattttttttttgtcggggagaaggcggagtaagacagaccaggccgcgggaggaaggagatcctgatctgttcttggagtggggaggcgaggagaggagaggaggaagatggcggcgcaggagcaggagcacgagaagcagcaggcgaagacgagcaccacgagctcgctcccctccagcagcgagcgctcctccagctccgcccccaacaaccttagggaaggaggcgtggagagcgacgaggagatacggcgggtgccggagctgggcggcgcgtcggcgtcggcgtcggcctcgtcgggcgcgggcaaggaggacggcgcgcgggcggtggccgcgggggcgcaggggcaccctccggcggccgggaagaagcgcggccgcgccccgggggacaaggagcagaaccggctgaagcggctgctgcggaaccgcgtgtcggcgcagcaggcgcgggagcggaagaaggcgtacctgacggagctggaggcgcgggccaaggacctggagctccgcaatgcggagctcgagcagcgggtgtccacgctccagaacgagaacaacacgctccgccagattctgaagaacacgacggcgcacgcgagcaagaggagcggcggcggcggcaagggtggagacggcggcaagaagcaccacttcgccaagagctaatgagaattgagggactgagggagggagctggttcgtgctctgctcgcgctcgcctcacctgaccattgttggtggtggttgatgttgctgttgctgatgacgtattctctttttttttctccttttttcccctaatttctactgtacctgtgttcctcttgtctcgctgattcactgttttttaacgtagcaaatcccgtctccccggccgctgctgtgctgggactgactactcaccactgctgtagggatgtggttgtttttgggggcgttttgtactggtcttgaaaggagaagcctttatggaatagatagatctttcggcagggtttgaagcgatttttctccatcatttacaa

SEQ ID NO: 1209 - DNA, 3346 bp, Zea mays
cgtccacaccacacgcacgacgggactcttccttcgctggacgactccctgtgcccgtctcgtcgtctcctctcctcacctcccctccacccccacttgctattttgaccctcctcccgttcctttctttaatccatcatccgcctcgctatccctccctccctccctccctgcccgccgtggagggtttgggattttgcggacctcagcagctccatatctcagtcacacactcacgcgcgcgcgggggccgggggccgctggacccgccgttctccttctcctccccccctcgttcctctcgtctcaccactactaccctacacgcgccgcggctaggattccgccgaggagacgctgcgcgcgtggatctccggtgctgtcctgctagcgtgcgacgaggccaggcaggcgcgcggccggcgccatgagcttcgggagcctattcgacggcgggtccggcggcggcggaggaggaggagggatgcagttcccgttctcgaccgggttctcgtcctcgccggccctctccctcggtctggagaaccccggcggcggcatggtcggccggatgctccccgtgggcggcgcccccgcggccggcgggatggcgagggacgccgccgacgccgagaacgacagccgctccgggagcgaccacctggacgccatgtccgccggcgccggcgccgaggacgaggacgacgctgagccgggcaacccgcgcaagcgcaagaagcgctaccaccgccacacgccgcagcagatccaggagctcgaagcgctgttcaaggagtgccctcacccggacgagaagcagcgcggcgagctcagcaagaggctcggcctcgacccgcgccaggtcaagttctggttccagaaccgccgcacgcagatgaagacgcaactggagcggcacgagaacgcgcttctcaagcaagagaacgacaagctgcgggccgagaacatggcgatccgggaggcgatgcgcagcccgatgtgcggcagctgcgggagccccgccatgctcggggaggtgtccctggaggagcagcacctgtgcatcgagaatgcgcggctcaaggacgagctcaaccgcgtctacgccctcgccaccaagttcctcggcaagcccatgcccgtcctctcggggcccatgctgcagccgaacctgtcgctgcccatgccgagctcgtcgctggagctggcagtaggcggcctccgtggcctagggtctatcccttccttggacgagtttgctggcggtgtgtctagcccgttgggcacggtgatcacgcctgcacgggcgaccggatctgctccgccgcctatggtgggcgtcgacaggtccatgctgctggagcttgcgatcagcgccatggatgaactagttaagctggcacaggttgacgagcccttgtggcttcccagcctcagtggctctcccgacaagaagctgctcaactttgaggagtatgcccactcgttctctccgtccgtcggcgccgtgaagcctgtgggctatgtatccgaggcctctagggagtctggcctcgtcatcattgacaacagccttgctcttgtagagacccttatggacgtgagacggtggtctgatatgttctcgtgcatgattgctaaggccacagtcctagaggaggtgacatctggcattgcaggaagtaggaatggtgcgctgctgctgatgaaggctgagctacaggtgctctcacctctagtgcccatcagggaggtcacatttctcaggttttgcaagcagctggctgagggtgcatgggcagtagtggatgtgtccattgacggattggtgagagatcacaactctggaacagcatccaacgccggaaatatacggtgcaggaggttgccttctggctgtgtgatgcaggacactcccaatggctactgcaaggtcacatgggtagagtatacggaatacgacgaggcgtcagtacaccagctctatagaccactcatccggtccgggctggcctttggggccaggcggtggcttgcaatgctgcagcgccagtgcgaatgcctggccatactcatgtcccctgatacagtttcagctaatgactcgtcagtcataacacaggagggcaagcgaagcatgctgaagctggcacggcggatgacggagaacttctgcgccggggtcagcgcgtcatctgcacgtgaatggagtaagctggacggcgctgcaggcagcatcggggaggatgtgcgggtcatggcacggaaaagcgtggacgagcctggggagccgccgggcgtggtcctaagcgcagccacatcggtgtgggtgcccgtggctccggagaagctcttcaacttcctccgtgacgagcagctgcgtgcggagtgggacatcctcagcaacggaggcccgatgcaggagatggccaacatcgccaaggggcaggagcacgggaactcggtgtccctcctcagagccagtgccatgagtgccaaccagagcagcatgctgatcctccaggagacttgcactgatgcatcaggctcgatggtcgtgtatgctccagtggacatcccggcgatgcagctcgtcatgaacggcggggactccacctacgttgctctgctgccgtctgggttcgccatcctgcctgatggcccaagcagtgtcggcgccgagcacaagacaggcggctcgctgctcaccgtcgccttccagatcctcgtcaacagccagccgaccgccaaactcaccgtggagtcagtagagaccgtgaacaacctcatattctgcaccatcaagaagatcaagacagcgctgcagtgtgacgcttgactgtcgcgtgtcgccgcagggggggtggtcggtgatgacgagcctgagtcaagaacgaacctcgtgcgggaaagaaacctttgctaggtgataaggatccagcttggacgggtctttagcacggagcaatggtggtggttcgggtattgactcggtctctgtcatctgcttcttctccatggaccatggcaacctgttgtctgatacgggatcttgaatagtgcgtggacaatgatgtggttagatggttaaaatcttttgtttcagtcccatcgtttcatcagggaatcaaactttgagttttggccgcctcgttgttagttgtaatatacagttcattttatattgtgaggtaagctatatgccatgtgtaaacatgagagctcaggaatgttgggtagcatcatgagtgtagctaggcatcgaactatcggccaataaaatgtctgatcgataaagtggtatagttgtttacctggaaatgcttatttagctacgtgatgggcc

SEQ ID NO: 1210 - DNA, 3366 bp, Zea mays
gctcctcctcgattcccgcctgccgcgcacgcgccgccgtcgcactgacatcaaggacccacgtgccggctcgcagcgcagacggcagaattcttgtgcattctatggccgactgacatctgggccagcgcgtcggtttcttgggctccggcgccgcgggagtgccgcccaccaaccccacccgcgctccacgacgccaaatccgcgcgggaaacgcctccgcgcccgcgcgccaaacccaatccaaacccaaacattttcttctccagcgagcacccaaaaaaaataaatagatcctccagctccagctccgcttcattactcctcgcctcttccgcgcccaaacactaccgcctccctcccacccctagtccccctacccccccatccaatcctctgctcgccttgtctcgacccggcagcggcggcggcttgggcgcgcacacacaccaggtgttcgattggagtcctcgccgaagcggaagatgtacgtggtcaagagggacggccgccaggagacggtgcacttcgacaagatcacggcgcgcctcaagaagctcagctacggcctcagccaggaccactgcgacccggtgctcgtcgcgcagaaggtctgtgcgggggtctacaagggcgtcaccaccagccagctcgacgagctcgccgccgagaccgccgcggccatgaccgcgtcccaccccgactacgcctcgctggcggcgaggattgctgtgtcgaacctgcacaagaacacaaagaagtccttctcggagacgattaaggacatgtacatgcacttcaacaagagatccgggctgatggcccctcttgtcgctgaagatgtttatgaaatcatcatgaagaatgctgctcgcttggacagtgagataatttatgatagggatttcgactacgactactttggcttcaaaactctggagaggtcttacctgttgaagcttgatggtaaggtcgttgaaaggccgcagcacatgttaatgagggtttcactggggatacacaaggaagacatcgagtctgccatcaggacgtaccatctgatgtcccagcgctggtttactcatgcttcaccgacgcttttcaatgctggcacgccgaggccccaattaagcagctgttttcttatatgcatgaaagatgacagcattgagggaatctatgaaaccctgaaagagtgtgctgtaataagcaaatctgctggaggaattggtgtctcagttcataatatccgtgctactgggagttatattcgaggaacaaatggatcatcaaatggaattgttcctatgttacgtgtctttaatgatactgctcgctatgttgatcagggtggtggcaaaagaaagggtgcatttgctgtatacttggagccttggcatgctgatatttttgagttccttgatctgagaaagaaccatgggaaggaggaaaatcgtgcaagggatcttttctatgcgctatgggttcctgatttattcatgcaaagagtccagaataatggagaatggtcattattttgccctaatgaagctccagggttggctgattcctggggtgaggagtttgataatttgtacaagaaatatgagagccaaggcaaggcaaagaaagttgttccggcacagaccctttggtttgacattttgaaggcacagatagagactggtacaccatatatgctttataaggatacttgcaataggaaaagtaaccagcagaatctgggcacaattaaatcgtcaaacctgtgcactgaaataattgagtttacaagccctactgagaccgctgtctgcaacctagcatctattgctttacctcgttttgttcgggaaaaggatgttccgttggagtcccatccatctaagcttgtgggtagcagtgattcaaaaaatagatattttgattttgagaagctagctgaggttacctcaactgttacttacaatcttaacaaaattatcgatattaattactatcctgttgagacagcaaagaggtcaaacatgcgtcacaggccaattggcataggtgttcaaggcctggcagatactttcatattactgggcatgccgtttgattcaccagaggctcaacagttgaataaggatatattcgaaactatctactatcatgctctgaaagcttctgctgaacttgctgctaaagaaggtccctatgaaacatatgaagggagccctgtcagcaagggcattctccaacctgacatgtgggatgtagtgccatctaacagatggaactggccatctctaagggagaccatttcaaaagttgggataagaaattctcttcttgttgctccaatgcccactgcttccactagtcagattcttggcaacaatgagtgttttgaaccctacacgtctaatatatacagtcgacgtgttctaagtggggaatttgttgtggtcaacaagcatcttcttcatgatctgactgaaatgggcatttggactcctactttgaaaaaccagataatatacgacgacggttctgtccagaagatagcagaaatcccggacgatcttaaagcaatctacaaaactgtttgggagatcaagcagaaaactttagttgacatggcggtcgaccgcggatgctacatcgaccaaagccagagcctcaatgtccacatggagcaagcaaactttgggaagctgacgtctcttcacttccatgcttggtccaagggcctgaaaactggaatgtactatctacgcacacgagctgctgctgatgcgatcaagttcacagtggataccacgcttctgaaggagaatgggaacggggttagcgatggaaagcccgcggaggaagacgtagacgctaaaatggcacagatggtctgttctttgaacaaccgggaagagtgcctggcgtgtggaagctagattggagattccatctggacactgcacttcgtgatctgtgaacacaacattacatacagccggctgatgattggagctcagtaaccagaacgaagtctgtgatgtaggtcgagttggaagttcccataatgggaatagcttgtacctgaatactgctacggcgctacctctggtctgtattgctctaaggtgtttgtgctgctgccaatgtactgtaaatatctaccagcgtcaatgttgtcgatgtgctctaagatacagtatgttttaaccgtgctacactctttgcattggatcgaacatgatgtaatgcatcgtcttccataatgatacgagtgctggaaaacagaacaatgtaaactaattagtctgtatcctcgatcgcgatatgcacttggtcctttcggcagtgtctgtctgcacagtatttcct

SEQ ID NO: 1211 - DNA, 2931 bp, Zea mays
gccgcgctgcgctgtccgtcgcttctccgttcgcgctactactgccactgcgggctgcggctagtaaaaaaaagcagcgccgcgcctccacctcgactccaggccaaggcagccagcctacccagacaaccaaacgaacccgcccggagcagcaaagcataggcgctcgagcgctccctcctgagctcctccgcctcacggtcacgcctcgtgtccccccaccccctcctcgtcctccaccggccgcctcacgccgtcacctccgctcggcgagtctcggctccgaccccagccgccacgtgcgacctcccctactcctgactcctgagagatctgcggggctcggcatggggtgaccagatcgggccgctgctcggtgctttccagctgaattctgcccgcagctcgtgtcggaggcagcggagatggcggaggccggcgtggcacgcggctcagggagtgctggcgatgctttgttcagggaactctggcatgcttgtgctgggccgttggtcacagtgcctcgccaaggcgagctggtttattacttcccgcagggtcatatggaacagcttgaagcgtctacagatcaacaacttgatcagcacttgcctttgtttaatctaccgcacaagatcctctgcaaggtggtcaatgtagaacttagagctgaaactgattctgatgaagtttatgctcaaattatgctgcaaccacaaacagagcaaagtgagcccaccagcccagatcctgaaccacctgagcctgaaagatgcaacattcattccttctgcaagaccttgactgcttcagatacaagtacccatggtggattctctgtcctcaggaggcatgctgaagaatgtttgccccaactggacatgactcagaatccaccgtggcaagaactagtggctaaagatctccatggaaatgaatggcatttccgtcacatctttcgagggcaaccaaggaggcatctacttacaacaggctggagtgtttttgttagctcaaaaagattggttgcgggtgacgcgtttatcttcttgagaggtgagaacggagagctgcgagtcggggtaaggaggctcatgagacaactaaataacatgccgtcttcggttatctcaagccacagcatgcatcttggagtcctagcaactgcatctcatgccatctccactggaactctcttttctgttttctacaaacccagaacaagtagatctgaatttgtcgttagtgtaaacaagtacctcgaagctaagaatcacaagatgtctgttggtatgaggtttaaaatgagatttgagggtgatgaatcccctgaaagaagattcagtgggacaattattggtatgggatgcatgccagctaactcaacatctccatgggctaactctgaatggagatcattgaaggtccaatgggacgagccttccgctattctgcgtccagatagagtttcaccatgggaagtagaaccccttgatcgaacaaatccacagccacctcaacctcctttacggaataagcgagcacggcctcctgcttcaccttcgattgctccagaacttgctccagtttttggtttttggaagtccccagctgagcctgcccaagctttctcattctcaggactgcagcgaactcaggagctataccattcaagccccagttcaatgttctcatcgtcgttgaatgtgggattcaatccaaagtacgagggtcccactccaaacaccaaccatttgtactggacaatgagagagacaagaactgaatcctactccgctagtatcaacaaagctccaactgaaaagaagcaagaatccactacttctggctgcagattgttcggtatcgagataggttcttctgcagtgtcacccgtggttactgttgctagcgtcgggcatgatcctccgccacctgctctctcagtagacgctgaatctgaccagctgtcacagccgtcccatgccaacaaagcaacggatgccccagcggcaagcagcgatcgctctcctaacgagacagagagccggcaagccaggagctgcaccaaggtaatcatgcaaggggtggcggttggccgggcggtggacttgacgaggctagatgggtacgatgacctccgccgcaagttggaggagatgttcgatatcccgggagagctttccgccagcctcaagaaatggaaggtgatctacacagatgacgaggacgatatgatgctggtcggggacgatccatggagtgaattttgcaggatggtaaaaaggatatacatttattcctacgaggaggccaagtctttgactcccaaggcgaagctgccggccatcggtggtgacaccggcgtcaagccggacccaagcaaactgccaccagaatccgacgtgccacagagcgactccgacaacagtgctcccgttgctgctgataaggactgatggacgctagctcggccgtaccttccctttggatgttggccatgggaggcaagtgcagtgcccatgctccttgagactgctaagagttgatcatctgttccatctgcctcggcttggaccagcgaggatggccgggagggagtgcatgacgttctgtgcgtgtttcgtttgccgtgtttggtaggagccatggcttgttgccggctacttcggttctgtagactgttacactgactgctgccgtctcacctggccgtcggcgcgggccgccccctctcacctctctagtaatatatactagggcttatgtacacagctgttttggtagtggcatatgtatatcgtcggtcatgttgcttgcgacatttagcatcctccgtagctgctatttcctctcctgcattttaatcctgtcttggtatcagatgctctggcgcaatatgtgttccagcgacatgcccttttcggcgcg

SEQ ID NO: 1212 - DNA, 3468 bp, Zea mays
cccaaaaaaaaagtcagtaaccaccccacagtactactgagtactgacccactccacactttcgtcttcccgtgcttttgtttctcggactagggacgctctctcccctcctgcaggcagtcaccattacgaaaaaagccaacacccggacggaaaggttggagcggggaggaaaactcgcgcaagatcccgccttttccgtcggggtctgacggccccgctcccccaccggaagccaggcggccgcaaagcagaggccgtaggcggcggttgctgaaacctatatcacgccaagcgcctgcgtagtcaagggctactcgagccttgcccctcccatggaacagcgggacgcgacgcagccagaggcggcggcggaggagcgcgaccaggagcggccctccattattcctcctcccaaggaaaacgaggataaagatctgaagctaccttctcgtgtggtttctttattatttggtggtgatatatcgacgtcagcacaaacatttgagaaatggctctcattagtacgtaagaggagtggggctttccggccatctgggttcccacatcgaggttcaaggattgaagtcatgccaagtgggagcttctcactatttggtagcggggacttaagtgaacacttgattagagaagcaccaacaagaaaagatccattggactgcgatcaatctcctgaaataagcttgtgggagagacttgggaactcttctgcactggacattgagtcatctgaattttcatgggacgtgttgttgtctctgcatcatacagaacatagtagtagttccgaacaaactgaagacgaaatgaataaagctcttgaggtgactgtgaactctggtggcgtagtgttctttgctctatttagttctccaggtaacattggagttccagaagcggcagctgttataaagttttcgtcatcaaagatggcaacacaggcagagcgtttgggttatgagtttgcaagattgctcggagtccatacaccacaagctagagtagtatataattctagctcagagtggctggcgattaggcatgctgcagaaaatgcacgtacagtagcagtttcaaataatgatgaggttggtgagatgacgtgctcagagttgttagaagctcttgagctaagccgctgccttcttctaatgagttatattcatggctccccactgcttgagagttcaaaggctttccattcacgagaagctgcttgtgttactgcttcatcactgggaagggttttgatgcttgatctgatactgcggaatgaggacagactcccatgccgtcagcttggttggcgtggtaatcctgcaaacctgatgatttcagataaatcatccttacccaatttggacaggttggatgatttcaagagctctacagatagttccaaccaactaattacacattttttgcatagagagaagcggtcacactctttgaatggaaaatttggttcaccagggttggatcccatgtcaccaaaactagaaccattgataaatgaaaaggaaaatgctgaaagaacaaatggcgattttcgcattgtagcaatcgatactggtgtgccccgccgcccccctgtggggcgacgtgtcaaagatcatgagaggtaccccaaagttgtggaactcattttgaatagttcggactactcagcaagcatcctatatgaaatttctggttgtaagcttggacatccacgacctgatgaggttacttccagtgattcttgttgctccctttctgatgaagataatgctggagtgattcatgaattccgaggatcattccgtgcagctcttagggacctggaggggttccatctatttcttctccagctttaccaaaaactggatggtgttttgcgagttttcttgtccataattactaaaacctctgaagaatctgacaataatgatgctgccctttccgattttccttcacctggagccagctatagtactcctcgccttcctagtaagcatctgaacaatgagcttcatagtgattctgaaatgctgaaatctgcaatgaagtcctcttctgtgggatcccgcggaagctcagattcagtttctcctctgcccagggagagttggaacaacaagtccttcaagggaagtgcagaggctccccgtagtttaagaatgacaatgaaacttcgtgatttttacaaaaccccaaaggttgatcctgaattgctcaaagagattgagcagtggaacgaagcacttaagaatgatgtgatcaaattttgccaagagaacaattttcattctggtttctttgatggaactgaaaacaacatggtagctgatgcctatgaattgaaggtgcgtcttgaacacatcattgaaaggatagccttgatttctgatgctgcaaatacagaacgaccttctcttgttgtcaacaacttgttcataggtggggctctggctgcaaggtctaagtacaccctacagcatttgggcattacccatgtactctgtttgtgttcaaatgagattggtcaatccgattcccaatttcccgatctttttgaatacaagaacttttcaattagcgatgatgatgatgcaaacatcagtgatctttttgaggaagcatcagacttcattgatcatgtggatcatgttgggggcaaggttctagttcattgctttgaagggaaaagtcggagtgccacagtcgtacttgcctatcttatgcttagagagggctttactcttgcaaaagcctggaacttactgaagaaagtacaccgtcgagcgcagccaaacgacggcttcgcaaaggctctcctggcccttgacaagaggctgcatggcaaggtatctatggactggcaacacaagcggccagaaatgaaggtgtgtccaatctgcagcaagaatgttggtctaagtacgagttcactcaagctgcacctgcagaaggcacacaagcgtctatctgcaggcagtgtcgacagcgccatgaccatggagatccaaaaatcgatcgagtcactccagatcagccgaggaggaagcctgagcccgtcccagaagctgaccaaggtgttcagcaatgagctgagcttctgatctgttttcctgtactatagatgaggcaatgtacttggctcacattgtaataacttgtactatcagactgaacttgtgactgtaggtttagttcacacgcctatatgattagcacacgaatgttcaggtgtgaagggtgcaacactaaagaatgttcaggtcttgtatttgttgcctgcagtatgcagttttcttctaaagggatctactctcaatctttgtatagagttactaattttatgggtacttttctagtgtacattcctgtttggtcacctagggctggtaagatatgagctctgttttcagcaagcaccgtagaaaagtttggaggttttgctgggtc

SEQ ID NO: 1213 - DNA, 2991 bp, Zea mays
tttcttgcgcaattgctcgcccttgctgacgaggagcagcacctcatactgaagcagcacccaggtatggaatcactcgtattggcctgtcaaaatcggagatgctcctcctgtttgtccatcatttccccctcttttcggtgacctccacatttcttcctctgtcactggctcagtgctgtgtgttgtccttctggctggagcaagcggagcccagcaggaggggcggaggcggcaacaccaacaccaacaccacaggccgccgccgcgcctcgagctggctatggcgcacgcgcggggcggcgggggccacggccacggccacgaggaggaagcggaggcggccgtctgcctggacggcgactccgaggcgggcgaagcgcgcagcgcggggcgcgcgccgccgtggcgggaccagctgacggcgcgcgggatggtggcgagcctcgccgtcggcgccatgtacagcgtcatcgtcatgaagctgggcctcaccacagggctcgtccccacgctcaacgtctccgccgcgctcatcgccttcgtcatcctccgcgggtggacgcaggcgctcgcccgcttcggcgtcgctacgcgcccgttcacccgccaggagaacaccgtcgtccagacatgcgccgtcgcctgctacagcatcgccgtcggaggtgggtttggctccttcttgcttgctctgaacaagaggacctacgagatggctggggaggacacggaaggcaaccttccgggaagctacaaggagcctggcattggctggatgaccggcttcctcttcgccgtaagcttcgtcgggattgttgcgctaatacctctaaggaagatcatgataattgactacaaattaacttacccaagtggtactgcaacagctgttcttataaatggattccacacaactcatggagatgcaacggcaaagcagcaagtgaatgggttcacaaaatactttgcaatcagcttcttttggagcttcttccagtggttttactcaggtggagacaactgtgggttttcacagtttcccacttttggacttagagcttggaaacaaacatttttcttcgatttcagtctaacatatgttggcgctgggatgatttgctctcacctcgttaatctatctctccttcttggtgcacttctctcatggggaataatgtggccactggtcagtgatttgaaaggggattggtatcctgcagatatgccagaaagcagcatgagaagcctgcaaggttacaaggccttcatctgcatagcgctcctcttgggcgatggtctttacaattttgttaaggttgttgcattcactgttaagagtctacttggcagatcaagactgaagaatgcaaagaaagaggaagacattccagtgcttgatgaaattcagcgcaatgagatttttacaagagacagtatccccacatggctagcctactctggatatcttgcactatcagctgttgctgtgtttgccattcccttgatgttccatgagatgaaatggtactatgttattatagcatacttattggccccggcattgggtttctgcaatgcctatggtgctggccttactgatatcaacatggcctacaattatggaaaggtcgcgctctttattcttgcggcctgggctgggaaggactctggtgttgtagctggcctagtgggttgtggtttggtgaaatcactggtgtcaatatccgctgatctgatgcatgacttcaagactggacatcttacattaacatcacctagatcaatgattattgctcaggctattggcactgccatgggctgtgtcattggaccactgacatttttactgttctacaaggcttttgacattggaaaccctgatgggtactggaaggcaccatatgctctaatctaccgcaatatggcaattcttggtgtccagggcttctctgctctgcccctgcattgtttgcagctgtgctacggattctttggatttgcagtggcagccaatctgatgagggacctcttgccaccaaagtacggcaaatgggttccattaccaatggcaatgggggttcccttcctagttggtgcgagctttgccatcgacatgtgtgtggggagcttgatggtcttcatctggcacatcattgacagaagtaaagcatctttaatggtgccagcagttgcatctgggttgatatgtggcgatgggctttggatcttccctgaatccttgcttgccttggccaagatcagtccaccattgtgcatggcattcaggtcttcacactagagtaacaaaatgctcgacatctgagaacagttccatgtccaatcggagaagctgttggcatgccaagtttgttattaattagctgggatatgatacatgcaggtaggtaaagatgcagtgcctatctggatgttacctacatataatgacgtaatgtggtacccctgtaaaatttatcatatgcaagatgatacatcacattagagcaatggtaagtttgagaatttcaccccagtggtaatggatggatgcaagagctagcagtagccaaaattttgcaccataggttgtacccccacccctatagtttaatatggaaccacaagctacagtatacaaaccatcttccaaagacagctgaccctattgtcaatcacagctggttttggtaaaagaaaaatgcagtcaaatcttgcatgaatggttagcaaatcatgtatatatttatgtatgtctttgccataacttggattcacaagatgcaatgtagtaagaggcatcttggtcaggcatctgatacaattgtaaaatcatctgctgcgtccttttatcataaacaaaatcatcaggtgatgtatgcctatgaatagttagcaaaaggtacatatatggttatgtatattaaacacgttctgtgaagaagaaatgtaaccattcaacaagaacaatccaatgatacatttgtcagc

SEQ ID NO: 1214 - DNA, 2737 bp, Zea mays
cgaaaatccaccgtatccgcgtacccatccctaggcgagaggggatggtgccctggcaccagccacacgagcgccctcacctgctcctgcgacgctcgtcggctcagcagcagtcctcccccacaaaagcagagacgcgtccgacgccgccaccaaaagcaccttccccagccacgctccgccgccatagccgcaggaaaatatcaaatcggagccgcgaagcacaacagaaatttttttccctagggcttgcacgcaaaaccctcctgaattccccaattccgtgccgtccctcgcttcttgtgggccacgaatctagggtttatgcatggcttctgaccctcccggagatggcaccagtggtgaggagacggcgccgggccctgcccccgccgtggaggcgccgcctgctcccgccgttccggccaggtcgcgctgggccgctgagatcaaggtctacacccgtaagcacccccgcaaaaaccctaaacctcctccagaatcagcggctgaccccgtttctgttccttccccggctccgaatcccctttctgaaaccttatcctcgattcgccgctccatccaccgcacggaggcggtggacgctgcggcgctgtccgatccggcagcgccggcctcggttcccacccgggcgccgtctggggaacgtggcgccgcctctggggatccctcgtctgggctgaaccgggtcggcggcggtattcctaacggccacggcgacgaccgggcggccgccgctgctgtgaaagctgagaaagcacggaaacgcaggttaaggagtgagctgcggcgctgtctggcaggagagctcgaccaggtccgcgtgctctccaggcgactgaaggaggctgccgaggccctggcgcaacaggaggcttctgagcccgtgcctttgcctttgatggtgctgccaacacagcagcaggtggtggatgctgggtatgttcagcaccagttcttggctggtgatatggcggtgcccatgcctactcagattgcagctgccgttactcctgcccgctcgctgctgcatcgcagaccactaaccgtgtcagttgttcataatgaagcctttgagaaggagaaacggacgccgaaggccaatcaattgtaccaaaattcagagttcttgcttgccaaggataggattcctccctcagattcacatgtgcgcaagaaacccaagcaccacaagaagaaacataggtccctagaatctcgtggcgcagactttgatgccgagcggcgcctgtactctcatgcgttcaagaagtcctcatcacttctgagccgcttaatgaagcacaagtttgggtgggtgttcaacaagcctgttgatccagtcacacttggtttgcatgattattttactattatcaagcacccaatggatcttggcacaataagggggcggctgagccgtgggcagtacaggaaccctaaggagtttgctgaggatgtccgtcttactttccataatgcgatgacatataatcccaagggtcaggatgtgcatttcatggcggagcagttgttaggaatctttgaggcacagtggcctgagattgaggctgaggttaactacctcgcatcatgtcctccattgccgaagaagtttcccccgccaccaattgacctgcgcttcctagagaggtcagattcaatgagacaccatgtggcattggacaccaattcaagaccgatcagtcatactcccacttatacccgaactccgtcaatgaagaaaccaagagcaaaggatccaaataagagggacatgacaatagatgagaagcgtaagcttagtgagaacctccagaatttgccgccggtgaagcttgatgctgttgtgcaagtcattaagaacaagaacttatcagttaagcaacatgatgatgagatagaggttgaaattgatagcatggatgctgagacactttgggagcttgacaggtttgtgtcgaactacaagaagaacctgagcaagcaaaagagaaaggccgagcgagcgatgcttgcccgacaagatgcagagttgcgtgcacagcaccctatacaacaaccacaaccaaccccagtcccccaagaaccttttggtgaaaaatctccaaaacaagttgtgaaagattcgctggaaggcgagcaactgccagcatctgcaccagaacaaaatggtgagaatagacagaatgcgagtagttcaagcaattcaagcagctccagcagtggctcaggatcatcttctagtggctcagacagtgatagctcctcttcagatggatctgatgctggcaattcatcttgagatataggtaagtttgaatatgaacattttgtatctttatggttgaacatatataactccatacaaatacactcatttcaaagaatattgaaagcagcaagtattactcattgttatgtgtgaacttctagttgcagtatggttaaccaccattctgtattctttttttaccagtgcttgtatagttgtgcctgattatacggttatatacgatattagagatctgacttgtgtaccagcaaagtctaattggatgctgatattatgaaatttgcgtttagaaattatagaagcacaagataccccccccctcttcccacacacagaccttggtgcactaaaatttcatgattttgtggtcccaccattgtcttgataggtgcttgtgtgcatgactctgggaggtctata

SEQ ID NO: 1215 - DNA, 3859 bp, Zea mays
ccgcgccaccggtccgaccagaccgccgaccggctcagccggttcaccacttctcacttcacctgcctgccgcttcctgctttcccgttcctgaaagagagagaagcatatcctcactctagtctctctcgccccatccccttccccgtccctcctccagctccctctcctccggctgctgcccctccaccgtccgcccctcctccccgctgccggccacttccggacttccccgccgcgttacctcctcctcctggcgcttcccgcttggcggttgcctgggatttacccccgctctgttcccctttcggggaacgccttcagaggcaggacgggtacttggtccgggaggcgcggcgacggcgacagcggcgagtgattttcggtcgccagagggagagttttttttaacggggttttggtgggaaggaaggaggcggccgcgagtaggcgagacgttcatgggttagatctggcggtccggcggcgcggatctgagcgaggtttcggtggagagatcgggtggtggtcactatcttcgcctcatttcgagtagatggagcgtctcatggccaaatcgggcatgtatggcggattctgctactgtctgaagcagcgttgcctgcagatctgaaagtcacttggtctccttgcccagttgaccttactgaatgacattgctttccgcggtttgactgtcattacatccttttcggtgtctgatcaaaaatttttagcacgagatgacgtgcttctagttgttgttgatatcttgtcctgagttgagtaaacctgaagctggaaaggagcggatcacattcgtgctcttgctcttgttgacttctaggtctatcttagatacctagaggctggaaggggtcagatccagttcctgtggtcctagtaacaaggtcctcttgggggaaggcgccatgacctacttccccgaggaggtggtagagcacatcttcagcttcttgccatcgcacagcgaccggaacacggtctcccttgtgtgcaaggtgtggtatgaggtcgagaggctgagccgacgagcggtgttcgtagggaactgctacgctgtgcgccctgagcgtgtggtgctgcggttccccaatataaaggccctcacggtgaaggggaagcctcactttgcagacttcaaccttgtgccgcctgattggggtggctacgcagggccatggattgatgcagcagcaaggagctgtgttggtctcgaggagttgcgcatgaagcggatggttgtgtttgatgagaaccttgagctgctagctcggtcattcctgagattcaaagtccttgtccttatcagctgcgaggggtttagcaccgatggtctagctgctattgcgagtcactgcaagctcctgagggagttagatttgcaggaaaatgatgtggaggaccgtgggcccagatggctttccttccctgattcctgcacttcgctggtctccttgaatttcgcttgcatcaaaggggaggtgaattctggtgcgttggagagacttgttgctaggtctccaaatctacgcagtttgaggttgaatcgttctgtttcagtagacacactctcaaagatactattgcgagccccaaatttggaagacttggggacaggtaatctgacagatgagttccaagctgagtcctattccaggcttactagtgctctggagaaatgcaaaaagctgagaagtctgtctggattttgggatgcttctcctatttgtgttccgtatatctatcccctctgtcatcaactaacaggcctaaacttgagttatactcccacactggattattctgatctagctaaaatggtcagccgctgtgtgaaactccagcgtctctgggtactggattgcatttcagataagggtttgcaagtggtggcctccagttgcaaggacctacaagaactcagggtgtttccatcagaattttatgttcctggtgcttctgcagtgacagaggagggacttgttgcaatatcgtcaggctgcccaaaactgacctctttgctgtatttctgtcaccagatgaccaatgaagcgctaattactgtagctaataactgcccaaatttcatcagatttagactctgtatccttgagccaaagaagccagatgccatgacaggccagccgttagatgaaggttttggtgcgattgtccgtgaatgcaaagggctaagacgtctgtcaatatcaggtcttctcacagacaaggttttcatgtatattggaaaacatgcaaaatacctcgaaatgctttctatagcatttgctggagatagtgataaggggatgatggacgtgatgaacgggtgcaagaatctgaggaagcttgagatcagagacagtccatttggcgatgttgcactcttgggaaatgttgccaagtatgagacaatgcgatccctttggatgtcttcatgcaatgtcacattaaaggggtgccaggtccttgcatcgaagatgccgatgctcaatgtggagatcatgaatgaactagatggaagtagtgaaatggagaaccatggagacctctctaaagtggacaagttatatgtttaccgcacaactgctggagcgagggatgatgcaccaaattttgttaagatcctacagagctagccgcgactacccttatatcttcccaccttgagaggtgatacttctcttttatccacctttttatctggaagtatcatttgcctgcttatcaatttgtttgatcttctgctagtccattgctgtttgaacttaattcttttgttttgcgcttagtaacttgttgaatattgcattttctaatacatgctccagaacatgcgaactagtatctctaggcccctgttgctcattatattgagaagcaacatctatacgcccattaagatcagatgacattatagaccatatctccaatactgcatgaagaagcttctgctatgtgtttaataatagatcaagcctgtttgccgaaaagatcaaactggatagtactagtactagaattttatctggatagtacttgaagctgatgtttgaaccacttttctgctgcaaaattgtagcatcccatttttgtgtttctctcagtacattgattgtggctactcatagtgctaatttctgtcgaagtgtgaaccactcagattccagtacctatagagagcagcaggacctgatatgtctaaccctgttttcccgctcctactcgattgcttttacagatggtcggtggaatccggcatgcctggggccagggcaacagtggtaagttcttgaatcgtctccccttttgcagggtcaggaaaagccacactggcctgcgcccttatcgtggagcaacacgaccgggaatccatcatcatcctctgtaccaccgcccccctccctttcagtgtctggtcatatggccacccaggcccccctttattacctgtgaattctcccactcgagaggaggggaccgaacggataactttttctagccatgtaacatctctagtgtacttgtctccatttgcttttgacattggcacggtggattgtgttgctggcgtcgctgttgtagtgttttgtttcgcaaacctgagaattatcgggacattccggggacgacgctctgtttcttgctcctgtgaatgcatggactgcatgtaatatttgatggccttgcaggatttatcgtacacacttttcgcccttgcatatttctcgtctcagcccacgtaagcttggttgatattgcatggctaagtgattgttggtcacctggtaaatattgttacgccatcttctacaactaaaacgaagtgatatcgttg

SEQ ID NO: 1216 - DNA, 1649 bp, Zea mays
gccctgagatgcatggggtagccaatcgggtgtcgccgtgcgcgcgcgcgcgtctggcctcctgccctccctttccttgctaaataaagcaagtagcagataggggaaagtctgctcgcaagttgcatccgccctgcgccaagaaaagccatcgttcttcccacaaacgcacacatagaagcatcattcccctctcggctagcttcttcctctctctccctcctcctcctcttcctcttcctcctcccttgggaaacctgctgcctttgagctttcttcttcgagagctcccaccagatctcctcctccttaccttctttggcacgttcggcggcgcgcgcggagaaagatagatcccgccatcgtcgtcgtcggtccttgcttccgatcggagggccacaaccacaacctctcgctccatagcgtgcaagcgcgagccagggtcaagaagagagctagctagctataggccggagatcgatggggaggggaaagatcgtgatccgcaggatcgataactccacgagccggcaggtgaccttctccaagcgccggaacgggatcttcaagaaggccaaggagctcgccatcctctgcgatgcggaggtcggcctcgtcatcttctccagcaccggccgcctctacgagtactctagcaccagcatgaaatcagttatagatcggtacggcaaggccaaggaagagcagcaagtcgtcgcaaatcccaactcggagcttaagttttggcaaagggaggcagcaagcttgagacaacaactgcacaacttgcaagaaaattatcggcagttgacgggagatgatctttctgggctgaatgtcaaagaactgcagtccctggagaatcaattggaaacaagcctgcgtggtgtccgcgcaaagaaggaccatctcttgatagatgagattcacgatttgaatcgaaaggcaagtttatttcaccaagaaaatacagacttgtacaataagatcaacctgattcgccaagaaaatgatgagttacataaaaagatatatgagactgaaggaccaagtggagttaatcgggagtcaccgactccattcaactttgcagtagtagaaaccagagatgttcctgtgcaacttgaactcagcacactgccacagcaaaataacattgagccatctactgctcctaagctaggattgcaattaattccatgaagaagagtaaaactgccgtcttatgatgctgaaggaaactatttattgtgaagagatgatactcagagaaagacatatttgtggcagggagatttgagatatgaacttataaatgtaatgcaaataattttcagaccggaatggggtcgtggaattcagaggatgattgctttctagttgcatttgatgtttgatgagacttttctcatgtgaaacgtttattaaaacttcaaaatggtgcagatgttgctactacacttgttaggcttgtataaatatctgaccatgtgtactagcattacgaaaacagaaaagaagacagacagccctgtttgataggggacaatgatgcgatctaggagtacaaacagagtctagtttccactcagttgagttttatattgctctcaagcgttatcaagggtttagtaggatacagatataat

SEQ ID NO: 1217 - DNA, 2529 bp, Zea mays
gtcggtcgccaggaacccataaaaaaaggtagctttatgtttccctcttgctccgtcgtcgtcgtcgtcgtcgtcgtcgtcgccgccgccgttgctcgataggatgtttagaaattaactgcttgtgcacacagaggttacagttccttgtagactccttcagttcagaaatgaccatgcaatgcatgctagtttctgtttacagtttccaagcatgcatggttttgttgcctgtgagtagatgatgttggagtacgtaacgtagtaacaatgagcagtgatgtgaattgcgatgatatacgtgacgccgagagagcacatgaacaggtcagactgtacccttgcgtgcctagctagctcaagttcttttcttgcagccttttcttcaaatcccacacacccatgacatcggccggcgatccgatctctatcctgattcctgacacacaagcacggccacggaaccctcgcgcatgcatgctgcctgctgacgcttaccttcgtttcgttttcatggctgctgctgcttattgctgcgagtgcgatgtgcaggcggcagcgggcacagtcctccagtcctcgggtgaggcgatcgtcgccggcgccatgggagggggagtccaccaccaccacccgtgcgtggctgctgatggagatggggccggggccgggcccgggccggccagcgtggaggccgcgttgaggcctcttgtcggcgtcgacgcctgggactactgcgtctactggaggctgtctcctgatcagaggttcttggagatggctgggttctgctgcagcagtcagttcgaggcacagcttccagcgctgggcgacctgcctccatcaatccagctcgactcctcgtctgcagggatgcacgccgaggcaatggtgtccaaccagccgatctggcagagcagccgcgtgccagagctccaaacaggttactccagtggcatggtgcaggagcccgggtccagcggcggcccgaggacgcggctgctggtgcccgtcgccggcggcctcgtcgagctcttcgcggcgagatacatggcggaggaggagcagatggcggagctggtgatggcgcagtgcggggtgccgagcggcggtgaggggggcgcgtggccgccgggattcgcgtgggacggcggcgcctcggacgcgtcgcgtgggatgtacggcgatgcggtgccgccgtcgctcagcctgttcgacgccgccggcagcgtcgcggcggacccgttccaggcggtgcagcaggcgccgggcgccggtggtggtggggtggacgacgtcgccgggtggcagtatgctgctgcggctgggagcgagctggaggcggtgcagctgcagcaggagcagcagccgcgcgatgcggactcggggtccgaggtcagcgacatgcagggggacccagaggacgacggcgacggcgacgcgcaggggcgtggcggcggcaagggcggcgggaagcggcagcagtgcaagaacctcgaggcggagcggaagcggcggaagaagctcaacgagcggctctacaagctcaggtcgctcgtcccgaacatctccaagatggaccgcgcggcgatcctcggggacgccatcgactacatcgtgggcctgcagaaccaggtgaaggcgctgcaggacgagctggaggacccggcggacggcgccggcgcccccgacgtcctcctggaccacccgccgccggcgagcctggtggggctggagaacgacgagtcgccgcccacgagccaccagcacccgctcgccgggaccaagagggcccgtgcggcggcggaggaggaggaggaggagaaggggaatgacatggagccgcaggtggaggtgcggcaggtggaggccaacgagttcttcctgcagatgctgtgcgagcgccggcccgggcgcttcgtccagatcatggactccatcgccgacctgggactggaggtcaccaacgtcaacgtcacctcccacgagagcctcgtcctcaacgtcttccgcgccgccaggcgggacaatgaggtggcagtgcaggcggacagactgagggactcgctgctggaggtgatgcgggagccgtacggcgtatggtcgtcgtcggcgccgcccgtggggatgagcggcagcggcatcgccgacgtgaagcatgacagcgtggacatgaagctcgatggcatcatcgacgggcaggcggcaccgagcgtcgcagtgggggtttcagaggatcactacggcggctacaaccatctcctccaatacctcgcttgatcattatttaattgcgttcgttcatgttgaaagttcgatcaaactatcaaaggatggatcaactaataaaaacgggatccatatataagtaactgtgaattgcgatcattaattgtatgcatacaagcatatggtcgtggattaaagtttgttaattgggttttctcactgcttttctggatctttcttgtgttggttcaaacgagggcggaataataaagctatttcctctatgtttttatacaaggt

SEQ ID NO: 1218 - DNA, 5429 bp, Zea mays
cagcagcgctgcagcgaccacccgcggctgggtgcgcgcgttcgttgtcccttccacatccaccggaaagctacgcctcctcctcctcctccaccacctcgtctcctctccactctcaatcgctctctctctctccgtgggcgatgcgctcagcctgctcaggtcagcgttgatctatcggagggaggactgcctgcgctcgccggccacccatggctatggcggcagcggcggcggcggctaccaagaggtgcatgaacccggcatgcggcgcgccggcgtcggtgctgggggcgggaggggactggaggaagggctggccgctgcggtccggatgcttcgccctactctgcgacaagtgcgggttggcatatgaacagtttgtgttttgtgatatatttcaccaaaaggaatcaggatggagagactgctcattttgtgggaagcgcctccattgtgggtgtgttgcttcaaagaactcttatgatctacttgacagtggaggagttcattgtgtcacttgcatgaaaaattcattagcccagtccgcttctggtcaagtggttccaaagctttttccatctccaatcaatctacgttttttcggtaaaagtgacgagttattgtcaagtagaaattttgaacagccaccctctcttacattggattccagaaatgatgatattgcttttgtaaataagagcaatcacctgttcatggtaaaaggtatagaggctggacaaagcagtaacatcttgagacaaaaagagatagagaatggttcaaggcagattaaatgggaacaaccaacccttagttttggggacatgggaaggcctttcctaactaggtctcaaagtgcattagagtcacctcaatgtactcgaagagatgacaataaggatccaactacagatagcacaagtgagtcattttcagaagcatgtctgagcatgagcctaggtattgcaaacaatgtaaacaggatggaggctacttcaacagcggaaaggcctgtgctattgtcaacaacagccattgctgaaggaagagaacttgccactacactatctccctttcaacacgcacaaagggcacggcatttcctgaccagacctccaaggattggtgaaggtgctgcttttgatccaacaagagacatgtttccacatcttcgtgttgctagaccacctgctgatggaaggggacgcaatcaattacttcctcgttattggccaagaataacagaccaagagctgcaacagatatctggagattcaaattccacgattgttccattgtttgagaaggtcctgagtgcgagtgatgcaggccgcatagggcgccttgttcttccaaaagcttgtgctgaggcatatttccccccaatttcccaaccggaaggtcgccccttgacaattcaagatgcaagaggaaaagaatggcattttcagtttaggttttggccaaataataacagcagaatgtatgtcttggagggtgttacaccatgcatacagtctttgcaattacaagctggcgatacagtgacctttagtcgtatagatcctggagggaaacttgttatgggctttcggaaggccacaaatactgtcagtctgccagactcacagatctcagctattgcaaatggttcccttctcagtgagacactcttttctactgcaaatgagaacataggtgtcgtaagtggttatcctggatttcttcactcaataaagggagccgcagatctccatccaaactctctatatgatcatcatatgaacttagttgatggggatgtcagttggaataaggcagataaatttggcagcaggccagatgagggatccttgcaatttttacaaaaacgtagtcacaatattggttccaaaagcaggaggttcttaatcgatgctgaagatgccatggaactaaagcttacctgggaagaggctcaagagttgttgcgccctgctcccactgcaaaaccaactgttgtgatgattgaggactatgaatttgaagaatatgatgaaccccctgtctttgcaaagagatcaattttcaccatccgtgcaacaggggaacaagatcagtggattcaatgtgacgactgctcaaaatggcgccggttgcctcttaatgttattgttgcgcccaaatggacatgcaccgacaactcatgggactcaaaatgctgctcctgctctgcgcctgaagagttgaccccaagagagttgcaaagtgttctgcagcagtatgaagaaatgaggaggcgaaagggcagttatggtctgaagctgaacgtcgctgaaatggatgcatccagccttgatgctttcgccaccgccgcagtatttggcgaagtcgggaaccaaggcagcgcctcagtggcgacaaccacaaagcacccccgacatcgccctggctgcacatgcatcgtgtgcatccagccgcccagcggcaagggcccgaagcacagccccgcgtgcacctgcaacgtgtgcatgacggtcaggcgccggttcaagacgctgatgatgaggaagaagcagcggcagtcggagcgcgaggaggcggaggccggcaagaagatcgcatgggtgaacagagacgagcctgaggggagcagcctgtcgagatccccgcagacgcttgacagcacccgagacaacagtgatgtgacggcgaccatgttggacaaggtgtccgacgtgaacaagcaggggcacatcgacgtcgacctcaacctccaccctgctgcccctgccgtccaggctgcgcagcagcagccccggccggtgagcatgatgggtctcttggaagtggcgggccggccgcttgacaactacatgaagcagaatggcctgacgagcctggtgggggagcaaggtggtggcagctccagcacggccacggtccctcctccggctctggtggagagtgaggagcggacgtccaacgagggcctcgtcccatcagcatcggcagagcgggaaccgaacgccatggccgtcgacgaggctggcgagaaccagcaggacaaggctgccgacgacgacgacgacgccgtcgctgccgccgctacttgacgtgattttttttcatggagctgcttctcctggaggctgggagtaacttacgtgtacgtatgaggcttgtgttggttggtgttgtaatctgacgcttaaacattggcttcaataactcatacagagtgagaacctgaaagtatcagtctagagcaagttctttttactggtgctgaaagtatcagtcttgcgcaacccaaaaggaggaaacaaaaattttagaccctccaaaattgtactcccctttggtatgtacaatctgaagtggtaacaaaaatgcactacttttttctaatagaactccgatccaagacatgcttgttttttgtttaggaaaaaaggctaggttcacctgattgtttctgatcttcttccatgtaatattttaacacatttttctttcgaacaaaatataactcagctgtttcaaaaccgtcaaaaaaaaacaacttatgattagctgctcctttttttactgctccaaggctggcctgtgagcaacattgcacccccaccacaggtcaggttcatccagcccatttattattctaaaaaaaaactctactccaaaagatgtgtccagcccagtgaagcccgaaaggaaagaagccagccgctcccgtgggcgacgacatggtcctgtgtccgtgtgaggtacacatgactacgggggccccacctccttcgttcccaatcccagatcccgcactctctttcagaacccaacacgccactgcctagctagtagctagcagagcagctagccaagcaacccagccgagtagccgaccagagagagcgagagaggcagagaggagcggacctgcccgtcgcaatggcgatgccgccgaagcccggcgacccgccgcagcgctcgcctgcgcggagccccaacctcaacctgccctgcccgctgccgccggtcccgggcgggccgcctgcgccgtcggccgccgggttgcccccgccgcgcgcgagtcaccaccgccgcgccagatctgaggtggcctttcgcttctcggacgacctggccggcggcgtgggcggcggcttcgacgagatcggctccgaggacgacctcttctccaccttcatggacatggacaagatcgccggcgccgaccgcgaccgtgccgccgagacctcctcgccgccgcgcccagccaagcaccgccacagcgcctcctttgacggcttcgggatgggggctgccgccggtggcctggccgggcagcaggacggcggcggaggcatgtttggagaggtgatggaggccaagaaggccatgtcttccgagcagcttgccgagctcgctgccatcgaccccaagcgcgccaaaagaataattgcaaacagacaatctgcagcacggtcaaaggaaagaaaatctagatatataacagaactggagcggaaggttcaaactcttcagacagaggctactactctttcagcgcagctcacactattccagagagacacaactggactttcggcagaaaatgctgagctgaagataaggttgcaggccatggagcagcaggctcaactgcgggatgctctaaacgatgcgctgaagcaagaagtggagaggctcaagatagcgacgggcgagatgccgaagtccaacgaacaattcaacatggggatgcagcacgtctcgtacagcggcccttctttcttccatctcccggagcagcacgtagacattcagctgccgcaccatttccagcagcctccgcggaacgtccagatgctgtcccaccccaactccctctcggatatggcgcagcaagactcgcttgggcggctccgggggctggacattggaaaagggtccatggctatgaagccagaggcagaggtcgtggtgaagtcagagggcagctctgtatctgcaggtgaaagcaacaccaccttctagctatacaatacatctgccttccaagaagcctccgtttggtttagagttcttttgttcatagtctgacatcctccttccttgagctgcttcgtccttctcagtaggcctattttttttattccattggttatatctactagttaacattggtcggttgccaatcgttgttgtcgtggtggctgatttctatagggacattgatgtgttggtttcgagtttgttgttgttgttgtgtgtgtggttggttgtttcgagctaggggctgaaagggcaccgagtgtttttttctccacctgttttagttttgttatagatttgacaacaatcgttatgatttctccttctggaaaggtgtacattgtgttgctatgctaatttgtagtgatatttttgatgattccaactgt

SEQ ID NO: 1219 - DNA, 4779 bp, Zea mays
ccaccgcacagtcaccacaccagaatgggctcaagcaagccggctgatgccgaggcgcgtcggcgcgcgcgcgcgcgtgagctgaacctgacccctcgagctcaacctcaactcctatgcttgccacacacctcctacttcgcttgccccgaagctttctttaagcacccccaagtgcccggccaaaataatccgtgcactacggcgacagtggtgctcgcctgttgtataaaagaacaaggcgaacagcgggtgctgctcgaggaggaagaagaggagcggcttttgagctctgaggtctcggtcaccgcccccccaccccaccaccaccaccaccactgggtttttagatccaatgccaaggccgtgaggaagctagctcttgcgtcgtgaggaagagccgaccagagaagctaggagcgcgtggcaatggcggagggcgatgcgggaaaggcggaggcggggagctgcagcgccgccgccgcctccggcgccggcgggtgcgacgcggtcaagaagcggccggagcagagcgtggcgttccacgagctgttcggcttcgcggacccgctggactggctgctcatggctgcggggagcgcgggcgccgtggtgcacggcgccgctatgccggtcttcttcctcctcttcggcgagctcgtcaacggcttcggcaagaaccagcacaacctccgccgcatgacggacgaggtgtccaagtattcgctctacttcgtctacctcggcctcgtcgtctgcgcctcgtcgtacctagagatcgcgtgctggatgtacacgggcgagcggcaggtgggcgcgctgcggaggcggtacctcgaggccgtgctgcggcaggacgtgggcttcttcgacaccgacgcgcgtaccggcgacgtcgtcttcagcgtctctaccgatacgctcctcgtgcaggacgccattggcgagaaggtcggcaacttcatccactacctcgcgacgttcctggccgggctggtcgtcgggttcgtctcggcgtggcggctggcgctgctcagcatcgccgtcatccccggcatcgccttcgccggcgggctgtacgcgtacacgctcactggcctgacctccaagagccgggactcgtacgccaacgccggaatcatagccgagcaggccattgcccaggtgaggactgtctactcctatgtgggtgagaccaaggccctgaattcctactcggaggcgattcagaacaccctgaagctgggttacaaggccgggatggccaaggggcttggcatcggctgcacctatggaatcgcctgtatgtcatgggcgctggtgttctggtacgccggcgtgttcatacggaacggccagacagacggtgggaaggccttcactgcgattttctcagcaatcgtcggtggcctgagcctggggcagtcgttttcgaaccttggagcgttcagcaaagggaagattgccggctacaagctgctggaagtgataaggcagaggccaacgatagttcaggacacggcagacgggaggtgcctcgacgaagtgcatggcaacatagagttcaaggaagtggccttcagctacccttcccgcccggacgtcatgattttccgagacttctccctcttcttccccgctgggaagaccgcggccgtcgtcggaggcagcgggtctgggaagagcacggttgttgctctcattgagcggttctacgatcctaatcaggggcaagttttactcgacaatgtggacatcaagacgctgcaattgaagtggcttagggaccagattggcttggtgaatcaggaacccgcacttttcgcgactacgattcttgagaacattctttatggcaagcctgatgcgacaatggcggaggtcgaggctgcggctacttcagctaatgcccatagcttcattgctctccttcctaatggctacaacactcatgtgggagatagggggcttcagctctccggtggtcagaagcaacgcatcgccatcgcccgcgcgatgctgaagaacccgaagctcctgctactagacgaggccaccagcgcactcgacgctggttcggagagcatcgtccaagaagccctcgaccggttgatggtcggcaggaccaccgtcgtggttgcccacaggctatcgaccataaggtgtgtcgacatgatcgcggtgatccagcaaggccaggtcgtggagactggcactcacgacgaactcctcgccaaaggaagctcgggagcgtacgccgcgctcatcaggttccaggagaccgccaggaaccgcgcgtgcccgtcgacccgcaagtccaggtcgtcccgtctgagcaactccctctccacccggtcgctgagcctcaggtcggggagcctgaggaacctgagctactcgtacagcaccggcgccgacggccgcatcgagatggtttccaacgccgacaacgaccgcaagtacccggcgccgaggggctacttcttcaagctcctgaaactgaacgcgccggagtggccctacaccatactgggcgctgtcgggtccgtcctgtccgggttcatcggccccacgttcgccatcgtgatgagcaacatgatcgaggtgttctactaccggaaccccagcaagatggagagcaagaccagggagtacgtgttcatctacatcggcaccgggctgtacgccgtcgtcgcctacctcgtccagcactacttcttcagcatcatgggcgaaaacctcacaaccagggtgcggaggatgatgctcgccgtgattttgaggaacgatgttgggtggttcgatcaggaggagaacaactcgaaccttgtcgccgctcgcctctccacagacgccgccgatgtgaagtcggccattgccgagcggatatcggtgatcctgcagaacatgacgtccctgctcgtgtccttcgtggtgggcttcatcattgaatggcgggtcgccctcctcatcctcgtcaccttccctctcctcgtgctcgccaactttgcccagcaactgtcgatgaagggcttcgcgggcgacacggccaaggcccacgccaagacgagcatgatcgccggggagggcgtgagcaacatccggacggtggcggcgttcaacgcgcaggacaagatcctgtccctcttctgcagcgagctgcgcgtgccgcagatgcacagcctgcgccgcagccagatctccggcgcgctcttcggcctctcccagctctccctgtacgcgtccgaggcgctcatcctgtggttcggcgcgcacctggtccgcacccacgtgtccaccttctccaaggtcatcaaggtgttcgtggtcctggtgatcacagccaactccgtggccgagaccgtcagcctggcgccggagatcgtgcgcggcggcgagtccatccgctccgtgttctccgtgctcaacagccggacccgcatcgacccggacgacccggacgcggagcaggtggagtcggtgcgcggcgagatcgacttccggcacgtggacttcgcgtacccgacgcggcccgacgtgatggtgttcaaggacctgagcctgaggatccgggccgggcagagccaggcgctggttggggcgagcgggtccggcaagagcaccgtcatcgccctcgtcgagcgcttctacgacccgctcgccgggaaggtgatgatcgacggcaaggacatccggcgcctgaacctcaagtccctgcgcctcaggatcgggctggtgcagcaggagcccgtgctgttcgccaccagcatcctggagaacatcgcctacggcagggacggcgcgacggaggaggaggtcgtggaggcggccaaggtggccaacgtgcacggcttcgtcagcgcgctccccgacgggtacaggacgcccgtgggcgagcgcggggtgcagctgtccggcggccagaagcagcgcatcgccatcgcgcgcgcggtgctcaaggaccccgccgtgctgctgctggacgaggccaccagcgcgctggacgccgagtccgagtgcgtgctgcaggaggcgctggagcgcatcatgaagggccgcaccgccgtgctggtggcgcaccgcctgtccaccatccgcggcgtcgactccatcgccgtggtgcaggacggccgcgtggtggagcagggcagccacggggacctcgtgtcccgccccgacggcgcatactcgcggctgctgcagctgcagctacaccatggctgatcctgcgcctggaatagatactggagggcgcacggccggtgtagatactggagggcggtgttagcgtggcgtggctcaaccgtggccggagaagacgtgttttgatgtgaacgatcaggattgtgccgacaaacaagtgatgccgtattcttcttgcactcctgccggctctgccaatgtttagatcatcccctcctagtaattctcacacctttttttttcttcctttgagaagatcctagtaattctcagatggacccaattgtttgatgtgtaacggtcagaagccagggttcgtctttgctacttgtctaggagttgttgcctctaataattggcttcaaaccttacgaagggatctgcttgaaacagccttgcagttgcagcagccacggagagcgtcactggatctgggtgtccgctgccgccgacatctctagcggagtaacgagaaagcctttggatcgatccataattcgtgcaggctgctttgtaagcacgttatacagcttaaacctctatagtaatatttcgtgcaggtaccttatgttgcta

SEQ ID NO: 1220 - DNA, 1988 bp, Zea mays
ggggcggtggcgctgcctccctctctctctctagcccagccgcctccccaacggcccaacctcaccgaggagagagagaccgatacagagagagagaccaagaggacacgggagagaggacgttcatttccgcgtcgtctccgcccgcagccggcagccccaccacccaccacatggccgccatgccgggtggggcccacggcgccggcgccgcggacccgatgcaggtggaccagccgctcccccctgccgccgcaggcacagcacacgcccccgccgacgccaagcatgctggttctatgattgaagggagtgatccggtcacaggccatataatctcgacaaccattggagggaagaatggagagcctaaaaggactatcagctacatggcagagagagttgtgggaactggatcatttggaatcgtcttccaggcaaaatgtctggagactggtgagactgttgcgattaagaaggttttgcaggacaagcgctacaagaacagggagctacaaatcatgcgatccatggatcactgcaatgttgtttccttgaagcattgcttcttctctaccacaagcagagatgaacttttccttaacttagtgatggagtttgttcccgagtcattatatcgggtgttgaaacattacagcaatatgaaccagaggatgccactcatttatgtcaaattatatacctaccagatatttcgaggcttagcctatattcacacagtacctggagtttgccacagggatgtgaaaccacaaaatcttttggttgatccactgactcaccaagtgaagatatgtgattttgggagtgccaaaatgttggtcaaaggtgaagcaaacatatcatatatatgttcacgttattaccgtgctccagagctcatatttggggcaactgagtacacaacatcaattgatatttggtcagctggatgtgttcttgctgagctgcttcttggccagcctctcttccctggtgaaagtgctgtggatcagcttgttgagataataaaggttcttggtaccccaacgcgcgaggaaatccgatgtatgaatccaaactacaccgagtttagatttcctcagatcaaagctcacccatggcacaagattttccacaagcggatgcctccagaagctatagatctcgcttcacgcttgctccagtattcaccaaatctaagatgcactgctcttgaagcgtgtgcacatccattctttgacgatttgcgagaaccacatgcgaggttgccaaatggacggccatttcctccactgttcaactttaaacaggaactagcaaatgcctccccagagctcatcaacaggttgatcccagaccatgctaggcggcatcttgggctcacattattgcccgctactggaccataggcgaaggctctatggtggtgcttcgttgtgcggaaggcaacctgcattcaaggtgtagaatctgacaattattggaaggtcaaacatgagctggcgcgtaaggagaggtggtatgttctcgtgcagccagccttaatttgtcgcatgtcttaatgcaaaaatctgatttttgcccaagtagtgagaggagggaagggggtggtcggtgtattgttaagctattgaaggaattcgatccctgctattgtgttactttctccaacgtttaaacgttgtagtgcgcctgtaagtgttccatatatcccctgttgtcagtcagtgtaattctgtaaatgttattaatgggaaattatttcgtgcttttccaaccacataactaatccctaccttgttggaagcaatctcttgttttcgttgtcagttgtgctgatctgggaattgtttccttcaactccatgcgagcaagttttagttctgaatgaattgtcatcctagagtagcatcagatgggcacgtgcctagtgcaaaggcagcaaagatataatgggagcacaggtgagggcgaatggggttctg

SEQ ID NO: 1221 - DNA, 2316 bp, Zea mays
ccactctccttctcctattctatctatatatcacccgcctcttttttctccctcactccgccacaccttccctcttcttcctcagctccgtcgcccaccgccggagctccgaaaggccccgcgcccgccgcctttcctgtaaaaaacccaacctttagctagctaaccgctcctcttctccccctactccccttgcccaaatcagagaagatatttaacggaggaggggaaggagaggatatttagctgattgttgattggtggtccggggtacggtgttcttgagtcgtgaagcgaccgtacagtggctagggccgtctccgggttgcgtgcaggatggtcgtcagagatcgggagtgaggaggcagctcgtggtcgtggaggctaaatgtaccgcaagaacgactcggcactctcctgtttctacctcttcctcctctggttcttcttcttgaaatagaccagcgccagccaccaggtagctacctactagctagcagcccagttgcgactggggacgggctgctgcttgcaagttggaatcttggagcaggagcagaggagcgggagatggagctggatctgaacgtggccgaggtggcgccggagaagccatcggcggcgctggaggcgagcgactcggggtcctcgggctcgtcggtgctgaacgcggaggcggcatcggcgggcggcggggggcccgcgccgggggaggaggggtcaagctcgacgccggccgtgctcgagttcagcatcctcaggagcgacagcgacgcggccggcgcggacgccgacgacggcgacgccacgccgtcgccacctcgccaccaccagcagcagctcgtcacccgggagctcttcccggcgccgcagcattgggccgagctcggcttcttccgcgccggcccgcagcagcagccggacatcagggtcctgccgcacccgcacccgtacccgcccccgccgccgcccgcgcagccgcagcaggccaagaagagccgccgcggcccgcgctcccgcagctcgcagtaccgcggcgtcaccttctaccgccgcaccggccgctgggagtcccacatctgggattgcgggaagcaggtgtacttaggtggattcgacactgctcatgccgctgcaagggcgtacgaccgagcggcgatcaagttccgcggcgtcgacgccgacataaacttcaacctcagcgactacgacgacgatatgaagcagatgaagagcctgtccaaggaggagttcgttcacgccctgcggcggcagagcaccggcttctcccgcggcagctccaagtacaggggcgtcaccctgcacaagtgcggccgctgggaggcgcgcatggggcagttcctcggcaagaagtacatatatcttgggctattcgacagcgaagtagaggctgcaagggttgagtaccgactcgatattcgattctccctgccgtttcgtgaccccagggcgtacgacaaggccgcgatcaaatgcaacggtagagaggccgtgacgaacttcgagcccagcacgtacgacggggagctgctgctgactgctgaagctagcgcagaagttgctgacgacgttgatctgaacttgagcatctcgcaaccggcatcgtcccagagccccaaaagagacaagaactgccttggtccgcagctccaccaccaccatgggcggccgtttgacggctccgccgttctgaagaaaaccaagatcgatgctccgtctgagctgtcgtcggcgggccgccctcaccggtcgttcctccctcatctcgtggctgccgagcatctaccgcctcggtctcaccccttcttcatcacacaccatgagagtgatgcatcaagaagagatcccagctgggcagcagcagcagcatggaaggtgaccgcagctgcacctcctcctcctaccaccaccctgttgccgttgccgctgccgtcgacgtcgtccgctgcagcatcatcaggattctccaataccgccacgacagctgccgccgccccatcggccgcctcctcccgccggttcgacccgccgccaccgtcgtcgtcctcctcctcgagccatcaccaccaccaccaccgccgctgagaatcgaagaagccacactgtaaatctgccgggaagcggctggtggcatccggcccgctcctccctccgggcgccgcaacttttttcgatcggttttgcgccgcccgggacgggttgtagttgatcgattggattcttcataactgtatttgcgtactgcttacactacccaagtgaaatcgaaaatggcgccttctctcgttgaataaa

SEQ ID NO: 1222 - DNA, 1420 bp, Zea mays
cgcaacagaaaaaggaggcggaaagctttgcgaacgaccatggagatggatgattcattttccaaaaggtgcctgacagatatataaactgataatagcaggtggagtcatttctaagccattgcgtgtgtgtctgtgcaactgtgctgcatccaagctaagaccaagatcatcgtcattcgtcagagccttcctaccggcaaccaactccaacgaaagccgcctcaccaactcccagcggttgcgatgtactgtctgtcacatacatgccatggatataaaggggcattggcttgggatcacctctgcatctcgcctgggatctgctagcttgatctctcctagtcctagcccattcgcttctcctgttcgtcgctcttaatttgcttgctcgatccctggcagtggcagctgctgcaatggcttccggtggcgcgtcgtcactggccttggccgcgctgctcctcgtgagctgcgcctcggcggcggtggcgaccaagtacaccgtcggggacgcgtccggctggacgaccaccggcgactacgccacctgggccagcggcaagaagttcaaagtcggcgacagtctcgagttcaaatacgccggcggggcgcacacggtggacgaggtgagcgcggcggactacgccgcctgctcctccagcaacgcgctcagcaccgacagcgccggcgccacgaccgtgaccctcaagacggccggcaagcactacttcatctgcggcgtggcgggccattgcagcagcggcatgaagctcgtggtggacgtggccaaggcggtggccgccccggcgccggccccagccgcggccgcggccccggctccggccgcggacaccgccccagacgcccccgacaccacgccgtcgaccccgacgtccccctcgagctccggcggccgcacgcccaagagcccagacacgacggtcctctcgccgccggacaagaagtccacctcctccggcgccaccgggctcagcgccgcggcgtgggccggcttgggccttgccgggctcgtggccgtgcacctcggcgcgttctaggccagcccgctggcctggccagggaggagacagtgccgtgtgctgttgttaggctgcacgtcatggattggattggtgtattggttgagggacttgactgcttaccagagagagatctcttttggttcagggaactgtgctgtagacctgtagttggataccttggatgttatgctatcagttttgctgttgttatcacatctctttcgtgattttcttttcgatattgtcccgtgtatgttggagacttggagcattattttcgtgatccgcttgaacgaacaacctccgccatgataccgatgatagaagcgaggcgacttttgcaatgaaaaaccaaaggccaaggtgagtcactt

SEQ ID NO: 1223 - DNA, 2059 bp, Zea mays
accggaccggctcaccagcgcaagcgacacccagcgccgcggctctataaagccgcaggcgcgcggagcggaggtcgcgagagcaaaattcactgctccctgcccgtcgaaccagccgagcaagccaacgcaaacccagcgagccgcggcacctcgtcgcgcgcgccttgcctgtccgcttcttcgtccgatcgtccgccggtccgagccgagccccccgaagtatggcggagcccgcggcggcggggaggaagacgcgggtggggccgtacgaggtcggcaagaccatcggggagggcagcttcgccaaggtgaagcacgcccacgactcccgcacgggcgccgtccgcgctatcaaggtgctcgaccgcagccacgttctccgccacaagatggtcgagcagatcaaacgggagatttcgactttgaagctaatcaaacatcccaacgtggttcagctgcatgaggttatggcgagtaggacgaagatatacatggttcttgaatttgttgatggaggcgagttattcgataagatcgtcaattctggaaggctaggagaggatgaagctaggatatactttcatcaacttataaatgcggttgattattgtcatagccgaggagtgtaccatagagatctgaagccagagaatctacttctggactcacatggaacccttaaagtttcagactttggcctaagtgcatttgcaccacaaacaaaagaggatgggcttctgcatactgcctgtggaactccaaactatgtagcgcctgaggtgctcgctgataaaggctatgatggtatggctgcagatgtatggtcctgtggcataatcttgtttgttcttatggccggatacttacccttcgatgatgccaatctgatgagactgtacaaactgatctgccatgcaactttttcttgcccaccatggttttcttctggagcaaggaagtttattaagcgcattctcgatcctaaccctgataccaggataaaaattgcagaaattttggaagatgaatggttcaaaaaaggctataaaccaccacattttgaacaaggcgaagatgttaaccttgacgacgttgatgctgcattcaatgattcagaggaccgtcttgtagcagagaaaagagaaaagccagaatcaatgaatgcatttgctcttatttcgaggtcacagggcttcaaccttggaaatttgtttgagaaggagatgatgggaatggtaaagagggaaacatctttcacgtctcaatgtacagcacaggagatcatgtcaaaaatagaggatgcatgtgggccacttggtttcaacgtgcggaaacaaaattacaagatgaaattgaaaggtgacaaatccggaagaaaaggccacttatctgttgcaactgaggtttttgaggttgctccttcacttcacatggttgagcttcgtaaaaccggaggagacacattggaattccacaatttctacaagaatttctcatcagagctgaaagatatcgtgtggaaagctgaatctgatgcaagtatgaaacagacgaagtgacacccagggaatctgtgtaacttatgatgtcacattgtgagatagaccaccacctcgggtgataccgcttgtttggtactgtatgttttttttactggtaccacattggcaatcaatctcgtgtacagagctccttctgaatgagcgcagctgtacacgagacatgaagaggccctccctgagatgctccaaacgttgcaatggaactaaaaatttgtataaatgggtccttggcgtcctaccaatcgggcctgctgcaggggcaaccactagcggaggagcggcaggtccccttctctattgtatagagcaccgactttctgtagtttctactgttgtcacttttacaaaaacaaattttttttctaatcgaccacggtcaagcttcccatcctgtctccctcgcattcccttataatgtgtttggttggatgtacatgaagggatggaatgaggcaggcacagtttatatagtgtttaaaagagttatgtagggg

SEQ ID NO: 1224 - DNA, 3250 bp, Zea mays
aattattggtcgccattgttgtatttgtatgggcggccaactgttggagatagactgacgggcatgctacagtgttggtggcgttcgcagcagtcttgtccgatcatcaatggataccaccaacccagtagtagctgtgacttgcgacgagtgatggagcgtagcgcggctggagtggacgtacgcccggcttctcgtcttcgtccggggcgagccgagtccccctccctggctccctcctccttgccgcggcaccctgcatcgcgacgtccgcgaggagacttggcaggcgcggcaatccgcgtgttcttggggagctgctcgtttggtacgcgttgatgctgctaaaaaagattcttcactgctcggggatttggaacaaaggccgtggttcgaagctggtgtgttcgttcaattgtgcggaaagaaaggccagtgttatgtgtgaagtagtgaaggctagcaggtaggctggctctcgcctcgccgagcgatggatctcgagttcggtaggggcctgaggtccccaaaggtatgtgtgtgtgtttttgctaccccaaaattttcccgaggtggatggagcagcaatgcttgctgaatcactaggccgtctggggttcttcttcttgcagagagactcgtggaagaccaccttgctgctggcgtaccagagcctgggggtggtctacggcgacctcagcatctctccgctgtacgtgtacaagagcaccttcgccgaggacatccagcattcggagacgaacgaggagatcttcggcgtgctctccttcgtcttctggacgctcaccctcatccctctcgtcaagtatgtctccgttgtcctgcgagctgacgacaatggcgagggaggaacgtttgccctctactctctgatttgcaggcacgccaatgtgagcctcctcccgaaccggcagatcgccgatgaggagctttccacctacaagctggaatgccctcctgaaatcaccgacaagtcccgcatcaaggtgtggcttgagcggcacaggaagctgcgcgtcgctctgctggtcatggttatgatcgggacatgcatggttatcggggacggtgttctcacgccagctatatccgtgttctcggcagtttcaggcctggagttctcgctgtccaaggatcaccgtgaatatgctgtcattccaataacctgtgtcatattagcattcctatttgccctccagcactatggtacgcaccgggttggatttctgttcgccccgatagttctagcctggctgttctgcatgagtgctcttggcctttataatatcatccactggaatcctcagatctaccaagctctaaatccgtcttacatgttcaagttcttaaaaaagactagaaaatatggatggatgtcacttggtggaatcttgctctgcatgacaggatcagaagcaatgtttgcagatcttggacatttctcatacagtgcaatccagcttgctttcacttgtctagtttaccccgcactgattttggcatacatgggtcaagctgcttacttatcaaaacatcatgacttttactctagctcacaagttggattttacatcgcagttccagataagatcagatggccagtgcttatattggcaattttggcttcggtggtcggaagccaagcaatcatcagcggaacattctcaatcatcaaccagagcctgtccctgagctgcttccctcgagtgaaagttgtacacacatctgagaaaattcatggccaaatatacatccccgagatcaattggttgcttatgatcctctgcattgctgtgaccgttgggtttagagatacaaaacacatgggaaatgcatctggtttggctgtgatcacagtgatgctggtgaccacgttcctgacatccttggtcatcgttctctgctggcacaggccaccgctgctggcgttggctttcctcctgttctttggatccatcgaggcgctttacttctccgcgtccctgatcaagttcctggaaggcgcgtggctccccatcctcctggcgctcatcctgatggccgtcatgctcatctggcactacacgaccatcaagaagtacgagttcgacctgcacaacaaggtgaccctggagtggctcctcgccctcggggacaggctgggcatggtccgcgtccccggcatcggcctcgtgtacacagacctgacgtcgggcgtcccggccaacttctcccggttcgtgaccaacctcccggcgttccaccaggtgctggtgttcgtgtgcgtcaagtcggtgccagtgccgtacgtattcccggcggagcggtacctcatcgggcgtgtcggcccgccgggccaccgctcgtaccggtgcatcgtgcgctacggctaccgcgacgtgcaccaggacgtggactcgttcgagacggagctcgtggagaccctggccacgttcataacgctggacgcctcgtaccgctgcagcgaggccagcgagcgggagctggagctggatcccggggagcaggagcggcggctgaccgtgatcgcgagcaacccgctgcggcgccgcgccagctacgacctccaggacagcgtgcagcattcggcagcgtccaccgtggaggtgcgcgccacggccgccgacagccttagccccagggacgcggagatcagctcggcggcggggccgaagcaggtgcggttcttcatcgacagccacgtggtgagcccggaggccgcggagaacaagcaggttgcggatgagctggaggcgctggcggcggcccgggaggccggcactgcgttcatcctggggcactcgcacgtgcagtgcaagcccgggtcgtcggtgctcaagcggttggcggtggacgtcgggtacaacttcctgcggcgcaactgccgcggcccggacgtcgcgctgcgcgtgccgccggcgtcactgctggaggtcggcatggtgtacgtgctttgattgaggctgagacgatgcgactttttcttatgaacatctgatatagtaatcacgactgttgtcagttttcccagtaacataatgaggccgttctgtatagcttagcttgttcgtacttctacagctgcaatatatagagtcaaaatactgtagaattagtaggagtcggtaacgaactctgtgtgcacgtctgtgcgtgagcgtgtgcgtttcaggcccagtttggttttgcttttggacagcatcagtctgtgcgttttaggcccagtttg

SEQ ID NO: 1225 - DNA, 3556 bp, Zea mays
ccctcacatccacacaacgcagcaaaaagcgtccctaaaaatctcccaaaagccaaaccacacccggtctccgcctccgtctctgcctcctttcccctcgcttcctcgccggctgggatcttgcggcagctacgctcgctagctctcctccaacccgccgtcggctccctccgattccagtcccgtcctgtctcgccgcttcctggccccccgcttctcacgcggagaccggtcggatttcccacctcaaacatcgccggttttatccactcccgcagacctcttcctcagggacgggattggattggtggtggatcttctcctcaggggaggcacaagatccgttcatcatcctcgtcgcctaaacttggccgctcccgctcccacgctgctgctccaccctcgccgctactagaccagaccacggaggaggagacgaagcgccatgaggcggggagccaccaaggacgacgccgcgcccgacaaggtcatgggccctctcttcccccgcctccacgtcaacgacaccctaaagggcggacctcgcgcgccacccaggaacaagatggcgctctacgagcagttcagcgtcccctcccaccgctacagcgccgccgtaccgcccgcgccttccccagcgcctccatggggcgcgcaacgacccgcctccgcggtcccgtccacgtccgccagccaggttggcggcggcgatagacctatcttcccattatttcgtgtgccttcaactgaacctgttcgttcatcagatcagacgaatgccaactccaatggccagggtgccaatggtacaatagctgaatctgggaggcagaggcagtccacacatcttaagagcaaggatactaatgctgcaggaccacctgccgagggtaataattccgttgggaagaaattggctaatgatgatgattttacagttccctctgtcttgtattctggaatgcctccgcattccagccaagaaaagctcactctcttccctaccacaagcccatgtaagagtgtgcctgcaaaatattctagcactgacaagagacgcttagaaggaatggatgcttctgatgtgaaatcgaagggtccctcaggtatcaaggagaaagagccagtacaagtgaggatagacttggaagacaaagagacaactccgtcatttcaagtgctaaacgacaaaacatggagtccagacccaaagttatcttcgcacatggacaggctgaagaagcaacatgctgaagctgagagttatcagataaggaccaggaatgagaatgctgtcgagacccaaagccctccaaaaaatggagtgtcgttgttgtctaagccatatgttgataggagggaacagaatggtgattctgatctattggggcatggcctaagagagacaggtgtgaagaggaaaagatcacatcatgacgtggagcaaaacgatgatctgtctgattcctctgttgaatctttgcctggaatggagatttctccagatgatgttgtcagtgctattggtcccaagcatttttggaaagcgagaagagctattgtcaatcagcagagggtatttgctgttcaagtattcgagctgcataggttgatcaaagtgcagaagttgatcgctgcatctccacatgtacttattgagggggatccttgccttggcaaatccttggcggtgagcaagaaaaggctggctggagatgtggaaacacagcttgaatcagctaaaaacgatgatggcgtgcgaccaacgcagctagagcactcgaaagagaagactgaagcgaaccaaccttcaccatctcaagacgaacaggccgcaactaatggtgacgttgctgcctcgatgcataccccttccgacaacaaacagaagagctggtgcattcctgcacctccaagtcagtggctgattcctgttatgtccccgtctgaaggacttgtctacaaaccttataccgggcactgccctccggtgggaagtcttttggcgcccccattttttgccagctaccccacctcctcctcctccacagctgggggggatttcatgagttcggcatgtggagccaggctgatgagtgcccctgtgtacttcccgtctttcagcatgcctgcagtgtcagggtctgcagttgagcaagtgagccatgttgcagcgtcgcagcataaacggaactcgtgtagtgaagcggtgttggcatcaagggacagcgaggtgcaaggcagtagtgctagcagtccggcatcttctgaaacagcagctcaacccagggtcattagggttgttccccacacggcacgcacggcttcagagtcggcagcaaggattttccgctcaatacagatggagaggaaacaaaacgacccgtgactggcagataaaaatgaaagaacggagggagtagactaattttttgaccgataattataatgatcgccgtaaattggctggcccgcccgccttatgttttttgttcagtgtaaatatgctgtgtctgtcagaatgatatggcatctgtagctattttggttctgtcagaatcatgttgattggaattcgtcggtcggttgagtaggatgaaaattgggcacagcccatacgtctacagcaacgtcaaataaaggaagagaaagcaatacatcaccaacaccagaagcagatttttattttatttttattactgtgagtggagtggagtggctcaaccacatgatagatagatagatacatcagcaccatgctccttcctagtgacaggccacaacaagcatttcccaaagcaaatgcattggccacaaaaggcacccagctagggcattctcagcgcctcgttgatcctgctgaaaacgactcggagcgggatgcacgcgatggtcgcccccgacgccgctcctcgcgtctttctcgacgacgaggtcactgcccctgcccctgcccctccccttttggcatgcggctgccataacctgtccacctcttctttctccaacgctgatgatggcacggcgcgctgaaaacgactcgtagcgggcagctggacatctctccttgatgaaggacagccaaacagatcatcgctgacctccaccgagactggataccccaccacgggtttacagttcaacctactcataagagagacaaggggcacacggcgccaagtgttgctgctccccagcacactcaactccacatcataaaggctgggattcaaatgcagtggcttttcaaacaccactgacgatactgaaccactctcacagttcgaatggctgcttaaggtttctaatgactcctcaggaccacacttgcttttacagtgttgctgctgaaccgtgccaacacaatccataccactaggaactatggcaatatgcattttagtatcatgttcagccggcttgttcttattcaatgaacgcttctccagcctattctccaaaaggacaacctcatcatctcttgctgcttcgtgctttcctgtctttgttttctggcagccatgatcattattagaatctcttgtcctgtccttgc

SEQ ID NO: 1226 - DNA, 2919 bp, Zea mays
ctcgccgcgcgtttgctttcccgcccacgcagggatcttcgcgagcggggagttgaagcgcgagatttgcgcggctacgattctgcgttgccgagggagcaagggaaccaatggctgcagcggtggcgatgcgagggggaagcagcgacagcggaggatttgacaaggttcccgggatggactcggggaaatacgtgcgctacaccccggagcaagttgaggtgctcgagcggctctacatcgattgccccaagccaagctcctcacggcgccagcaactgctgcgcgagtgtcctatactctccaacattgagccgaagcagatcaaggtctggttccagaaccgaaggtgccgcgataagcagcggaaggagtcttcgcggcttcaggctgtcaacagaaagctgacggcaatgaacaagcttcttatggaagagaatgagcgtcttcagaagcaagtctctcagttggttcatgaaaatgcgcacatgcggcagcagctgcagaacacttcattggccaatgatacaagctgtgaatcaaatgtcactgcccctccaaacgctataagggatgcaagtaacccttctggactccttgcgattgcggaggagaccttcacagagttcctctcaaaggctactgggacagctattgattgggtccagatgcctgggatgaagcctggtccggattcggttggtattgtggccatttcgcatggttgccgtggcgttgctgcccgcgcctgtggtttggtgaatctagaaccaacaaaagtcatagaaatcttgaaagatcgtccctcttggttccgtgattgtcgaagtctggaagtgtttacaatgtttccagctggaaatgggggaacaattgaacttatctacatgcagatgtacgccccaacaactttagttcctgcacgtgacttttggacgttgcgatacacgacaacaatggaagatggcagccttgtggtctgtgagagatccttgactggttctggaggcggtccaaatgcagcttctgcacagcaatttgttagggctgagatgcttccaagtgggtatttagtgcgcccatgcgaaggtggaggttcgattgtgcatatagtggaccatctagatctcgaggcatggagtgttcctgaagtgcttcgaccactatatgagtcttctagagtagttgctcagaaaatgactactgtggcactgcgccaccttagacaaattgctcaagaaacaagtggagaagtagtgtatgccttgggaaggcaacctgcagttctacggacctttagtcaaagactaagcagggggtttaatgatgccattagtggtttcaacgatgatggttggtctgtaatggggggagatggcattgaagacgttgttgttgcttgcaactcaaccaagaaaattaggaataatagcaatgctgggattacatttggagcgcctggaggcattatttgtgcgaaggcatccatgttactgcagagcgtcccaccggcagtactggtccgatttctgagggagcatagatctgaatgggctgattacaatattgatgcgtatttggcttcatcactgaagaccagtgcgtgctcacttcctgggttgcgacccatgagattttctggggggcagatgatcatgccacttgctcacacagtggagaacgaggagattcttgaagttgtccgccttgaaggacaacctcttactcatgatgaagcccttctttcaagggacatccaccttctccagctttgcactggaatagatgagaaatctgtgggttcctccttccagcttgtgtttgcaccaattgatgagcattttccggatgatgctccattgatttcctctggctttcgtgtcataccacttgatatgaaaacagatggtgtatcctctggtaggacgctagatttggcatctagtcttgatgtgggttctgctgcaccccaagcctcaggggatgcacctccagatgactgtaatttgagatctgtgctgacaatcgcctttcaattcccttatgagatgcaccttcaggacagtgttgctactatggcccgtcaatatgtgcgtagtgttgtttctgctgtgcaaagggtgtcgatggctatatctccctcccaatctggtctaaatgctgggcagaggatgctttctggcttccctgaagctgccacacttgctagatgggtttgccagagttatcactaccatctaggtgtggaattactcaatcaatcagatgaagctggtgaagcattgttgaaaatgctctggcatcatccagatgctgttctgtgctgctcttttaaggagaaacctatgtttacgtttgcaaacaaggcagggctcgacatgttagaaacatctcttattgcgctgcaagacctgacgctagacaagatcttcgacgagtcaggaaggaaagcaatattctcagatatctcaaaactaatggaacagggctacgcgtacctgccgtcgggcgtgtgcatgtcaggaatgggtcggcatgtctcattcgaccaagctgtagcgtggaaggtgctcggcgaggacagcagcgtccactgcctggcgttctgcttcgtcaactggtccttcgtttgacacgccatcccatggcctgtgtgatgagcaggccaatttttttgtatggtgatcccaatatggggaaaccatcagctgtgacagaaggctttatgttgcatgcactagttgtacgtcttgaatcgagtgtatttatgaagaaattggatactgcgcaaagtctggtgccacttacgtttgactgcctgcccggcaacaggctgtttgtctatctcaccggccaaccgaaacgatgcttattccattcagatgttacttgctgatgttaaggtatggttcaaaccag

SEQ ID NO: 1227 - DNA, 3547 bp, Zea mays
cttgattcctcttgccggggttccttggcctgcctatccttgctaatcgggcgggccagtccgccgcctgcagatctgaacgctgccctcccctgctccccgagcgcggcgaggatcgccgctccacggacgcaagaacaagtgcccttgatcttttccccccatttgattgattcatccagtgctgctggtactggtacccagcaacagttttcggtaggaaactactatggcaacttctccaggtacatacagatggtgctagtgagggagaggtccgcgagccgtcgccgccatttcggaccaaccaaggcggcgctagtatgcttctgcttgctttccttctacctggacactactgcaatgccgtcaacgtcattgtaaaccgtcagtgctagccacatggtaacgctagactgcgaaagttgcgatctttttctcgcatctcctcggcaacttgccaatttggtcagcatcgtcatcaccaccaccatcagcggcgcagctgaactgacgatgctttgcccgagatccggatgctcatccagatcgagacgccattcatctccccccccccccccccccccccgccgtgcggatgcggtggctcctcctcttggcgttcgccgccgcccccgccgccggcgagatggggtacgcgcattgcggctgcgacggcagcggcggcgctggcggtggaagcgggttctggagcctggacaacatcttcaagtggcagaaggtgagcgacctgctcatcgcggcggcctacttctccatcccgcttgagatcctctacttcgtcgcggggctccgccacctgctcccgttccggtgggtgctggtccagttcggcgccttcatcgtgctgtgcggcctcacccacctgctggcggccttcacctacgagccccacccgttcatggtcgtgctgctcctcactgccgccaagttcctcacggcgctcgtctccttcctcaccgccatcacgctgctcacgctcatcccgcaactgctgcgcgtcaaggtccgcgagagcctgctgtggatcaaggcccgcgagctggaccgcgaggtggttctcatgaagcggcaggaggaggcgagctggcacgtccgcatgctcacccaggagatccgccgctcgctggaccgccacaccgtgctctacaccacgctcatcgagctctccagggtgctcgcgctcgacaactgcgccgtctggatgccatccgaggacaagtccggaatgtgcctcacacacgagctccggcggggcagcgacgacggcgaggccgtagtgggcgctgacgacgcggacgtcctcgaggtcaagggcgccgacggggtcaagctgctgccgccgggctcggtacttggctccgccagcggcggcggcaaggaggggaccggcacggtggcggcgatccgaatgccgatgctcagggtcgccgacttcaagggtgggacgccccaggtgatcaaggcaagctacgccgtgctggttctggtgccgcccagcggcaggaagtgggcgccgcacgagctggagatcgtggaggtggtcgccgaccaggtggccgtggcgctctcgcacgcctcgctgctggaggagtcgcaggcgatgcgtgacaggctggccgagcagaaccgcgagctgctgcaggcgaggcgggacgctctcatggcgaacgaggccagggacgcgttccagcgcgtcatgagccagggaatgcggaggcccatccactccgtccagggactggtgtccgtggtgcaggaggaggagggactggcgtccgagcagaggctcgtcgtcgacgctgtggcgcggaccgcaaccgtcgtctcgacgctcatcaacgacgtcatggagatgtccgcggccaccagccaggagcgcttcccgctggagacgcggccgttccgcctgcgctccatggtgagggacgccgcctgcgtggccaggtgtctctgtgacctgagcgggcggtttggtttcgcggtgcacgtggagaacgtgctgccggaccttgtcatcggcgatgagcggaggatcttccacgtcctgctgcacatggtaggcaatctgatcggtcgggtcgacgagggggacgtcacgttccgggtgcgcgccgatgatgaggcgacggaggaccagaggtgggatccgtggaggccgagctactccggtgggcactcgtcggtcaggtttgtggtcggggtgaagaggcagcagaacgcaggcgactcgcttccgcggttcttgcggcggccaaggacccatgacgggttggatctcaggctcagcttcagcatgtgcaggaagcttgtgcagacgatgcaagggaacatctgggcagttctcgacggccaaggactcccggagagcatgaccctggtcctgaggttccagctccaaccatcgctggcgagctccaacctcctcggagggtcgtttgatcaggagcactactcatcattgccatctaaccaaatagccgggctgaaggttctgctcatcgatgacgacgagatcaacctggtggtggcccggaagctcctggagaggctaggctgcaccgtttcctcaggctcgggactcatggactcttcctctgcctgtgcctcgttccagctcgtcatggttaacctcgagatgtcagcgatagatcccctggatgctgcctcgaggatcaggcagcagtacaggagctcgcactggcccctggtgatggccatgacgtcggagcagaacgtgtgggagaagtgcgcgcagtccgggatcaacggcgtcctgaagaagccgcttgttctgctggaagtgaaagaagagctcgagcggatccttcagaacacatgatgcctgccatgacccatgagctactaccatgatgaatacgacccccgtccgtccgtctagcatactacatagcagaggggaggggacatggatctcgagttgagaagtggatgcaagtctcctacgctgctgtagttgagtgactgctgtgaggacggaggtggtgacgacgacggatttggcaggcaagcacgagggccgcgttatccgatccatgcccatgccgcgtaaggaggcttcacctcgattcaccaactacataatcacctcgattcacacacgtcaggctttcagtcgataaattcattagtttcatcagaaacggaatgcagttgccagttataatgttggcgtcagtcgcaggggatcttcggccatcgtcgccgcatcagaagcaatgcgcagctccagtggcctcgaccgaacaggacaagaaataggtctagttggatttcttttcgcctttgggtttttgttttaaaagaaagagaacttgattttccttaaactagaattctctgtcttccattatagtgcacccttttttatactcagattcaaaaccaaaatataaaagaattaagtagatctcaacttgtcatacttctcagcatatttgttatctatccacacttgttaaatctcattagtttcttaattatattattatcattgtgccaaaca

SEQ ID NO: 1228 - DNA, 2188 bp, Zea mays
gagagatcctcaggttgatgcgacgggaagattggcgggcggacacggacccaaccccacgtccccacccaacgcatcgtcctcgcgaacaaaaccgacgcgcccaccccgtcccggctccggctgtgtggctcaccttccactttcccccacctccaccatcgtgcctcagcatcagcactcgaatgccacgagactgacctctccctcgtcgccgcagccgcgatgcccgcaccgaccgccgagccggcgctcccggcggccttcctctgcgtcccgtccccgctcctctccacgccgctccccggcgctgcactctccgcctcccccgcgccctcctcccaccatgcctccttcctcccgcgcccgcgcggcgggccccgagcgctctccgtcgccatctccgtcccgggccccactttctccgtggcgtcgcggctccatcagatgtggggcgagttcgcgcggttcgtgcggctgcacgggaaccaaatagcgccgctcgggttcgcgtccatgggcctgggtttcggcggcggtggcggggataacgtcggcggtgggggaggagggggtggaggggatgtggatggggtaggcgaggtagaggaggccgcggcgcgggccgaggcgccaaagaaggtgctgatcctcatgagcgacacgggcggcggtcaccgcgcgtctgccgaggccatcaaggctgccttcacccaggagttcggcgacgactaccaggtatttgtcactgatctgtggactgaccacactccatggccattcaatcaactgcctaggagctatagttttttggtgaaacatggacccttgtggaagatgacatactatggtactgcaccgcgtgtagtccatcagcctcattttgctgcaacatccacattcatagcaagagaagtggcaaaaggtctaatgaagtaccaaccagatgtaattatcagtgtacaccctttaatgcaacatgtccccctccgaattctaagatcgaaaggtctcttggataagatcccattcgcaactgttatcacggatctcagcacttgtcacccaacatggttccataagcttgtcactagatgttactgtccatcaactgaggtggaaaagagagcactgaaagctggactgaagcccgcacagattaaagtctatggcctccctgtccggccctcttttgtcaaacctgttcgaccgaaggatgagctgcgaagagagttaggcatggatgaagatctgcctgctgttctattaatgggtgggggtgaagggatgggtcctattgaggccactgctaaagcacttggtgattctctgtatgatgaaaacctaggggaacccactggtcaaatacttgtaatttgtgggcgtaataagaagctggtcaatcgattgcaatccataaattggaaagttccagttcaggtgaaaggctttgttacaaagatggaagaatgtatgggtgcttgtgattgtatcattacaaaggcaggacctggtacaattgcagaggcaatgatccgtggcttaccaattattctaaatgattatattgctggacaggaagctggcaatgtcccctacgttgttgaaaacggatgtgggaagttctcgaaatctccaaaacaaattgcgaagatagttgccgactggtttggcccaaggtcagacgaattcagggtaatgtcccagaatgccctcaagctagcacgacctgatgctgtgttcaaaatcgtccacgatctgcacgagctcgtcagggaaaaatgttttgtgccccaatatgcatgtgcaacataaaaggccgtatcctctattttgtgtttgcttaatttttttaaccccatgcggcactagctatagctgattgtgaggattgcgaatattgattgatttgaaacgtttccgtaagagaaatgaaaaatgtattgaatgctctagtttaattttccgaaatactttttcaggctagtactgttgtgggtgctgcatgcagattgggttacgaacccaacccgatgaaattttcaatggattacttggacgacatggattttcttgggacatgtaggtaaccggttcattttgaacgcataagcataaataatgtgaagcgaggttgagtctaattagacctgattatgggctgctcgacccgctcaaaaaaaaaaaa

SEQ ID NO: 1229 - DNA, 3182 bp, Zea mays
gctttttaaaacccccaccgatgtcctgagattggaaagagggaagccgcaggcagcatctgcatctctcgcccacctccgctccgcctactgctgctggtggtagggaggcggagaaggaggcccttgcgcccgcccgccggccggatcagagccgtagcaaccaccacccatggcggacgtgcacgaacctttggtgcgccgtaagaggaagaaggttttggtggactacttggtgaagttccgatggatcctcgtgatcttcgtggtccttcctatttcaactctgatctacttcaacatcttcctgggcgacatgtggtccgccatgaagtcggagaagaagcgccagaagcagcacgacgagaacgtgcagaaggtcgtgaagcggctcaagcagaggaacccgaagaaggacggtcttgtttgcacggccaggaagccctggatcgctgttggcatgcgcaacgtggactacaagcgtgcgaggcatttcgaggtcgacctttcttccttcaggaacatccttgagatcgacaaagagaggatggttgccaaggtcgagccccttgtcaacatgggtcagataaccagagctacctgcccaatgaaccttgcccttgcggtcgtcgccgagctcgacgacctcactgttggtgggctgatcaacggttacggcatcgaggggagctctcacctctatggccttttctccgacacggttgtcgcgatggaggttgttctcgcagatggccgggtcgtcagagccaccaaggacaacgagtactctgaccttttctatggcattccctggtcccagggaacactggggttccttgtctctgcggagatcaagctgatccccatcaaggagtacatgaagctcacctacactccagtcaaggggggtctaaaggagatcgcgcaggcctacgcggattctttcgcgccgagggacggtgacccggcaaaggtccctgactttgttgaagggatggtgtacacagagagcgagggtgtcatgatgacgggcgtgtacgcttccaaagaagaggcgaagaagaagggcaacaagatcaactgcgtggggtggtggtttaagccctggttctaccagcacgctcagacggcgctgaagaggggcgagtttgtggagtacatcccgacgagggagtactaccaccggcacacccggtgcctgtactgggaggggaagctgatcctgcccttcggcgaccagttctggttcaggttcctgctgggctggctgatgccaccgaaggtgtccctgctgaaggcgacccagggcgaggctatcaggaactactaccacgacaaccatgtgatccaggacatgctggtgccgctgtacaaggttggggatgcgctggagttcgtgcaccgcgagatggaggtgtatcctctgtggctgtgccctcaccggctgtacaagctgccggtgaagacgatggtgtacccggagcctgggttcgagcaccagcacaggcagggcgacacgagctacgcacagatgttcacggacgtgggcgtgtactacgcccccggggcggtgctgaggggggaggagttcaacggcgcggaggctgtgcacaggctggagcagtggctgatcgagaaccacagctaccagccgcagtacgcggtgtcggagctgaacgagaaggacttctggcgcatgttcgacgcgtcgcactacgagcactgccgccaaaagtacggggcggtgggcacgttcatgagcgtgtactacaagtccaagaaggggcgcaagacggagaaggaggtgcaggaggcggaggcggccatactggagccggcctacgcggacgaggaggcctaaaagctcgtggtcgttttgcttagcccattttaattagaacttgatggatgtagtgtgtgtctgtctcaagtcattttaattagaactcttaaagctcgtggtcggtcggtcagtcagtcagtcattgtcgttgatgtccagcgttgtgttttttttatattctctaatggaatctctcagattgattcgggacttgctatggctctgctctttgttatgttttttttttaaagttctccaggcgctgctgctgcgtcttgcaaggagcccggagctgatgactagcagcagcagcagcttggaacggtgggaggcagcaccaccatggcaccatgtggctgagctgggctggcaggcacagtgagaaaaagaaagacaccagccatctactccccagtccccccacaagagcaaaagcaaagaaagatgcatgtgcatgtgcagtgcagcaactctgccatgctgtcatgtgggacggcacgggcaccagctgcactgcactgcaccgccccacagttatattgtttactgctgctgtgcccactccttgtatatttgcatcactgcctgcttctggaatcaggaaaggagatcaccacttcactcaagaaggcaccctcccttgccactccttttccttgagatgacgatgacgacgatgaagaagcagcagcagctcctcctcctcctttctctcatgtttctcgttgctgtgacagcagccgctgttgctgccgatccacatccacagcagcaggtgcaggtgcagcagcagcagcaagcacagatgaggattaacagggccaccagatcccttcttcctcagccgccgccgaaactagactgcccgtccacctgctccgtgcgctgcggcaacaactggaagaaccagatgtgcaacaagatgtgcaacgtctgctgcaacaagtgcagctgcgtgccgccggggaccggccaggacacccgccacctctgcccctgctacgacaccatgctcaatccacacaccggcaagcttaagtgcccctaggccttcgccactcatgttatgtacaatgtactatcatcacttcaataaataaataaaaaaacttctggttctggatgcctgtttctactcattctgcccattctccttcagaacgtgagatgctacactgcactgcggctctcctgaactcagaatcggatttgcacatctcaaaccaccactctgcctgcattacgagaggagagttaaggtacaagagtttccagaacgcgttgcattgattgatctagagaaccaactactacgtgtttaacaatgaacaataaaaca

SEQ ID NO: 1230 - DNA, 2773 bp, Zea mays
atatgaaagcgtaataaaaggaaaacgaaaggaggccgaaaaaaaggttaccatctttgcactgcatgagctccctccaatccaatctcccgttcaccttcctcttcccctctctctcacctccctcctattattattgggttcttcaccgtaccccacacacacccttctcccccaaccccatctctctctctctgcctgcgttctcctggtgctgctctcgctctcctcccctgctttgacctccccgcctttccccgccgtttcttggatttctaggatccagacaaccgcccttgtgagcctgccttcctgcctactacctgcgtacgtacaggagggtccttgcttgggtgatccgggtgcctggtttctcggttccgcggcttccgctgctgttggattcgccgagccggagccgccggagatgaccgtcgacgagctgaagctgcaggcgagggccagcggcggccacggcgccaaggaccagttccccgtcggcatgcgcgtgctcgccgtcgacgacgacccgacctgcctcaagatcctcgagaacctcttgctccgctgccagtaccatgtgacaacaacgggacaggcagccacggccttgaagctgctgagggagaagaaggaccagtttgaccttgtgatcagcgacgtccacatgccggacatggacggcttcaagctcctcgagcttgtgggcctcgagatggacctcccggtcattatgctgtctgcaaatggggagacacagacagtcatgaaggggattacccatggagcatgtgactacctgctgaagccagtgcgtattgagcagctgaggactatatggcagcatgtggttaggcggaggagttgtgacgccaagaacagtggcaatgacaacgatgattcgggtaaaaagttgcaggtggtgagcgctgaaggtgacaatggcggtgttaatcgcaacaagagaatttcacgcaagggtagggatgataatggtgatgacggtgatgattctgatgacaacagtaatgagaatggagactcgtcgagccagaagaagccaagggttgtgtggtctgttgaattgcaccgaaagtttgtggctgctgtcaaccagcttggcattgacaaggctgttccaaagaaaatattggatcttatgaatgttgagaacatcacaagggagaacgttgcaagtcatctgcagaagtatcggctgtatctgaaaagactcagcgcagatgcaagcaggcaggctaacctaactgctgcatttggaggaagaaaccctgcttatgtgaacatgggactagacgccttcaggcagtacaatgcatatgggagataccggccagttccaaccactaaccattcacagccaaacaacctccttgcaaggatgaactctcctgcatttggtatgcatggtctgctgccttcgcagccacttcagattggacacaaccagaacaatctgagcacttccctagggaatgtcggggggatgaacaacggcaacctgatcaggggtgcgcatatgccactgcaggatactagcaaatgctttcctactggcccttctggtaattcgttcgcgaacatatcaaacagcacacaactggttacgacaaacaacttgccattacagtctcttgagccaagcaaccaacaacaccttggtcggctgcattcctctgcagaccctttcaactcatttgttggtgagcccccccagtttgcagatcttggaaggtgcaacaccacctggccaaccgcggtctcatcatccaatgttcaggagattggccagaaggacaggatcgtgaataggcccaagcttgagcctctctcaagctttacagaagcatccagtcagatccctttgctgggaagtgaaatgcagagccaccaagtagcatcactagccagcaacggtcttccgatgccgttcactcaggaagcggtgcccttcgcttatggaagcagcacgaactcgagagagatgctgaataacaaccttgcgcttagtaattcaggcgtcaactctacattgccgaaccttcgcatagacggttctgttgttccagggcagacactgggtggtagcaattcaggtggttgtgttgtcccccctctgcaagatggcaggattgatcaccaagctgtcagcagtcatctaaactacaacaacgaactcatggggacaggtaggctgcaaaggggacttagtggtggtctggatgacattgtcgtggacatgtttaggccggtatggtcctatacatctttttttttatattcgagagtagttagcattacggccccgtatttttatgtgaaccatgcgtttttttttcaatgcaggaccgcgcagacgatggcgtctccttcattgatggggactgggaactggtctagcaagtttcagttctctacatcaagtctgccttcgtgtgagattttccgcatttgtggttgtggaggggttcggcgcttgattggtccaaagttgtttatagtagcaagattgcatcacaaatgccctttgcatttggtttttcagtttagcgaccaggttccagtgtcacgtccgaatatcaactatgtggtatttgctaccttaactcgtatggctatgttttcaagtcaggtgttaactgtggctatcgtgatatatacagcatggttatgagccaaggaatgctgtcctgtttcctcttggaaatcgttttgctgttccctttgttgattgtcactggcaatctgttccaga

SEQ ID NO: 1231 - DNA, 1535 bp, Zea mays
tcctcgtataaaaccaaccatgtgacccctcccctcccctcccctgcccgggtgccggctccctgcctccgttcttctgttgtccacgaaaggctcgcactcgcgccggtcgttcgctgcagcacacaacgcaatcgccactgtcgtcgctcgtcagtccaccgactccaccgccaccggcagaaccagaacacatcgagcggcatcggagcgcgaatctgtgcggcggcgtcgcctctgccgggcgggtgggcggcatggggaggtccccgtgctgcgagcaggcgcacaccaacaagggcgcgtggaccaaggaggaggaccagcgcctcatcgcctacatcaaggcccacggcgagggctgctggaggtcgctaccaaaagccgcagggctgctgcggtgcgggaagagctgccggctgcggtggatcaactacctgcgcccggacctcaagcgcggcaacttcagcgaggaggaggacgagctgatcatcaagttccacgagctgttcggcaacaagtggtcgctcatcgccgggaggctgccgggcaggacggacaacgagataaaaaactactggaacacgcacatcaagcggaagctgctcgcccgcggcatggacccgcagacccaccgcccgctggccgcagcgccagcaggagggccgcagcagcagcattgccattaccagatggagccacagaagcgggcggcggcggcggaccattccgaggccgccgttgccaccaactcgccggaggccagcagccgcagcagcgacgacgacgaggcgccggcgctggcgccaccgccgcggcggcggcagcgccacctcgacatcgacctgaacctgtccatcagcctcgcggcctaccagccgccggagggaaccggcagcgccatcgagccactgacggcgacgacgaagcgggaggagggaacggcggcggcggtgtgcctctgcctcaacagcctcgggtaccgggcaggcgtcgagtgcgcctgtggcagcggcggctcgccgtcgtcccgttcgcagtgggctcgggattttttacaggcggcgccctgctacagaggctagcattgatcagtgagacagtgacatgatcgggagggcttttactgaggggaggggcagagcagatatagttaactagtagtactattagtaaaaaggcaagcgtgcttagtaggctttagcagctcatgcattgcatgcatcatgggttatttacgaggagatgtgctctttgtcttttgtcgattctggctctggcctcggacacagactgatcgatcatgccttggcgacatgacatgcatactgtagagtggtttagtcgcagcatgcgtgcagttcatgacttttgtgctaccacatctaccagcttcttttttaaaaaaaactaattggtctgcctttaaaactagacatggagtaggttcccatctttccttccttcaagttaactaggtggatgcccgtgcgttgccacgggagttaaaatttagtataaaacatagatacaga

SEQ ID NO: 1232 - DNA, 1733 bp, Zea mays
ctaaccgtctaaccgcgcccctgatcggggggctatcctaaccgttggttgcagcccccggtcacacgacgccataacgtgtgctggaagtgaaagaccatccaagttgctccaggccctatatatatatgtgcaacccctacaacagccgtagtcagaccatagctaagctgagagcaaagatgtcttggcggcgaaaccagctacgtgcgtttctcgttctcgccgtcatcctcctcatcaccgcagctacctaccgagccaatgcgcagccggcgcctccagcagacccaacgccagccgctgacacctgcgccgaccccagcgtggaaggggcgtgccgcaacgtcccgaaggcgctgcgcctgaagctgatcgccatcccgacgatcctcgtctccagcgtgatcggcgtgtgcctgccgctcttgtcccgctctgtgcccgcgctccgccccgaccgcaacctcttcgtcatcgtcaaggccttcgcctcaggcgtcatcctcgcgacgggctacatgcacgtgctcccggactccttcagcaacctcacctcgccgtgcctgccgcggaagccgtgggccgatttctccttcaccaccttcgtcgccatgctcgccgccctgttcacgctcatggtggactcgctcatgctcagcttctacaaccggaggaagggtggcaacacctccggccgacgcactagcggcgcggtcgccgaccacgagagcccggcgcatgagcaccactggcacagccacggccatggacatggacatggacatgctgggggcatcgtggtggctgacaagcccgaggacgatgaggccagccaggtgcagctccgccggaaccgcgttgtcgttcaggtcctggagatgggcatcgtcgtgcactcggtggtgatcgggctgggcatgggagcgtcgcagaacgtgtgcaccatccggccgctggtgacggcgatgtgcttccaccagctcttcgagggcatgggactcggcggctgcatcctgcaggcggagtacggcgcgaagatgaaggcggggctggtgttcttcttctccacgacgacgccgttcgggatcgcgctggggctggcgctcaccaaggtgtacagggagaacagccccacggcgctcatcgtggtgggcctgctcaacgcggcctcggcggggctgctccactacatggcgctcgtggagctcctggccgccgacttcatggggcccaagctgcagagcagcgtcaggctccagctcctctgcttcctcgccgtcctcctcggcgccggcggcatgtccatcatggccaagtgggcgtgatcgtattcgtatctgagacgacatgacacagtactgttacaccaacactgcctgcagtctagctatctgcaagactgcatcgctgcatgcatgttcctcctatagctggctgttgtatcatttcgcgtgcttcgttgctccgtgcgcttccgtgtcgccatcaggaagctaggtatatattagacgcagatagcgttgttgtcatgactattcaacgtccacggtacaatacaaaagtagtactctatctatgtattaactatgttcttaaatatttgtcgtggtaaataaaaaaacaatataaatagtactctacctatgtactatctcagttttcaaatatttgtcaacgctagttcatttttattctaaaacgcgataaataaaaaagaatggagaggtaca

SEQ ID NO: 1233 - DNA, 3295 bp, Zea mays
gcacaaacagagactagtccaaagcaccataacgagagagagggagagagagaaagagagaaaaaaaaacactcggaaacgatccgcgaactagtccaccggcgatttgttgttttgttcttcagtgcgtcagccaaccttaactgctacgatcggtcgatcaagggggaggaagtttctggagctctgcccatggcgtcggcgatgaagctgctggggagatcttccttggcgagccctgctgccgcggcgcccggacgggagcggcgaggcgggccctgcttcgccgcggtcggaagggaggggagcgcgcacaggaggaggtcgtcgctgaggtcgaccgcgccggtgggcgcgctggccgagcgggtcgtggtgacgccggcgccaccggagagggccggggcgggccccccggagccgcacccccagagcgtggccgcgcgggccgtggtcaccgtgcggcggaggcggaaggaggacgccaagcgccgggtcgccgagcagctggacgcgtacgccgaccgggttggccgcagtgtcctcctcgagctcatcagcacggagaccgacccaagaaaggggggccccaagaagagcaggcgctcggcgctggtgggctggttcgagaagaaggacgtcaagacggagcgggtggtgtacacggcggacttcaccgttgacgggtccttcggcgagccgggcgcggtcaccgtgctcaaccggcaccagcgcgagttcttcatcgagagcatcgtggtggagggctttccctccggccccgcgcacttcacctgcaactcgtgggtgcagcccacccgcgtggaccgcaacccgcgcgtgttcttcaccaacaagccgtacctgccggccgagacgccgccgggcctgcaggagctccgccgccagcagctcagcgacctgaggggcgagggtgccgacaccggcgagcgcaggatcaccgaccgggtgtgggagtatgacgtgtacaacgacctcggcaacccggacaagggcgccgagttcgcgcgcccggtcctcggcggcgagcagcagctgccgtacccgcggcggatgcgaacgggccggcccaagaccatcacaggcaagcctccgctttcccacgaccgcgcggagagccgggtggagtacccggagcccatctacgtgtcccgggacgaggagttcgaggacgggaagaacgagatgctgtcggagggcgcgctcaaggcgctgctccataacttcatgccgctgctggtgagctccgtgtcgcctgacatccgcgacttcgccggcttccacgacgtggacaacctcttcaaggagggcctccgcctgaagcaggccctgcaggaccagctgttccagaagatccccttcgtgcgcaagatccaggagaacagcgagggcctcctccgctacgacactcccgacatcatcaagagtaagccagcgcccatgcgccttcctcctcctccgtccatgatccatggagaggacaagtttgcttggctgcgggacgacgagttcgcgaggcaggcgctggctggcatcaaccccgtcaacatcgaacgtcttcaggcgttcccgccgatgagcaagctggacccggccgtgtacggcccgccggagtcggccatcacggaggagcacatcatcggacagctcgacggcatgtcggtgcagcaggcgctgcaggacgacaggctgtacatgctggactaccacgacatcttcatgccgttcctggaccggatcaacgcgctggacgggcggaaggcctacggcacgcgcacgctcttcttcctgacggccgcgggcacgctgaagcccatcgcgatcgagctgtgcctgccgccgatgaccgacgggtgcgcgcgcgccaagcgggtgttcacgccgcccgccgatgccaccagcaactggctgtggcagctcgccaaggcacacgtctgctccaatgacgccggcgtccaccagctcatcaaccactggctgaggacgcacgcggccatggagccgttcatcatcgcggcgcaccggcacctgagcacgatgcaccccatcttcaagctgctcaagcctcacatgcggtacacgctcaagatcaacgcgctggcgcggcagatcctcatcaacggcgacggcgtcatcgagtccgggttcacccctggccgctactgcatggagatgagctcgttcgcgtaccgggagctctggcggctagaccaggagggcctccctgccgatctcatcagaagaggaatggccgtggaggacccgacgcagccgcacggtctccggctgctcatcgaggactacccgtacgccaccgacgggttgctgctctggtcggccatcaggcggtggtgcgacgcctacgtggccatgtactacccgtccgacgagtccgtgcagggcgacaccgagctgcagtcgtggtacagggaggccgtgcacacggggcacgcggacaagcgcgacgcgccgtggtggccgcgcctgtcgacgcccgcggacctggcgtcgctgctgacgacgctgctgtggctcacctcggcgcagcacgcggcgctcaacttcgggcagtacccgctgggcggctacatcccgaaccggccgccgctgatgcggcggctggtgcccgccgagggcgacccggagtacgcgcacctggtggccgacccgcaccgcttcttcctgtcggcgctgcccagcctgacgcagaccaccacgttcatgaccgtcatcgacacgctgtccacgcactccgccgacgagcagtacctcggggagcggcctgatgaggcgtggacggccgacccggcggcgttggcggccgcgcgcgagttcgcggacgaggtgcgccgcgccgaggaggagatcgaacggcgcaacgctgacactggccgccgcaaccggtgcggcgctggcgtgctgccgtacgagctcatggcgcccacgtcggggccgggcatcacctgccgcggcgtccccaacagcgttaccatttagcctctcagtaccgacagacagccatgggcgcatgacagagatgatctgaaaggagaatttttttccactcattatagtcgggtggggagaaatctaagcagaagcaaatgaattttgcattatttctccccccattgccaaattgccattgatttggtggtccgaacaggtaaaatttgatttttgactaggggcaagactgtgaggaactgaatgggtgtaaataatttgttatatacaaaaatcaatggaatataatcattatagagttctctgg

SEQ ID NO: 1234 - DNA, 3082 bp, Zea mays
catacatacaccaaccgtgcgtgaaggaaggcctttgctcgccgccacatcacattggcaggcgaggcgagggagcgagcagcagggcaaggcatccacacccacacccaccggacactccctgagaagcgagaagcgagaagcgaagagcggccggccaccatgttctggcacggggtcgcggaccggctgacggggaagaacaaggaggcgtggaacgagggaaagatccgcggcacggtgaggctggtcaagaaggaggtgctggacgtcggcgacttcaacgcctcgctcctcgacggcgtacacaggatcctcggctgggacgacggcgtcgccttccagctcgtcagcgccaccgcggccgaccccagcaacgggagccgcggcaaggtcgggaaggcggcgcacctggaggaggcggtggtgtcgctcaagtcgacgacggacggggagaccgtgtaccgggtgagcttcgagtgggacgggtcgcagggcgtcccgggcgccgtcctggtcaggaacctgcagcacgccgagttcttcctcaagtcgctcaccctcgagggcgtccccggcaggggcaccgtcgtcttcgtcgccaactcgtggatctacccgcacaatctctactcccaggaacgcgtcttcttcgccaacgacacttatctgccaagcaaaatgcctgcggcattggtgccttaccggcaggacgagctcaagattctccgcggcgacgataatcctggaccatacaaggagcacgaccgcgtctaccgttacgactactacaacgacctcggtgagccagacaagggtgaagaccatgcccggcctgtcctcgggggcagccaagaacacccgtatccccgtcgctgcaggaccggccggcgtccaacagagacagaccccaactcggagagcaggctgtttctgctgaacctgaacatctacgtcccgcgcgacgagcggtttgggcatctcaagatgtcggacttcctcgggtactcactgaaggcgatcatcgaggctgtccttccgacgctggggacgttcgtcgacgatacgcccaaggagttcgattcgttcgaagacatccttgggctctacgagccgggtccagaggcgcccaacaacccactggtagcagaggtcaggaagagaatccccagcgagttcctcagaagcattctgcccaatggtagccatgaccaccccctgaagatgccccttccaaatatcatcagatcagatgtgttgaaaaaggctccagagtttaagtttggctggaggaccgacgaagagtttgcgagggagacgcttgcaggcgtgaacccagtgctcatcaaacgtctgacggagttcccagctaaaagtaccctggacccaagtcaatacggagaccatacgagcaagatcaccgaagctcacatccagcataacatggaaggcctgtcagtgcagaatgcactgaagaagaacaggctcttcatcctagaccaccatgaccatttcatgccgtacctcaacaagatcaacgagttggaggggaacttcatctacgccagcaggaccctactgttcctgaaggacgatggcacgctgaagcccctggccgtcgagctgagcctgccccaccctgatggccagcagcacggcgcggtcagcaaggtgtacaccccagctcactccggcgctgagggccacgtctggcaacttgccaaggcttatgcctgcgtgaacgactccgcctggcatcagctgatcagccactggctgaacacgcacgcggtgatcgagccgttcgtcatcgcaacgaaccggcagctgagcgtggtgcatccagtgcacaagctgctgagcccacactaccgtgacacgctgaacatcaacgccctggcacgccagacgctcatcaacgccgacggcatcttcgagcgcaccgtgttccctgcaaagtacgcgctggggatgtcctccgacgtgtacaagagctggaatttcaacgagcaggctctcccagcagacctcgtcaagagaggtgtggctgtgccggaccagtcgagcccctacggtgtccggttgctgatcaaggactacccttacgccgtggacgggctggtcatctggtgggcgatcgagcggtgggtcaaggagtacctggacgtctactaccccaacgacggcgagctccagcgcgacgtggagctgcaggcgtggtggaaggaggtgcgcgaggaggcgcacggcgacctcaaggaccgagactggtggcccaggatggacgccgtccagcggctggccagggcgtgcacgaccgtcatctgggtagcgtccgcgctgcacgcggccgtcaacttcgggcagtacccgtacgccgggtacctgccgaaccggccgaccgtgagccggcggccgatgccggagccgggcagcgacgactacaagaagctggaggcggggcagaaggaggcggacgcggtgttcatccgcaccatcaccagccagttccagaccatcctgggcatctcgctcatcgagatcctctccaagcactcctccgacgaggtgtacctcggccagcgcgacgagcctgagcgctggacgtcggacgccagggcgctggacgcgttcagaaggttcggaagccggctggtggagatcgagaagcggatcaggacgatgaacgacagcccgacgttgaagaaccggaaggggccggtggagatgccgtacatgctgctgtaccccaacacgtcggatgtcaccggcgagaagggcgaggggctcactgccatgggcattcccaacagcatctccatatgagcctcctcactgcctgagcggatggtttgtagatgttctgttacgctgtgtgtaatgtgtcgtttattcgttggttttgtcagtctcagggtagggaatggagatgttgattggatccatgatctgtagggttgagagaggagtcacgtctggagaatgttgtcaatgtgtgtttctttcttgttaagaataaaagttcgtcagctcatttatctctactacttattaagtaagcaatagtagtctgtcattgact

SEQ ID NO: 1235 - DNA, 2704 bp, Zea mays
gacccatttatgctttgcaaatcatactgtttccaataattatagttggtcactatacacggtttttagcagacatggactcttgcgtattttccaatttacaaaaggaaaaatattaaaaaatagtaataaaaaagggaaaaaaaacaatggagacatcgtcgtcgtctccttcctccctccttcctggtcgcccatggattattccatagatacgacctagctgcgctgctacagcccccgcatttcccttcccccaatcctctcctccacgaacacgccctcccttttgcccgttcccagcctcgaacggcaaatcaaaaggcagatatatgagctcttggtcatcgtctccacgccccattggtagccgcctctgaaattcctataaaaaaagatatatgggtggagccatcacccacgccgccaagatcctgtcttcttgcgcggccagctcgtagctccacgccggatagatagaagaggccaacctttcctccccgcttgctccccttttctttcggcaggattgcacatcttcccccacgtgacacctgagaaagtgagagcacagatttcttcttccccttgctgctgccgtttctcgtttccgttcctctctgctcgtgggtttgtcatagataaacctcgcataaagcttcgttccctcggctcttggtcccaatcggcagggctcctccgcttacccgctccaatttctccccccccccccccccccccccccctgttcttctgtctccaacccgcgggaatccttgaggagttgcaggaatttgtagcgagaggctcctttcctgctgcggaggccgtcgtacggttcttgatccggggagcacacctggggcgcgccaatgcagccggacccgagcgggaacaccaatgcgaaggcgaagctgccgttgatggctccggcgccgtcgtcggggcgcccggcgtccgtgctgccgtacaagacggcgaacgtgcgggaccactatcgcatcggcaagaagctggggcaggggcagttcggcaccacgtaccactgtgtgggcaaggccgacggcgccgagtacgcgtgcaagtccattcccaagcgcaagctgctgtgccgggaggactacgaggacgtgtaccgcgagatccagatcatgcaccacctctccgagcaccccaacgtcgtccgcatccgcggcgcctatgaggacgcgctcttcgtgcacattgtcatggagctatgcgccggcggcgagctcttcgaccgcatcgtcgccaaaggccactacagtgagcgcgcggcagcgaacctcatcaagaccattgtcggggtcgtggagggatgccactcgctcggggtcatgcaccgggacctcaagccggagaactttctctttgccagcaccgctgaggaagccccactcaaggccactgactttgggctgtccatgttctacaagcccggtgataaattctctgatgtcgttggaagcccttattatgttgcaccagaggtacttcagaaatgttatggtccagaagctgatgtgtggagcgcaggggtaattctgtacattttgctttgtggtgtccctccattttgggcagaaactgagtctggaatcttcaggcagattatgcgagccaaacttgattttgaatctgaaccctggcccagtatttctgatagcgctaaggatctggtccgcaatatgcttactcgggatcctaaaaagagatttagtgctcatgaggttctctgccacccatggattgttgatgatgccgtggcgcctgataagcctattgattctgctgttctctcaaggctgaagcatttttcggcaatgaacaagctcaagaagatggcattaagggttattgctgaaagcctgtctgaggaagagattggaggcctcaaggagttgttcaagatgattgatactgacaatagtgggactataacatttgatgagctgaaagatggcttaaaaagggtaggctccgaattaacagagaacgaaatccaggctctaatggaagcagctgatattgataacagcggaaccatcgactatggtgaattcatcgcagctactctgcacatgaataagctggagagggaggagaacttggtttcggcattctcattttttgacaaagacggaagtggctttataaccattgatgaactgtcacaagcatgtcatgaattcggtcttgatgacgtccacctcgaggatatgattaaagatgttgaccagaacaatgatggccaaatcgactacagcgagttcacagcgatgatgaggaagggcaatgctggtgcaacaggaaggagaaccatgaggaacagcttgcacttgaatctcggcgaactcttgaatcccagcaaaacctagcgtgcattggaaggtcttgtcgggtacattcccatggcatatgaagattttggatgcgttgtcgatcggctggcctattctgagatgttgagcggttgtcctgtggtattactaagatgctgaagaattttcctagaagtacaactgccctgcggcatatatgtataactgtcgatgtaatgtagattgaacatggtctaaacattacttccctagaagtacaacttctctgctgtcaagtgtgtgtttagttgatattgaatagcaatttctttctctaatttcattgatgactcttttttaca

SEQ ID NO: 1236 - DNA, 1203 bp, Zea mays
gcacagccatcacacgcacgcatacacagcacagagtgaggtaagcatccgaaaaaagctgtgatctgatcgacatggccgccgccaccatggctctcacctcccgcgcgctcgtcggcaagccggcgaccagcaccagggacgtcttcggcgaggggcgcatcaccatgcgcaagactgctggcaagcccaagccagcggcgtccggcagcccctggtacggggccgaccgcgtcctgtacctgggcccgctgtccggccagcccccaagctacctgaccggcgagttccccggcgactacggctgggacaccgcggggctgtccgccgacccggagactttcgccaagaaccgcgagctggaggtgatccactgccgctgggccatgctgggcgcgctcgggtgcgtgttcccggagctgctcgcccgcaacggcgtcaagttcggcgaggccgtgtggttcaaggccgggtcccagatcttcagcgagggcgggcttgactacctcggcaacccgagcctgatccacgcgcagagcatcctggccatctgggcgtgccaggtggtgctcatgggcgccgtcgaggggtaccgcatcgccggtggcccgctcggggaggtggtcgacccgctgtaccccggcggcagcttcgacccgctcgggctcgccgacgacccggaggcgttcgcggagctcaaggtcaaggagatcaagaacggccgcctcgccatgttctccatgttcggcttcttcgtgcaggccatcgtcaccggcaagggtcccgttgagaacctcgccgaccacctcgctgaccctgtcaacaacaacgcctgggcctacgctaccaacttcgtccccggcaagtgagcgagggcatatacatacttgtatgcgtgtaccgtagacatacgtattcgtatatgtactgcaggagatgtaccagtatttgtgaagaagggagcatgggctcagagattgtaccagtagtgtacgtatttgcatgcatgctttggtccttgtggacattatcaatgaaatatgctgtaaattatacatacgtctttaataatgcatactgtacatgatttgctctggcaattaagtcggtgttgtgatgaagtgcaacagagttcagtgagcacgtcctacatcaaacaccaggcagctggacagcaataaccatggcacactgacagtctct

SEQ ID NO: 1237 - DNA, 1574 bp, Zea mays
cttatatggaagaagcaattactgatatcgataaaagggaggaacgagtagcaaaacaaaatggaaatggagctgtgacgcctataaccttccgccaataggacaatcaccaaaagggaagagagagactttttccatgtttacacatatgccctcgctccgcttctatctatattctcagccctctttgccctccattcttcctcctcctcctccctctcactctcccgtcccttccccagttgcccttgccattgtttatcccggcctataactagtacaagaccgagcccgacccccggccactggagctgcagggccgcaggcggcaggcacgcacgcagggagagagatagataaaaggtcgcccccttgaggacagggcagggcagctgagggcaatgagcgctggcggaggcggcggcggcaccagcacgcttggcggcgggggcccgagcggcagcggcagcggaggccctggaggaagcggcggcggcgggccttgcggcgcgtgcaagttcctccggcgcaagtgcgtcagcggctgcatcttcgcgccctacttcgactcggagcagggcgcggcgcacttcgcggccgtgcacaaggtgttcggcgccagcaacgtgtccaagctgctgctccagatcccggcgcacaagcgcctcgacgccgtcgtcaccatctgctacgaggcccaggcgcggctccgcgaccccgtctacggctgcgtcgcccacatcttcgcgctccagcagcaggtggtgaatctccaggccgagctgacctacctgcaagcacacctcgccacgctcgagctgccggccccgcccccgctgccggccccgccgcagatgcccatgccaggcccgttctccatctcggacctgccgttgtcgaccagcgtccccaccaccgtcgacctgtccgcgctcttcgacccgccaccaccgcagtgggcgacggcgcagcagccgcaccaccaccatcaacagccgccgcagcaccaccagctccggcaaccggcgccgtatggcgctggcgcgtccgtcaggcccggcggcggccccggcatggcagagagctcaggcggagacgagctgcagtcgctggcgagggagctcctggaccgccaccggtccggcggcgtgaagctcgagcacccgccgccacactcaagatgagctggatgggggagtagaaggatcaaaaacccgtgcagaacaaggtgagagttggcgcccggcagtatcgagggagataggggtcggtgacgggcgatgtccagcacagcaggagtaggtaagcagcattggccggttttcgcgtacccagcacccctgttgttaatcggctggggtgcaatggcggcgcccacttgcttgatatattctccagtttgatcatatttgctccaagacaaaagaaagagtgctggggatcgacgagagtattactagaattgacatgtattagtaacattattgttacctttgataccgttccattagttgcaagatttttattaagaaaagaatctcaacatggtttctatactgttaattgttcacaaa

SEQ ID NO: 1238 - DNA, 2479 bp, Zea mays
ggtttatgagcgtatgggtttgttgtgtgtacaccgaaaacatctgccttgttaacaaagcggggcgagggtgtcaagatgagtagagctcagctggtgaggtcaggctgcttttattttatttttaaaaaaaagagaaatgtaaggtacatgaatgactcgtgtacaactgctactctgtcttagtgtacaccagaaatcattttcgtgtcgacgtagcagtgcccgaggattacaaacaactacctgcatggacctgctggtctgaccaaactgtactgaactgaatcatctggtgttgtttagggaccgccatgcgtgtgtattcctcatgtttacctcctgtgcagggcatacgtgtttcacggggtgggggtgggggcctggcagatcgacatcagcgacaggaaaaagggagacgaacctaatccatctatcgccgtaatcaaatcaggaacaggtttgcgtcaggggcggcggtggcggtgcggttaattagctgttaaaacagcgcgcgtccagcgtggtggtggtggtggtgggagagtggtaggcatccatccatcagcacaagcacacacggtggttgtcgcttacctcactttacacctaaccgccggagttcccgttccacgggtcacggcccccggcgtcctctttgcgaaactcagtggcagtgatgagctggggtggggccgtgggggagtcctaccgctaccacccaccaactcagctctctagaagacctaccctcccgcgattcctcagtcaagtgcctatgcctatctataaaatccagccccgcttcacccacacacccttggccttggcctggcgctcgcacctcacagcagcagcagcaacaacaacctccactgccgcaacccaccgagaggcgagaccggcggcggcaaaaggacgatacaaaagcagccagggttgctggcaacagcgtcggtcgcccgcccgctcgccatggggaggtcgccgtgctgcgagaaggcgcacaccaacaagggcgcgtggaccaaggaggaggacgagcgcctggtcgcgcacatcagggcgcacggcgaggggtgctggcgctcgctgcccaaggccgccggcctcctgcgctgcggcaagagctgccgcctccgctggatcaactacctccgccccgacctcaagcgcggcaacttcacggaggaggaggacgagctcatcgtcaagctgcacagcgtcctcggcaacaagtggtccctgatcgccggaaggctgcccggcaggacggacaacgagatcaagaactactggaacacgcacatccggaggaagctgctgagcagggggatcgacccggtgacgcaccgcccggtcacggagcaccacgcgtccaacatcaccatatcgttcgagacggaggtggccgccgctgcccgtgatgataagaagggcgccgtcttccggctggaggaggaggaggagcgcaacaaggcgacgatggtcgtcggccgcgaccggcagagccagagccagagccacagccaccccgccggcgagtggggccaggggaagaggccgctcaagtgccccgacctcaacctggacctctgcatcagcccgccgtgccaggaggaggaggagatggaggaggctgcgatgagagtgagaccggcggtgaagcgggaggccgggctctgcttcggctgcagcctggggctccccaggaccgcggactgcaagtgcagcagcagcagcttcctcgggctcaggaccgccatgctcgacttcagaagcctcgagatgaaatgagcgcgcttctaccctctctgtgtagcttctcccccccgtcgtcctcgtttttgttttgccacacctcacatggatgatgaattgatgatacgtggttggttagttttttcgtaggtgaaaaatacgcgatggtgagcgagtgaaagagagattttgtgccctgggtcctcctccctgctctctcttgctgctccattttgcctccctctgtcctctctctctctctctctctctctctctctctctctctctctgtatctctgtaattaccatcgccaaatgatcatgggggcaatatcatgctaggtctctggaaattgacgctaatcccgtttccaggagctgaggctaggttcagttgcctggtgtggccgccggccgtgcagtctcagaaaagaaacactggagcatgtgctgaggcctgagccagatcttacgtttaccaaacctctagaccagcagcatgtgagcatcgcctaatcgtgcagtccccataaagcgcctcgtgccttagacgacgcctttttccaatctgacctgcttcttcttctttttttttctttttacatcacacacacgatgacacgacacgcagcacaaaaggacggtaggtccggtcgtcataggtgggtctatgggcatgtttgtttcagttttttaaaatctatcaaaaactgctgcg

SEQ ID NO: 1239 - DNA, 1410 bp, Zea mays
gcagtctcaggcacacacaatgacacaacacaagcagggcacagtcacagtgtgagctgagctgagctgggcttgtgcttgtgcttccgcctcctcctccgcggctactaaagggtgccagccagccagccctgtggggcgccggtgcgtgcccaaaacaagcaagcataagcatagaggtgggcatcatagacatggaggatgacgaggacatatgggcaaacaccgccagcagccccagcgcgtccccaccgcagcccgtggcggcgggctcggtctccacctgcagcgccttcatctccacgcagctgagcctcaactcccgcctccacctcctctcctccgccgcggccgggggcgggtcctccccggtccgcggcggcgcctacggcgcggacggtgtccgccaccaccacatggctctcggcggtggcttccgcaatgccgcggcgtcccaggggtccttctttccgtacaacctcgccggcgccggcgccgatgtcgcgcccttcgacggcggccgcggcgtgctcgaggacgacatgtctgtcggcgccgccgcgtccggcacctgggctggcgggggcaccgaccggcggaagaagcgcatgatcaagaaccgcgagtccgccgcgcggtcccgcgcgcgcaagcaggcgtacgtccgcgagctggagacgaaggtgcagctgctgcagcaggagaacgagagcctccgcgtcaagtacgacgagctgcgggagtccgtggaggtggcggtgccgatggtgaggaagaccctgcagaggatgccgtccgcgccgttctgaggacattgaccggagatgagtcgaagcaggtggttgctcgttttgtttgttttttgaggaggtgattaagtaagtgactgattagtgagtggctgctgcctagtgcttggttactagtagtggtagaactcagaactacatagatccaggaagcaagcaagcaaatccttcctgccatggcggcctcaatgtacatagatcccatgtttttattaatttcgtctagctgggggggcgtgcacctgccatggcggcctcctttatttagctttatataagtaggatgtaggatgtctaccatatgtgtgtagcttgggattaggctgcaagaagataagcctgcttgtacaaatatggcttcctggaacaatgacattttgggggcgcaacgcaagaaagatgaaagaacaatccaggaagcagcaggtgttttcttcttcttcttcttttgccccttccatgatattcgcgtgtcaaaggctctcctaaagcgagtagtagtcttttggtttggtgaatatttgctgttttcatgctggtccctgctgatgtttgcgatgattttacaatcagaaagagacgttttttggttttgcctcca

SEQ ID NO: 1240 - DNA, 2425 bp, Zea mays
cccttttctgccgctcttcccgcgcctataaaaatcaggggcagaaatatctcccctacctggcagcagaatctgatctccattttcctcccgcacccaacccaaccacggacgcacgccgaggagggagaaagcgggtgtggaggggcgggcggccggcctcgcatgtttgacgacgcgggggccgtggcggtgaagcggatgaggctgtgggaggaggacgaggtggaagtggaggaggaggggatggaggtggacgcggagccgggatggccgtggggaacgccggcggcggggctctccagggctgcggcgatcgtcgtggcggacgcggcggagcccgacttccccgtcatatacgtcaacgccgcattcgagtccgccacggggtaccgcgcccacgaggtgctcgggcgcaactgccgattcctgcaatttcgggatccacgagcccagaggcgacatccccttgttgatcccatggtcgtttcagagatccggcgatgcctcaacgaggggattgaattccatggcgagctgctaaatttccggaaggatggcgctccactttacaacagattaagtctcattccaatgcacggggatgatggctacgtgacacatgtgattggaatccaactattctccgaggcaaacatcgatctcagcagcgtgtcgtatccggtgtacaagcaacagaccaacaacaggcccagcattcaagatctgaactcagcttcccatgagcatgctccgaaagtccagagtgcagaccactgcggtatacttcagttgtcagacgaagttctcgcacacaacattctgtctcgcctgtcacctagagatgtcgcatccattggatccgtctgtaccaggatgcatgagcttaccaagaatgatcacctgaggaagatggtctgccagaacgcgtggggaagggatgccactgtcaagcttgagatgagcaccaagatggtaggatggggccgtcttgcgagagagctaactactcttgaggccgcctcgtggaggaagttcacggttggagggcgcgtcgagccttcccgatgcaacttcagtgcctgtgctgttggtaaccgcttggtccttttcggaggggagggtgtcaacatgcagcctatggacgacacctttgtgcttaacatggaggctgcaaggccggaatggcgccgcgtgaaggtttccgcctccccaccaggccggtgggggcacactctgtcgtggctgaacgggtcatggctggtggtatttgggggctgcggacagcaaggtttgctcaatgatgtcttcgtccttgaccttgacgctcagcagccaacgtggagggaggttgcaagcgagggtcctccactgccacggtcctggcacagctcatgcaccttggatggttcgaagctggtcgtctccggtggctgcaccgagtctggcgttctcctcagcgacaccttcctgcttgacctcaccaaggagaagcctgcgtggagggaaattcccacatcttggtcacccccatcccgcctcggccacaccatgtccgtctacggtacgactaaactgctcatgttcggtgggctggcgaagagcggctcgctccggctgcgctccagcgacgcctacacgatggacgtcggcgaagatagtccgcagtggaggcagctggcgacgaccggattcccaaacgtcggcccaccgccgaggctcgatcacgttgcggtgagcctgccctgtggacggatcatcatattcggtggctccatcgcgggactccactccccggcgcagctgttcctggtcgatccagcagaggagaagccgacgtggaggatcctgaacgttcccggcaaaccccccaagttcgcctgggggcacagcacctgcgtggttggcggcactagggtcctcgtcctcggaggccacaccggggaggagtggatactgaacgagctacatgagctctgcctggcaagcaggcccgacgacgacgacgatgaccgctactgactagtttcgttgcacatggttcatctgttttatatgctatatgctattgttcgtaactacttccagtatgttgttgggtaatcggtatgagaaaaaatagtggaaaattaattaaaaaagttagactagaagattttagtgtattttgttttcatcggagaagtttccttttatcggtctagatagattctatggtctatatatttgtatattttttgtctaaaagatcaaaaaaaactgaaacaactgcattgtagattcgcatggcaaagtcgccagttccaatgtcttgtactcttatttttaatcatatgtaaaatatagcgctgcttcagtttgtaggtatggaattagccaatgcttcagtttattgtattgatgtcttcggcacgttcgactccgg

SEQ ID NO: 1241 - DNA, 3173 bp, Zea mays
gcccaccgcagcgaacaatcccttccactcccctcccctaaacccctcgccgcccgcggggctcgccggccggcgcccctccaggcccccactccctccgcgtgggcgcgatgccaacggcggtgccgacgcccaaggcggtggtccaccagcggttcggcgccaaggcgcggtacacggtcgaggaggtgcgggaggacgtgggcggctgcccgggcctcgcgccgcagaccaggaacgtctaccgctgcgcgctcgacctcccgggcctctccgttgccacgcccggtaccttcctcaggaagaaggacgctgagcaggccgccgcgcagatcgcgctcgacaagcttggtattcatcctacagcaaatagtcccaccacaccccaagaagcttgggctgaactgattgctcgcatatctggttttttcatagatgagaactttctgtcatctacccatcctcttattggccatttgtgtgtgtctctccggagaactggagacctcattgggaggttacctttgtcggctattgctgcatgtgatgtgaaggtcaatacattgtgtaaattgatcgaccatagggcagaatttgatcctctattggtcttgtcattattgtacaatgctgcaaaacaatctcctggagtctctgttagtgacagcaacttctggattcagagtgaaaagccttattctccggaggctgttgactcggcacttgagcgttggtctggtacaacagatcccgtagaagtagaggcagttcttgttccccacatgttggaggatgaactgaagacagtaagaattaatctacgagataatgaacattatatgagttatgttgcagcagagctctcagcaattgattcctctcatgttcttgtatcaagaacaattggaaaaacatcatccgagataagactgtattttgcagccgcaaatatacatgctgtttctgatatgtcaaaacacgcgcttgattctcttggagatggtgacatcaactggcaagtaaataagcgagcttcctacatttgtggccaaacaatttatggagatgcactcttggcaaatattggatacacaaggagagattcggaacttcacactgaagatgtcaatctatgttcctattacaggatacttctgggcaagttacctgatggaaattgtaagatgtctagggattcgattcttgcagcggagcttccatctgcatactctcgttttagttggaaaggcctctctccacgagatcttctttgctcattttgtcgccttcagaggttgccagagccccattttgctgtcagtagggtctcttgtgatacattaatgtcagctgtgagctctgaagaaagaggagcaccagcaggcagcgcagaaaatcagtacaccaatgatgtcaggatcaacaaggaaaaaccagatctttttaaatgtgaagtgaacatacgttcacggaagcaagaagttttactagagtattctgcagctgacacttggagcaaggaatctgatgctattcagaattcttcattaaaggtcttgatttggttcaataattattttaagaaactaacctcaaaaacaggcaagctatatctttctgagtctactgctggtgtcaaggtacattcaaatatttttcttcaagagtttgcaatgtgtctatctgtttatggcaagaatggatgcagtgattcagcaatgtgcagtgcagttggaccattttctatggatacacaaaagaagcaccttgaaagcactgcaaagttaacacacattgaaggtccagactctggtgttttcccgtcccacggatcattgacttgtataagttatactgcttcccttgtgacgaaggataaagcaaaaacatatttgttggagagccacaacgagtttgagtttgagattgggacgggtgctgttagtaatcagcttgaatcatgtgtaactcagctgtcagtgaatcaaactgcacgttttgtagctgaactgcctcctagggatttaatcatggctgcatcttgtgagttctcacatgacctctccaatgtatctagcgagagctgcttcctggagttctctgtaaaggttctgcaggtaactgaaccattagaagatagaatggagaaagccctgttcagtcctccattatctaaacaaagagttgaatttgctgtacggcacatcaacgagctgcatgctaccacacttgttgattttggctgtggatctggtagccttcttgattcgttgttagagcatccaaccacgctggaaaagcttgttggcgttgatatttctcgaaaaggcctcacacgtgcagcaaagagccttcatcagaagctgagcaaaaaatcaacgacgcagacaaatgttccaactgctgtgctgtatgacggatcaataacggactacgattctcgcttatatgggtttgatattggcacttgtcttgaggtgatcgagcacgtcgaggaggaccaggcgactttatttggcaacgtcgtcttgagctcattccgcccgaccgtgctcattgtttccacacccaactacgaatacaaccctatcctccaggggtctgctatgcccaacaaggacgacgaggcagacgaaagcgctggtccctgcaagttccgcaatcacgaccacaagttcgagtggaccaggctacagttccagtgctgggctactggcctcgcggtgaagcatagctacagcgtggaattctccggcgtcggtggctcaggcgaggagccaggctacgcttcccagatcgctgttttcagaagactggtgcagggccaggaagcgatgtgcctggacgaggatggcgatcagccttacgaggttctctgggagtggcctaacgcgtgtgtgaactaggtagattgcacgtctaatctctctagggcttggaactttgaatcgtgcccccggtttggaactgagtaatatatgtgtcaggaaagtgggcatccgacttgtggcaagaacacaaaaaattaacattgctgcatgcaagtgcagaaattcagtctgcttctaggttctggatgtacggtagttactacactgtatatgatacactgtatatacgaataggtctggacgaaatgctcgtgcctcgttggctcgctcggtttatttgaa

SEQ ID NO: 1242 - DNA, 3147 bp, Zea mays
aagtctgttcccaacagttacctcacatagatagatcttgtttaaatgaggtaacctgtctaccatgccacttcaaaaacatagatatgcacatgtaataaatttttaacaaatattgtgtgttccgttgtaacacacgacaaccatactagtataatacacctttagttccagtatataaggcgtaaccacatctggttcaaagacaaaaaaattcatttaattctctctatatcactgtaccaataatgtacgtgtgcatagagagcacgccttatattgtgggacaaaataaaaaatggttacgacttatattctaaaatggatgggtatataacaaacatatcaaagcacaaacataagtaattaataaaatgacaatggtgagttgggggcaggccggcagaaacaaaggagatgccttgagcccaatcaacggccgtctgctcgagccttcgtccttgggctgctgccgcgacgagcacgtatcagatccctcccgcagtctcgcgcgctctcccccacccacccaccccctatccatccatccatcccacctcctgctccacatcctcccctccgcccaccaacgcagcagcagccagcagccccgccacttcccccctcgccgcttgcgatggcggtcacgcgcgtcgccgtggccgccgccctctcggcggccccgctctcctcccgccgccaccgggttgccctcccctccgcctgccgccttctccccgcctcggccacctgctgcaacagccgcgcgccgatgtctctgcaggccgccgccgccgcacctgccgccggcgcggtcgacgaggagactcctgcctcctcccctccgtcagatgctagcaagggggtggagaacctggtgatcatcggctctggaccagccggttacaccgctgccatctacgccgcccgggcgaacctgaagcctgtcgtgtttgaagggtgccagatggggggtgtccccggcgggcagctgatgaccaccaccgaggtggagaatttccctggcttcccggacggtataaccgggcctgatctcatggacagaatgcgcaagcaagcggaacgctggggcgcagagctttaccaagaggatgttgagtttgtgaatgtaaagagcagcccgtttgttattcgtagcagcgaccgtgaggtgaaatgtcatagtctaattattgcaactggagctacggctaagcgcctccgtctgcctcgtgaagatgaattttggagtagaggcatcagcgcatgtgcaatatgtgatggagcttcaccacttttcaagggccaggttcttgcagttgttgggggtggtgatgtagctacagaggaagcagtatatttgacaaaatatgctcgacatgttcatttactagttagaaaggatcagctacgggcttccaaagctatgcaggacagagtactcaacaaccccaacataacagtacatttcaatacagaagccatggatgttgttagcaatgacaaagggcagatgtctggcgttcatctgaagagaagagatacaggagaagaatcagttcttactgtgaaaggtttattttatggcataggacatactccaaacagtcagctgttgcagggccaaatcgaacttgatagtgctggctatattttagttaaagagggctcagccaaaacttcagttgatggtgtattcgctgctggtgatgttcaggatcatgaatggagacaagctattactgcagctggatctggatgcatagctgctttgtcagttgaaagatacttagttgccaatgatcttcttgtcgaatttcaccagcctgttcaagaagaaacaaagaaggatattacagataaagatgttcaaatgggctttgacatttctcacagaaaacacaagggacagtatgcactccgcaaactgtaccatgagagtccacgactcatttgtgttctatacacttctcccacatgtggtccttgcagaaccttaaaaccaattttgagcaaggtcatagacgagtacggcgagtttgttcatcttgttgaaattgacatcgaggaggatcctgaaatagcagaagctgcaggcatcatgggaacaccttgtgttcaattttttaagaacaaagaaatgctcaggtttgttatctgtacttcaattagtttggttagttctgttgtgataagattcttcatgtttgtgcctatcttttctcttctaggaaatggtatacactttttttggagaatactgaatgaacttgcaaaccaaaggcacaggcacatcttggctaaatattggactagttggtgtatgtgtattttatcgttcttggccaaacattatctgatgttctcgaataaaattttgttaaacaaaggcatgcaattgaattcttaagtctgtcttctttgtactctgatgcttgtgagtgatgtcgatctctggggcgagttctgtattatcatgtcttaggtacgcctttgtctcatcttttgttatcttggaacatgcaggactgtatcgggtgtgaaaaggaagaaggaatatcgggagtttatcgaggcgaacaaatgagttgagcacgcagtggaccccctcaaggttttttgaagtcagtagttcttttggcgctattttgacgccaccccgtcccccggtggccaatttttcatcagattttaagacgagcctggtctagtgccatgccaaaggaaactagccgatccctcatattggattatacagctcaaaatatattctttgctgtgtgtgtacaacatacatggagttgaccccccaccccctgctgatcaatcatcattgcggcattgccttgacactgccaatgtgcaaactatttccacggattagcatacattaatctgaagtatatatatactcggcaatgctgaatccattttgatcaaggaagcgactggaaatttgtttgtatgcgtgtggaagcctccgctcactgcagaactaccagtcaccaacgctccatcacacaccagcctcctgctgctgtggcgaaggtttcgccttgttatcgccaccgctctgtccccggcgaacccgtcacctgcgctgcccgcccgccgccgcgaggggaaactctcggccgcttctggaaa

SEQ ID NO: 1243 - DNA, 2690 bp, Zea mays
ttaactacacagcttttattgtgcttactgtacgatcatacctcccaacttttgtcatcggaaaccgtagccggccatcgggatagctttgactggcggccagagagatctctaccgcagctcgttcgcagcataccggaccggcggcgggaaggatggccggatgggcaccgccgcgccccgcacggtcctccctatgccggctgtctggtatcggcgtgcacatgcctgccccacgcggccacgcgccgctggtcgcatgcattcccaagaagcaaggagcccacgtcgtcacgtgatgagctcgccggcgacccgggccctcaccactcagcaggatcccacctcctcatcctctcgaccagtcacgtcgacctcctcgccggtcactcagtccggctttgacccacgtcgaaaccctgcgccgcgccccggccgggccgctggtccatgtactccacgaggcaaaccggtaggtaagttaaggccctgtttggcacagctgcgtaagctgctcaagcggcaacccacaaggacctggtccatggaaatggaagcacagcggcgccctgccgctacctcgtagcgcgcgccacagcattccgacacggttcacggacgtgtagccccccatttggccgacctcccgagcaactcacatcacatgccccctttctggcgcgcccattccccctctgcgcaagctcacatggccatttaccaccccgtggttttactgcactggatgatgtctgtgcgtcgccgtcgccgtcgcgtcgggccctattaaattcctccgcaccgcaccccggcctgtctcccaaccgccgcgcgcgcgcgcagaaccaaccaacttaaaccgccaacaccgagcccaaggcacaaacgttcccatggcgcggctggtgtcgacggcgacgaaggcaatggcggtcgtggtcctcgcggcggcgtcggcagcgctggccgcgcacgactacggtgacgccctccacaagagcatcctcttcttcgaaggccagcggtccggccggctgccaccgaaccagcgcctccggtggcggcaggactcggccatccacgacggcgccgaggcgggggtacggacgggagtggacctgacgggcgggtactacgacgcgggcgacaacgtgaagttcgggttccctatggcgttcacggcgacgctcatgtcgtggggcctgatcgacttcggtcgcagcttcggcgcgcacgaggcggaggcccgggacgcggtgcggtgggcgacggactacctgatgaaggcgacggcgacgccgggggtggtgtacgtgcaggtcggggacgcgtcccgggaccacgcgtgctgggagcggccggaggacatggacaccccgcgcaccgtgtacagggtggacgcggcgcacccggggtcggacgtggccgccgagaccgcggcggcgctggcggccggctccatcgtgttccgcgacgccgacccgggctactcgcgccggctcctgggccgcgccgccgaggtgttcgagttcgcggaccggcaccgcggggcctacagcggcagcctgcgcgccgcggtgtgcccctgctactgcgactacgacgggtaccaggacgagctgctgtggggcgccgcctggctgcacagggcgtcgcgccgccgggagtaccgcgactacatcaagcgcaacgaggtggcgctcggcgccagcgacgccatcaacgagtttggctgggacaacaagcacgccggcatcaacgtcctcatctccaaggaggtcctcatgggcaaggacgagttcttccggtcgttccgggagaacgccgacaacttcatctgcagcctcctgccgggcatctccggccacccacagatccagtactcgccgggtggcctcctcttcaaggtgggcaacagcaacatgcagcacgtgacgtcgctctccttcctgctcctcgtctactccaactacctcagccacgccgacgcccgcgtcccgtgctcctcctcctcctccgccgctgccgcctcgcccgtccagctccgccgcgtcgccaagcgacaggtggactacatcctgggggacaacccgctgcggatgtcctacatggtggggtacggcccgcggtacccgctgcggatccaccaccgggccagctcgctgccgtcggtctcggcccacccggcgcgcatcgggtgcaaggccggggcggcctactacgccagcccggcgccgaaccccaacctgctggtgggcgccgtggtgggcgggcccagcaacagcaccgacgcgttccccgacgcgcgggccgtgttccagcagtccgagcccaccacctacatcaacgcgccgctgctcggcctgctcgcctacttctcccagcaccccgacccagcgcagcactgatgaacgggcagctagctagctagtagtaggtgttgtagtagtattcttccgttgctgctgctgctcgtgctatttgttttgcagtatttatgttttggtagcatatattgtgccgatccattcctgtaaaaaaaatggcaggaacgaggattggtcctactgcttgtactcgtactatgccccaagtaagctgctgtatggtggtaagatgcattctgaaatcgccttaatttcggagtttcagcgtcgtatatagaaaccactgctggacatattgctact

SEQ ID NO: 1244 - DNA, 2014 bp, Zea mays
ggaaatattggtcgttccacgtgattgagtaagaatgagagggaaataaaaggatttggtgcgttggttttgaaggcaggatttggttaggatgggtggacgtttgaagtgatgagtttttcaagcgtatagattttctatttgtcctttttaattaactttctcccagccgggatgcgcgtataaaaaccggcgaaacccttggctctcctcattcggcctatcacaaccacttactctcgtgcgctctccgtgggagcgaggactcgcggccggcggcagcggcaggttctcctagatctccggcatcatcagtaacaaatggctgacggtgaggacattcagccccttgtttgtgacaatggaactggcatggtcaaggctggttttgctggtgacgatgcgccaagggctgttttcccaagcattgtcggacgcccccgtcacactggtgtgatggttggcatggggcagaaggatgcgtatgttggtgacgaggcccagtccaagaggggtatcctgactttgaagtaccccatcgaacatggtattgttagcaattgggatgacatggagaagatctggcaccacaccttctataatgaactccgtgtggcgcctgaagagcaccctgtgctgctgacggaagccccactcaaccccaaagctaacagggagaagatgacccaaatcatgtttgagaccttcaatgttcctgccatgtatgtcgccatccaggctgtgctttccctgtacgccagtgggcgtacaactggtattgtgttggactctggtgatggtgtcagccacaccgtgccaatctacgaaggttatgcccttcctcatgccatcctgcgtcttgaccttgctgggcgtgacctgactgacagcctgatgaagatcctcaccgagagaggttactccttcaccaccacggccgaacgggaaatcgtacgggacatcaaggaaaagcttgcatacgtggctcttgactatgatcaggagctggagaacgccaagagcagctcatctgtggagaagagctacgagctgcctgatggccaggtgatcaccattggggcggagaggttccgatgccccgaggtcctcttccagccttccttcattggtatggaagctcctggcatccatgagaccacctacaactccatcatgaaatgcgacgtggatatcaggaaggacttgtatggtaacattgttctcagtggtggcacaaccatgttccctggcatcgctgaccgtatgagcaaggagatcaccgcccttgccccgagcagcatgaaaatcaaggtggtggctccacccgagaggaaatacagtgtctggataggagggtccatccttgcctccctgagcaccttccaacagatgtggatctcaaaggctgagtacgatgagtcaggaccagcgattgttcaccggaagtgcttctaagctcaagggcccccttcgtccccattctatgtattcctttccttgagtgcttttcttataagctactatgtttgagattgccggcctttgagcaggcaatgttgttggatctgtatcttgtggatcactacaatgcatgcgttgctccatcttcttttcatgccaagtttgctgtcatacttgctagtggggaaaacaacaatgacaacagtggtgagaacagcaaccacaaaaaaagagaggatggaaattattgaagttcctaggatcgtattgtaactgtacttgtgcgagtaacattattggttctctttgtatatccatctctgagacatgcaattctttttgattggtttgctacttctgtgaatgatttctgggcactagtggagcttttgaatggcaacttcccagggactacctttgtgagtccccactgaatttcatgtgctgctgcctgctaaagttgctcccatgttactgtgaaaaaggtaccgcgtggagtgcatgaattctggaacatgggttgccggttgcccagtccgaatgtctgcgccga

SEQ ID NO: 1245 - DNA, 1937 bp, Zea mays
tatcttatcttaaggctatctgttcgtatgataaaaaaaagtattccttttgaaacaaaaaagaagacaaaatgaatggatcaaataaaaggagaaaaaataaataaaaatagcggttcctccgcgggtaacgggcatcccgccatcgctctgcacttctgcagtctgctctggcttataataaccggcaccttctccttcctccgatctcctcgcctccctcctctctcccagatccgtctcccggcgtcagacgcgcatctccagcaatggcggacgagaagcttgccaagctgcgcgaagccaccgccggcctcacgcagatcagcgagaacgagaagtccggcttcctcagcctcgtcggccgctacctcagcggcgacgaggagcacatcgagtgggccaagatccacacgcccaccgacgaggtggtggtgccgtacgacaccctggagtccccgccagaaggcactgaggcgaccaagaagctgctcgacaagctcgccgtgctcaagctcaacggcggcctggggaccaccatgggatgcaccggacccaaatcggtcatcgaagtgcgcaacggatttactttcctcgacctgattgtcatccagatcgagtcactcaacaagaagtacggcagcaatgtgccgctgcttctgatgaactccttcaacacccatgacgacaccttgaaaattgttgagaaatacacgaattcgagcattgaaatccacacattcaaccagagccagtaccctcgtgtggtagctgacgagttcttgccatggccgtccaagggaaagactgataaggatggctggtaccctcctggccatggtgatatcttcccatcattgatgaacagtggaaagctcgatttactactctcacagggaaaagagtatgtgttcattgcaaactcggataacttgggtgctattgttgacatgaagatactgaaccatttgatccacaagcagaatgaatattgcatggaggtcaccccaaaaactttggctgatgtaaaaggtggcacactgatctcctacgaaggaagggttcagcttctggagattgcacaagtgcctgatgcacatgtgaatgagttcaaatcaattgagaaattcaagatattcaacaccaacaatctgtgggtgaacttgaaggccatcaaacgccttgttgaagctgatgcactcaagatggagatcattccgaatcctaaggaagtcgatggtgtgaaagttcttcagctggaaacagcagctggtgcagcaattaggttctttgaccatgccattggtatcaacgttccaaggtcccgcttcctaccagttaaggcgacatcagatttgcagctagtacagtctgatctatataccttggttgatggcttcgttacacgtaattcagccagaacaaatccatcaaatccatcaattgaacttggtcctgagttcaagaaggttgggagcttccttggtcgcttcaagtcgatacctagcattgttgagcttgacagcttgaaggtttccggtgatgtttggttcggttctggaattgtactgaaggggaaagtgaccatcactgcaaaacctggcgtcaagctagaaatcccagacggagcagtgattgggaataaggatatcagtggccctgaggacctttagataagaatcagcgaatcagcaaggaggctcacttcgccaagtggcggatcatttttcgtgtttttttcctgtatattcaaacaggttccatgatattatggagaatattaattgccagtataatccagaaattttacatgtattttactttgagggaaatgttttacacactccagttctgcttattgtccaaaaggaaatttctgtgtcttgaacagaaaaatatcttgccccagcaactaccatctcagcatgcatctaatc

SEQ ID NO: 1246 - DNA, 2154 bp, Zea mays
gggtgcctgtgctcatgccattgccattgccattgccatgctgcgtgccgctgttgcccgtgcttcacctgcgctgcgcccccctgctccactccatcctagtagctctacagcttcgagtagctcgctctcactcgcgctctctaccgctccggctcgctgagaccctgaccctgtgtccctgtctatatatacacgcgcgccccctttccgggcatcccttttcctcccgcccgcgcccccgtcttttcctttccgcgtgccctaatttctcgctgcgccttgtcccccacacctccctccctccgccgctggtgctctctcctcctatacatacaaacacatacacacaagctcgctcgctcgctcacgggctgtgagagaggccgtggaaaggaatctttcagctcacacctccctatccctccctccctccctcccttctcctcctactgctactgctcgccaggtcccctcgctcgctcgtcgtcttcaacctcacacaattatttgtgctcccgctccttccgtccgtccttcctcccccctcccctctcccgctcctgctgccttgcctctcagccgagggacgccaaggtctctgccaggatggtgtaggccgtgcctctcgcgcattatgaggtgtggtggtgagggatgggcgatggcctttgcagatgaaggagcgacagcgctggcggcctgaggaagacgccgtcctgcgcgcctacgtccggcagtacggcccccgcgagtggcacctggtgtcgcagcgcatgaacgtggccctcgaccgcgacgccaagtcgtgcctggagcgctggaagaactacctccgccccgggatcaagaagggctcgctcaccgaggaggagcagcgcctggtgatccgcctgcaggccaagcacggcaacaagtggaagaagatcgccgccgaggtgcccgggcgcacggccaagcgcctcggcaagtggtgggaggtgttcaaggagaagcagcagcgggagctgagggacagccgccgcccgccgccggagcctagccccgacgagcggggcaggtacgagtggctgctcgagaacttcgcggagaagctcgtcggagagaggccacagcaggctgccgctgcgccgtcgccgctgctcatggccgcgcccgtgctgccgccctggctgtcgtccaacgccgggccggccgccgccgccgccgccgccgtcgcgcacccgccgccaagaccgccgtcgccgtccgtgacgctcagcctcgcgtccgccgcggtggcgccgggcccgcccgcgcccgcgccatggatgccggatcgcgccgcggccgacgcggcgccgtacgggttcccgagcccgtcgcagcacggcggcgccgcgcccccgggcatggcggtcgtggacgggcaggcgctggcggagctcgccgagtgctgccgcgagctggaggaggggcggcgcgcgtgggcggcgcaccggcgggaggctgcgtggcggctgaagcgcgtggagcagcagctggagatggagcgcgagatgcggcggcgcgaggtgtgggaggagttcgaggccaagatgcgcaccatgcggctggagcaggcggccgccgcggagcgcgtggagcgggaccaccgggagaaggttgccgagctccgccgcgacgcgcaggtcaaggaggagaagatggccgagcagtgggccgccaagcacgcgcgcgtcgccaagttcgtcgagcagatgggggggtgctcccgttcatggtcctctgccaccgacatgaactgttgaactggacaaacgagccgctgaccacaccgtcgctagctatcgcgtgctacgtgctccggttcacggctttcttgcattctgggacgcgacttgtaaacgccatggattttcttgctcacgttcacttccgctttctttctttctttttttcttttctttttatttacaactgttgttacggtcggttcagtgcttctctctctatctactagtagttgatcagagtcaagaaatgtaatgctgccgttactgtcgtagtttcatcctctctaaacatgcgttctgtctgtttttgatcatgccaagcttcaaccttagcactgaataaatagaacgagaaaaaaaaatcagacaaagtttcaaa

SEQ ID NO: 1247 - DNA, 1682 bp, Zea mays
cacacgcacacacccttcacttgtccgcccccacaatttccgctccttgaaccgagtcttcccccaaagcatttcctccctttcgcgtggttgtgccgttgtggtagtgatcggatggacagcacgagctgcctggtggacgacgcgagcagcggcgcgtccacgggcaagaaaccggcgccggctccggctgcggcgaccggcaagccgctacagcgcgtgggcagcggcaccagcgcggtgatggacgcggcggagccgggcgccgaggcagactcgggcggcgcggggcgggcccccggcggggtcagcgggaagctgccgtcgtccaagtacaagggcgtggtgccacagcccaacgggcggtggggcgcgcagatctacgagcggcaccagcgcgtgtggctcggcacgttcacgggcgaggccgaggccgcgcgcgcctacgacgtggccgcgcagcggttccggggccgcgacgccgtcaccaacttccgcccgctggcggagtcggagccggaggccgccgtcgagctccggttcctcgcgtcccggtccaaggccgaggtcgtcgacatgctccgcaagcacacctacggcgaggagctcgcgcacaacaggcgcgccttcgccgcggcgtccccggccgcctcgccgccgcccgagaataaccgccgtccgcccgccgcctcgtcgtcgtcgtcgcccgcggcggcgcgcgagcacctcttcgacaagacggtgacgccgagcgacgtggggaagctgaaccggctggtgataccgaagcagcacgcggagaagcacttcccgctgcagctcccggcggcggcggcggcgggcgtcggtagtggcggcgagtgcaagggcgtgctcctcaacttcgaggacgccgccgggaaggcgtggaggttccggtactcgtactggaacagcagccagagctacgtgctgaccaaggggtggagccgcttcgtcaaggagaaggggctccacgccggcgacgccgtcgggttctaccgttccgccggcggcaagcagcagctcttcatcgactgcaagctccggcctaacaagacgacgaccacggcagcagccttcgtcaacgtcaacgcgatgaccaccacggccgcaccacccctcgccgcggtgaaggcggtgaggcttttcggcgtggacttgctcacgacaccgaggcccgcagcggtggcgccggagcaggaggaggtgaccgtggcaaacaagagagctagggacgccatggccaccgcggcttctactccagctccagtacacatggttttcaagaagcaatgcatagacttcgcgcgctgacctagctatagctaacgtttttgctctccaacccccctctcatgcttgcttcgcttcgcacggatgataagatgcatggtgatgtggtagctagccagctagtagctttggcgctagctcttgcacgcttagaccttcattcatcaacctcatccttggattgttcattctgtttcttcttattatctttctgtacctgtcctaatcgttctatcgcatatctctgccgtaaattagctaggcagcatgtgtgtgtgtttttttggagtggcaagtgtatactaatgaaaaaaaaagaagccatggagattattacatgcatgccataagaagcaatgtttagaacc

SEQ ID NO: 1248 - DNA, 4159 bp, Zea mays
ttctcgagttaaaatgccggcgctcgtcaaccaccagtccaccacctctcttgctccttcccacccctcatcggctcctccgtttcccaccacaacaccccatgtccgtcgcctcccttcccccacacggcgccaggccctgagcagccagcagcggacccaccaccctctccgcctccgatccgccgctcgccggggaggcctctggtctcgggtccgtctccagaccatggccaccactgccaccatctccctcctacagcacgtccgacctccggcttcgggcggtagtcttctcccccttcccctccagcgcctccgccctattcactgccgacgctcggcgccagcctcccatcactccctccatcgcagtctccacctccgtctccccacccgcggcgcacccgcggaccggccccgcgccacggctgacccgtcgtccgcgctcgacgcggcggccggggagggggccgccggtgccaccaccgcgctgctcgacgtgagcggcatgatgtgcggcggctgcgcggcgcgggtgcggtccatcctggcggcggacccgcgggtggagatggcggcggtcaacctcctcgctgagtccgccgcggtgcgcttgcgggcgccggcgccgccgggcgcgggggaggagctcgcggccaggctcacggagtgcgggttccccgccacggcgcgccgagggggagcggccgcgggggctggggagagcgcgcgcaagtggagggagatggcggccaggaaggaggaactcctggtgcggagccggggccgagtcgcgttcgcgtggacgctcgtcgcgctctgctgcggctcgcacgcgtcccacatcctgcactcgctcggtatccatgtcggccacggaacgtttttggatctgttgcataatccttatgtgaaatgtggcattgctacaactgctttgtttgggcctggaagagatatactctttgatggttttagagcattcaagcaaggttccccgaacatgaactctctagtaggatttggatctgcagctgcatttactatcagtgctgtgtccttgctgaaccctgactgggagtggaattcaaccttttttgatgaaccggtcatgcttcttggatttgtacttcttggacgatctcttgaagaaagtgcaaggcttaaggcatccagcgatatgaatgagctcatttcactgttatcacctcagtcgaggttaattgttacttcctcaagtgacaacccttctgcggacagtagtttgaattctgatgcgatcacagtcgaggttcctgttgatgatgtccgtgttggagactcaatattggtcctgccgggagagactatacctgtagatggtaatgtcattgaaggatcaagttttgttgacgaatcaatgcttactggagagtccttgcctgtagccaaggagactgggcttcctgtattttcaggaactgtgaactgggatggcccgctaaagattagagcaacatgtactggaccatcatcaacaatagctaagatagtccgcatggttgaggatgcccaagcacgtgaagctcctgttcaaaggctcgcagattccatcgcaggaccatttgtgtatactgttatgacgttggctgcaacaaccttttccttctggtattacattggcacacacttatttcctgaggttcttctgaatgatattgctggtccggatggggattcattacttttgagtataaagcttgctgtggatgtattagttgtttcctgtccttgtgcacttggattagctacacctacagctatcttaataggaacttccctaggtgctaaaagagggttactggttagaggaggtgatgttttagagcgtttggctggaatagatactcttgtgcttgataaaacagggacgcttacagaaggaaaaccagtagtgacttctattgcttctctggcatatgaggagacagaggtccttcgtcttgctgctgcagtggagaaaacagcattgcacccaattgcaaatgctataatgaacaaggctgaactactcaagttggatattccgatcacaagtggtcagcttacatcgcctggatttggttgtttggctgaagtagatgggagtttagttgcagtgggcactttggattgggtgcatgatcgttttgaaactaaagcatcgccaactgaactgagagaccttagaaaccggctggagtttatgttgtcaagtgaagcatcatcatcaaaccagtcgaagtcaattgcttatgttggccgtgagggagaaggaattataggtgctattgctatatcagatattttacgagaagatgcaaacttaactgtggagaggttgcagcaggaaagcattacaacgttcctgctgtcaggggataggggagaagcagtgacaagcattgggaggaccattggaatcaggaatgaaaacataaagtcttccctgactccgcaagacaaagcaagcattatatcaactttgcaagcgaagggacacagagttgcaatggttggtgatggaataaacgatgccccgtctttagcagccgcagatgttggaatagccatgcgaactcattcaaaagagaacgctgcctctgatgcagcttcagttgttctactaggcaacagactttctcaggtggtagatgcgctatccctgtcgaaggcaacgatggcaaaagttcaccaaaatttggcctgggcagtggcatataacatagtagccattccaattgccgctggagtgctgctgccacaatatgatttcgccatgacaccatctctctcaggggggttgatggcccttagctcaatctttgttgtcagcaattctttgcttctgcagctgcatgggtcgtttcagaacacagaaaaacggcagggtgatctgagctcaagattaaactgaattgttgggtttagtttgacccagccgaaggacagtggtattgaattatagagggttctgatactggttttccagctccggctaattgaactgagtcagaactataagtagcaagctattcgtgtcagtagtagcatgttcctgtactgtttgtcaacccaactatagtagcaagtatgacccagaaggacaataatctaccacggccttcaaaaacattgtaaattagtaatggtactgctgtaagcctgtaaacaaagttaaggcgtatgactatcgttcatggtctagcaatgtgcaacaagctataagcttcatttcacacaggtatgggaagttcagtcaacagaactagtcgaatagcaagcagtacacatagcaactatggccacactataatggcaatcatacccctgaacaatagcatagctaggagattactggcgattcttctacttctacttctacttccatgtgttggttgttctaggcttctagcactcttcgtatccatcgttgttggcccagtgcaccttcttgccgctgctgctccgcatcaccttctcgtcgacggccttcaccccggcctccgcagctgccgccgactcggcctgcacacgcgccatcttcctccctcgctttctcgccgcggccgccttctccgtctcggcctcctggtactccctcgcccaacgccggctcagcacgcatgttgcagctagcgcgacggcctgcgccatgaacatggccagcagcagtagctcctcgaggaacgccagcacgaactgctcccggcgatccctggcggagccgaggaggcggaggctgtggtcgtggcggaggaagaaggccagggaggccagtgcgtggccggacagcgcggcgagcgcgagcgccgtgctcgcggcgaggcagaggtgggtgagctgcgcgtggagcgctgcgagtgcggagagcagggtggtggcgtgcacggagacgagcgcccagccgaagggcgtcggccgcgggcggaggaggaagaccgggccgagcgcggcggcggcgaggacgaggagggagaggttgaggagccagaccagtaggttgggaagagaggagcatctccgtaggctcgagttctcggtggcggacgccattgctttactgggtgcttgtgttctcagtgcgacagtgatcgtgtgagtctgatctgttgctgaatgctgagttcagaggagc

SEQ ID NO: 1249 - DNA, 3943 bp, Zea mays
ccaacatccgcctcagattcccgtccatcgttcgtctccgctgtttcccgtccctcgtcctccgccgaaaccctagcagagctcctcctccgccttccctccggtcgccggagtgcctggtccggtcacgggggtggtttcgaggcctggattggcggagtgtttggaaggaggcaggggcgggacagtaggaatacataaattttctaggttttcagccgccctatgcctgacgcatccacgcgcccacgcctgtctccgcacacacgctgccacgcacaggcaccgctcgtccgctccagctcttgcgtcgcacggacagacacagctccaccctccatagctcctcttgccgctgcttgtgcgccggatcaccgcccccggcctgagtcttcggacagtgcgtccgcggcagagcatctgcggcctgccccctgcgggcggcggcgccagtgcggctcgccccctctggccgtcttggcctgattggaccgagaaccaggaggagggacatggaggggttcgccaagccgtccacgagctcggggtctggggtcacggttagggcctccgtcgccgcggcctccatagaggagaggttcgccgatctgtgcaaggccaagctgggactggacgagagcacgacgaggcaggcaatgcagctcttgaaggagaccaataacattctcaagtccagcatgtcttccttgggcggcggatcgcccgaggagatcgagaggttctggtctgcctgtgttctgtactgtgtgtcaaggctcagtaaagcggggaggtcgaaggaagatggcagtgtctcactttgccagattctgagggcatctaagctgaacattgtggattttttcaaggagatgccacagttctgcataaaggttgcacacattttgactggcctatatggttcagattgggaaaaaaggcttgagttgaaggaactgcaagcgaatgttgtccatttaagcttgctaagcagttactacaaacgtgcataccaggagctattcttgtcaaatgatggcaagagttcagacaattcttcagaatcaaataaccaagaggcttctgattattatcgctttggatggttgctctttttagtcctaagaatccaaacattcagcagattcaaggatcttgtgacatccacgaacgaactggtttctgtgttggctgtacttatcattcatgttcctgtgcgactaaggaatttcgatataaaggattcatcctactttggtaagaagtcagataggggagtcagtcttattgcttctctttgtgaaaaacatcatacctcagaagatgagttgagcaaagcactggagaagacaaatactctcataatggatattctgaaaaagaagccatgcccagctacttcagcatgccaacaggataatttgtctttcatcgatccagaaggcttgacagtttttaaggatttgcttcagggagactcattgaaaccaagtctgataatcctggaaaaggaatatgaaaatgcaattaacacaaaaggtgagctagatgagcgcatgtttgctaatgatgaggacagtttacttggtagtggaagcctttcaggtggagccattaatttaccaggcacaaagagaaagtatgatgttatggcctcacctgcaaaatcaatatcaagcccaaatccaatgtctcctccacgcttttgtctatctcctaaaggaaacggcttttgcaactcaaagatggctcctagcactccagtgagcacagccatgacaactgccaagtggcttcggaatacagtatctccccttccatcaagaccttctggggaactgttgcgcttcttctcggcctgtgacaaggatctaacagatgacattgcacacagagctgggattatacttggagccatattcacgagcagttcttttggtgaacgaatctgtactagtatgcgaagcgcaagtaggatggatgctatctggacagagcaaagaaaaatggaagctcttaagctatattatagggtcctcgaatctatgtgtagggcagagtcacagatcttgagtgggaacaatcttacatcacttttgtctaatgaacgtttccatcggtgtatgattgcatgttctgcggagttagttcttgcaactcacaagactgtcactatgatgttcccagctgtgctggagaagactggcattacagcatttgacttgagtaaagtcatagagggttttgttcggcatgaagatacactcccaagagagttaaagcgccatctgaattctcttgaggaacggcttctggaaagcatggcatgggagaaagggtcatcaatgtacaattccttaatcgttgcgaggccggcactgtctgtagaaataagccggttaggtttactggctgaaccaatgccatcgcttgatgcaattgcagcacatcataacatctcattgggtggcctgccacctcttcccttccagaaacaggagcgtttgcaagacaaagatgaagtcaggtctcccaaaagggcatgcactgagaggagaaacgtgctggtggacagcaattcattgcggtcaccagtgaaggatattattaaaccaaagttaccacctctccaatcagcttttgcaagtccaacaaggccgaatcctgcagcgggaggcgaaacgtgtgcagagacaggaataggcgtgttctttagcaagatatcgaagctcgcagccattagaatcagaagtctctgtgaaagactgcagcttccccagcaagttctggaacgggtgtattcccttgtgcagcaaatccttagccaacagactggccttttcttcaacaggcacattgaccagatcatactatgcagcatatatggagttgccaagatctctcaactggaactttcattcaaggagattattttcggctacaggaaacaacctcagtgcaagccacaagttttccgaagcgtctatgttcattggcccccaagaagccgtaacgggaaaacaggagaagaccacgtcgacatcatcactttctacaacgaagtattcattcctgccgtcaagtccttgttggtggaggtagggcctggcgccagcgccagtccaaagaagaaagaagaggaaaaaggtcctgctgatgtaggtccattcccagaatctccccggctggctcggttcccgaacctccccgacatgtctccaaagaaggtttctgctacccataacgtgtacgtctcaccgctacggtcatcgaagatggacactcttctgtccccgagctccaagagctactacgcgtgcgtcggcgagagcacctacgcgttccagagcccctccaaggacctgaaggctatcaacaaccgcctaaacagtgtgtccggcgggaagaaagtcagcggccggctgaacttcgacgtcgtcagcgatctggtcgtggccagtagcctcggcagtgaccgtgacgccaagcctgcggccgatcctgccaagacgacgccggtgaagtgcgagccatctgactcgtgatcgtcgtcgactctgatgaggcccttgttatagattgttatgtttcagatactcgtgagttagtagatggtaactagacgaggaggcccttgtttctgtttgcgtcttttctttttttgacgtgggaaacatctctgcgagcagctctacgttgtgtaaaatatatataaagaaagctgccccgatggctccccttaacccaactcgcgttgtagggagatgacaagcaccatggccatgtaacttcatagaggttttgagagagctgtgtaaatgcaagatggccatgtatcaacagcggatattttgttcgtggccgttttactgtcaggtggcggcggcctgtcagcagcgcgtccctgactggttcgtaaatggacacctgccattactgttct

SEQ ID NO: 1250 - DNA, 2532 bp, Zea mays
gcaactcggcaaccaacggatccatccttccagttccagcttctttatctctcacgcacgccgttcccttcgcctcctctgggccaaccgcgctcgtctccccccagtcctccctcttccatctgcatctcctctctccctgtccctctcctatcaaaaactgctttgcgccccatatataccagggcgcccacccacacacagagagcaacctccaaaatggatgattggatgcttccctcacccagcccaagaacactgatgccaagcttcttcagtgaagagttcatctccactccgttctccaacatcttcgctgacgatagaggcagcaaaccccaggatgaaaacgaggacagtaacacctgcattggttccggtgctcacgaaacctctcaagatgtgaaatgccatcgtccacagatcgaatcgaacatttttggcgtgaatcagaaaccgacctctcctggaggtcttgcggagaggatagctgcaagagccggttttggtgtcctgaaaattgacatatcccgtgtcggttcatctggtgcggcgattcggtctcccgtgacaattccatctggtgtgagcccaagggaacttcttgagtcgccggttttccttccaaatgccatttcgcaaccttctcctaccactggtaaattgccattcctgatgcctaataattttaaatcaacaatgctgtgtggccccgagaagtctgaagaccacttacacgaagattctgcgttttccttccagccctttttgaggtctaaaccaccaacattatggactgcaaagaaggggccaagtgttgttcacgaaaccgggtccttatcaaaggatagccaggaggagctaaaccttcatgctaacccagcagctgcgaccgagcatgaaaccgaggaaagtctagttattagacctaaggcatgtgattccatgttcgacaatggtcatccttcttcccctgacgaaggaccagaacagagcgaggaaaaccaaaaccgggaagattgttcagctccggtcactgcccccggcgaggatggatacaactggagaaaatatggacaaaagcaggtgaagaacagtgagcatccaaggagctactacaaatgcactcacccaagttgccctgtcaagaaaaaggtggagcgttctgtagaaggtcatgtaacggagatagtttacagaggttcgcatactcacccactgccgctgcccagccgccggtcgagcgtccctcccacgcagctcgagtgtggttcacaatctgatggtctggagaacttgagctccaagcctgggcctgcctatcactcagcagcttcacaatcacagggaattgctccagatggccagttccaagatgtgcatagggaagctcttgaaacaaaactgtctggctctcttactacaactgagattgctgacaggcccgttatggatgtctcatcaacactctcctccaatgagaatggtgatagggcagttcctccaaccaatggcaggaacgaagatgagaccgaatctaaaagaaggaaaatggaggcatctgccgctactaacactaccaccaacactggcattgacatggcggctatggcatccagggcttcccgtgagccccggattgtcgtgcaaacgacgagtgaggtcgacatccttgacgatggctaccgctggcgcaagtatggccagaaagttgtgaaaggcaacccgaacccaaggagctactacaagtgcacctacgcgggctgctcggtgcgcaagcatgtcgagagggcctcgaacgatctcaagtccgtgatcacgacgtacgaggggaagcacaaccacgaggttccagctgccaggaacagcggcaacgggcatccgagctctggctccacaccagcaccaccacaggggagcggcggccttcaccggaggctggagccgccacaggtcagcatccctcggttgagcgctgctgctgccgccgccgccgccgccgctgcctacggctcgctctcgcttcgtttcccaccacagctcagcgcagctcccgggggtttctccttcggaatgctccgtcccactggcatggcaccgtctctgggcggcttcttgccagcgcagatgccaggccgtgggttgccgatgcagggctgcgcgggcctggtgctgccgagaggcgaggcgaaggtggtgagcccagagcagcagtccggattgccggtggcgaacgggaatgccgcggcaacctaccagcagcagcagcagcagctcatggccaggtgggctcagggtcatcagatgtgaatactcactccagcaggcacaagagatgaagagatagggtttgtttttttctttttcctttttttttgttgcttgtgtacataaacaatgtcattgtttgtggtttcttctaccgtagctcctttgtttgcttttgagtacagatgattctgataatagtgaggagggagaggggaagggatgaacttggctgctgtgtttcactgaactattcagactagt

SEQ ID NO: 1251 - DNA, 4314 bp, Zea mays
gggattttgatacatatgtatcccatattagggagccacatgtgtggggaggcgagccagaattgttcatggcgtcccatgttcttcagatgccaataacggtttacatgcgcgacgaggatgctggcggtctgatagcaatcgcagagtatggccagcagtatggtaaagaagacccaatccaagtcctgtatcatggttttggccattacgacgctctacagatcccagcaaaggttggatcgaagaggaaactgtagacgctgcgcgccgcgagcttgaggtacgctccttgttccagtgtttatacaaccttgtcgaacactcatgctatatgcatgcgagtgtggaagaagacaagcttaacatgaaatggcgttaactcgccgccatgcataaatgttattacatgattcatgtacttccccaggagcagatgagttggaacacttcacttgttgtgttttctctctcctcccatatcatctatttcccattcataatttgatacttaattccaggtgcattcgttgggcaaccatctaacctcctactactacagagaaaattcggaaacaataagctgcatgcatgcatgcattgagatgtgtacctgtacaaaatgtcaatccaagcttcggatgctgaatctgtacaccatgccctgaaaaccgcacttgtgtagtttgtgtgactggtacagtagaagatagaaggggcgccggggacccatttaccatactctgatgactgcaagtacgttcatttagagtgaagtaagctacacagctcaccagttggtccagacgtccagtgagcgtacatgttttgaatgaggggcatgtggagagcacatagacagttgagtccggcactctcctggatcggaattgaattttatttgcagcataatcatgtgtggttctccaactgaaccatagcctcgttcttctcacccccttcaaaaaaaacgaggggctggctggctggctggtagtagtagtaacctgcttgttagctggactggtgatttcaaaccgtgatgggtgggtgcacatgtcctgatgtcactcgaatcgggttctgttttgccgcgtcgcctttgcacgccgccgtgatgtgccgctgccaaccttggggggatttcgaacggggacgacgaaccagatccaccgcgcagcgtcacccagctagcctgctgcctgctggactggaaccgggggaagcctccaaggcgaaggcagcagcaggaacagtagaagcttggggatgtggattactagactattattatttattagactagactagagtagtcatggggatcaacgacaccccttgagatctcccacatgcaaacgcgctcgattaacctttttttactactttcccaaacaaaagtcgccctcccgaccaactatatcaaaatcaaatcaaatgctttcaaaccaatcgaatcaccaccgggcggtccttgcagcgcattcatttcaaatcgctttccccaaactacccctgccttccctcaatgatctagtctacaggtgtgggtttcccgtcatttcgccgctaaatcccagtcacctaaaccccacgcccctatcgctcccctccttccccttctccgcagctcatcctccccttgtctgcgacccagggaatggcagcactgtcattctagtcactcaacaaccaccaccacctgcacccccgctcgctccgggcaatggcggcggttctggcggtcctggtgtcggcggtggccgccacgtccatcacggccgcggcgctcaacacggacggtctcgcgctgctggcgctcaagttcgccgtctcagacgacccgggcggcgcgctgtccacgtggcgggacgcggacgccgacccctgcgcctggttcggcgtcacatgctccaccgccgccggccgcgtctccgccgtcgagctcgccaacgcctcgctggccgggtacctcccgtcggagctctcgctgctgtcggagctgcaggcgctgtcgctgccctacaaccggctctcggggcagatcccggcggccgtggccgcgctgcagcggctggccacgctcgacctcgcgcacaacctgctgtcgggcccggtcccgcccggggtggcgcgcctcgtctcgctgcagcgcctcgacctctcctccaaccagctcaacggcacgatccccgccgcgctggccgcgctcccgcgcctggccggcgtgctcaacctcagctacaaccacttcacgggcgccgtcccgcccgagctcggcgccatccccgtcgccgtcagcctcgacctccgcgggaacgacctggagggggagatcccgcaggtcggctcgctcgtcaaccagggccccaccgcgttcgacggcaacccgcgcctgtgcggcttcccgctcaaggtccagtgcgcgggggccgccggggcggacgacgacccgaggatcccgaactccaacggccccaccgaccctggcgctgcggcggaggtcgggaggaggggaggcccgaggcagccgcggcggcggcgctcgtcgccggcggtcccggtcctcgcggccgtcatcgtcgtcgccctcgtcgccggcgtggttctgcagtggcagtgccggcggcggtgcgccgccgcggccggggacgaggggaaggagtccggcaaggagaagggcggcggcgcggtgacgctcgccggcagcgaggaccgccgcagcggcggggaggaaggggaggtgttcgtggccgtcgacgacggcttcgggatggagctggaggagctgctccgggcctccgcctacgtcgtcggcaagagccgcggcggcatcgtgtaccgggtcgtccccggccgcggccccgccgtcgccgtccgccgcctcagcgagcccgacgacggcgacagcgatggctccggttctggctccggctggcgccgccgccgcgcgttcgaggccgaggctgccgccatcggccgcgcgcgccaccctaacgtcgcccgcctccgcgcctactactacgcccccgacgagaagctgctcatctacgactacctccccagcggctccctccactccgctctccacggtggcccgacggcgtcgccgacgccattgccgtggtccgtgcgtctgtccatcgtgcagggcgcggcgcgcgggctggcgtatctgcacgagtgcagcccgcggcggtacgtgcacggctgcatcaagtcgtccaagatcctgctggacgacgagctccgcgcgcacgtgtccgggttcgggctcgcccgcctggtcgccggcgcgcacaaggccgccggcggcgggcactccaagaagctcggcagcgcggcatgcgcgctccgaggcggtggcgcggcgtcgtacgtggccccggagctgcgcgcgcccggcggcgcccccgccgcggccgccacgcagaagggggacgtgttcgcgttcggcgtcgtgctgctggaggccgtgaccgggcgcgagcccacggagggggagggcggcgtggacctggaggcctgggtgcgccgcgcgttcaaggaggagcggccgctgtcggaggtggtcgaccccacgctgctcggcgaggtgcacgccaagaagcaggtcctggccgtcttccacgtcgcgctcgggtgcacggagcccgaccccgagatgcgcccgcgcatgcgcgccgtcgccgagagcctcgaccggatcggctgacttccagcgcgacggcgtccggccggccgccggttactgatcatcaactacgtaggtgcaatccaacgcataaaagagactcgcagtcctgttcatgtagattagcgcagttaagcattgtggatttcagagacggtaaacgcaggtaaaaacaatcatcatccgctccatctgtgaatgacgaaggtgaatcactcgacgtagcaggctataggctagcagccgtgctaatattttgtggcaccccttgatccattccaaagcgaactctgttgggagttttctatcgttttgccactgcctacaactgtgcggcgctttgcccaaaagcttgcgatgcgttccttggggacctgggactctgggaggcagagagagcagacaggcttttggccctaggctgtgcggttcacctttggcttggtcgaattgactctgaaaagatgcgacaatgacacaaggtgtgctgcacccttctggtcagtgcactgtcctcttgcctgtgctgctgtgcagtgcaggagcagcatgcttttgcaagtttgcatgcgtaggagtaagtgacaaacaaccaacaggacgccagcgtcaagaggtgt

SEQ ID NO: 1252 - DNA, 2135 bp, Zea mays
accacgacacctcgctcccgccacgccgtggggcccatgttcacgcccacctcccctgtccgcatgctccgcctcctccgcacgaatcgcggcgcgcaatcgacaaacttcatgcctccacgtctcagccgggaacgctataattaggcctgccaccgcctgctcgcctcgcagaagccgcagccacgcccccacaccaagccgtatcgtcttctccctcttgtccggttcgggtggtccgcggtcggggtgagtgagtgagcagctttgcttctccatctccccgttcccttccctccccagccccccggcccggcggcggtacgtgaccctgacgccgcagcgctagctagctcgccggaacggcaggtggcggcgcgcgacctgagagcacagcagcaccggaccggctcaggcaggcgaccggcagaaaagatggcgggagcagcagctgtggagacggcggcggcggcggcagcggccaacggaaaagcgtgctgccacgccgccaaggggcccgggtacgccacgccgctggaggccatggagaagggccccagggagaagctcgtctacgtcacctgcgtctacaacggcactggaattaacaagccggattaccttgcgacggtggatttggatcccagctctcctacatactcccaggtgatccacaggctcccggtcacccacatcggcgacgagctgcatcactctggctggaactcctgcagctcctgccacggtgacccatcggccaagcgccgcttcctgatcctgccttccttgctgtcaggccgtgtgtatgtcgtcgacacagcgacagacccaagggcgccatccttgcataaggtggttgagtctgaggacattgctgagaatactgggcttgggttccctcacacgtctcattgccttgcgtctggcgacattatgatttcttgccttggggacaaggaggggaatgcagctggcaatggcttcctgctgttggattcagagtttaatgtcaaaggacgttgggaaaagccaggtcacagtcccttgtttggatatgacttctggtaccagcctcgccacaagacgatgatcagttcgtcatggggagcccctgcagcgttcaggacaggtttcgatcttcaacatgtccaggatggcctgtatggaaggcacctgcatgtgtacgactggcctggcggtgagctcaagcagacacttgatctaggtgacactggactccttccccttgaggtgaggtttttacatgatccatcaaaggacactggctatgttggctgtgctttaacaagcaacatggtgagatttttcaagaccgcggatggatcgtggagccatgaggttgctatctctgtgaaaccactgaaggtccgcaactggattctgccggaaatgccaggattgataactgatttcgtcatctctcttgatgaccgttatctctactttgtaaattggcttcatggcgatattaggcagtacaacattgaggatcccgcaaagcctttcttggctggacaagtatgggttggtggtcttcttcagaagggcagtgatgtcgtctatgttactgatgatggtcaggaacagcagtacaatgtgcctcaagtcaagggtcatcgacttagaggtgggccacagatgattcagctgagcttggatggcaagaggatatacgtgacaaactcacttttcagccgatgggatgagcagtttttcggtgatgatcttgtcaagaagggctcccacatgttgcagatcgatgtcgacaccgagaaaggaggcctggctgtcaaccccaacttcttcgtcgattttggcaccgagcctgatggtcctgccctggcccacgagatgagatatcctggtggggactgcacctctgatatatggatctgaggtcaaggattcggcgtaattaacaggctgctggagaatccctgttgttgtatgcactgtaattaacatggtatccgtgcggtgttctgtcttgtactgcgactgttgccagtggaataaggcatggtttcatgagaactctagattaataaaagaagtcctgattctaaattttctgattgtcactgctctggtttctttatgttatgtgtcgtgag

SEQ ID NO: 1253 - DNA, 1882 bp, Zea mays
tccccgtccacgcctccacggccaagcgcctcgaaggcaaagcttccactagccacaggccaacgaaatcgcaaagcgaagctacggccaccgaccgacgttccaagaagcgaaacgaaacgaaaatgatgatgatgatgggagagagagcgcacgcgcctccgtggcagcgctcgccggcggccagcggcgtcacggacgcggacgacgcgtctccgtacgccctcctagcggcgctgcagcattacctgccgtcgaacgaggtggcggcgtacgacgaagacgacgaggaggcggccctggcggcggcgaccgccgccgtcgacgcgtacgcctgcgacgagttccggatgtacgagttcaaggtgcggcggtgctcgcgcgggcggaaccacgactggacggcctgcccctacgcgcacccgggggagaaggcccggcggcgcgaccccaggcggtaccactactccggcgccgcgtgcccggacttccgcaagggcgggtgcaagcgcggcgacgcgtgcgagttcgcgcacggggtgttcgagtgctggctccacccgtcgcgctaccggacgcagccctgcaaggacggcaccggctgccgccgccgcgtctgcttcttcgcgcacacgccggaccagctccgcgtgccgccgccgcggcagtccagccctaggggcgcggcggcggcggcgtcgccgctggccgagtcgtacgacggctcgccgctccgccgccaggcgttcgagagctacctcaccaagagcggcatcgtgtcgtcgccgccgccgaccagcacgctcgtctcgccgccgaggtcgccgccgtcggagtccccgccaatgtcgccagacgccgccgccgcgctccgccgcggctcgtggccgggcgtagggtcgcccgtcaacgaggtcctcgcgtcgatgcgccagctgcggctcggcggcggctcgccgaggtcggcgccttccggcgggtcgttcttgggcggaggctacccgttcgggtccccaaagtcaccggccgggctgtacagcctcccgtccacgccaaccaggccgtccccggtgaccgtgaccaccgcctccggcgccaccgtcctcaccgtggaacgcctcaacctcggactcatcggggacgaggagccggtgatggagagggtcgagtccgggagagccctccgcgagaaggtgttcgagcggctcagcaaagaagccgccgttcccagcgacaccgccgcatccgccaacgttgagggagcggcccccgccccggatgttggatgggtctccgacctcatcaactgagggaactcgtggaactaccagctcagaagttcaggggggaataacaaaaaaaaagtaggaagatttttaattttttagttctttacaaatattttcctggtccttgtacagatgttcctgctttgtgaatagtcttggatggttgtcgaagggaggggaggcagggaatggttgatttgttatgaggtttcagatgatggcatgtcggtgaaggagacaaggtgcccagcaaaccatggtggaaaatggatcaagaagacatgtgcaggcgaccatgtatacgggttgtctagatgcacatggtgtcttccctgcctgtgaggtgggagcatgggaggcgatcatggcggcgatccaagaccgaacccataatttccgcgagcgattccagaacgaacggcgtcttgagttgatgttcattctgctatttgccttttaagattcgacgagttattactgctctgtgatttttctcaaagtatttccatattgatctatgcatgcatgtacaatgtcagtactgctactttcgctgatactccgtaacaaaattaattaaaaccggcgttgct

SEQ ID NO: 1254 - DNA, 3443 bp, Zea mays
aactcatggaggacatattgtccctagcagcgtggtggacatattattgtttcctctccgtccatcacccaccccggtcggtctcaactcaagctctcagccacacacgccgccatcaggcacgtatgcgacctgacctcgtgttacatgctactacggccgtgtatataacagcgatcaatctaccgtgaccacccccatcctctctaacccacggaagcaagacaaaagctcgtgctggacgacatctcccctgtcgatccacgaccatgatgcagcagctccgtcacagccagccgagcccgtgcctctgcggcctgcgggcggcacggcctatgctcgccctcggcgcagcagcatcccgttcgcggcccgccggaaaactgcaaccgagcgtctgcctcggcctcggccatgtagccccagccgcggcgagaggacagccccgtccccgtgccgttgccgactcggcgctgggagcatcgcctacgagcgtgcatgtcggaggcaagctgctgctgcagaacttcgccgccgacagccagcagcggctcaagctctccatccagcttgtcagcgccaccgtggccgatcccgacgggcgcggggtgaaggcggaggcgtcggtgctggacgccgtcgtgggcagcggggacagcgagctcgacgtggacctgatctgggacgaggcgctgggcgcgcccggcgcggtggtggtgaagaaccactccgacttccccgtgtacctgaggctgctgagcgtgccggccggcgtcggcggcgccgacgacgaggccgccgccgtccacttcgcctgcaacggatgggtgtaccccgtcgacaagcacccgtaccgcctcttcttcaccaacgacgcgtgtgtcaaggaagaaacgccgagcgccctgctcaagtaccgggaggacgagctcggcgcgctccggggagacggcgagacgacggagcgaccgttccagccgtgggaccgcgtgtacgactacgcgctgtacaacgacctggggaacccagacctgcgccaggacctggcgcgccccgtgctgggaggatcccaggagtacccgtaccctcggcgtaccaagaccggccgaccagccgccaaaacagatcctcggtcggagagcagagcgccgctggacgaagagatctacgtcccctgcgacgagcgcgtcggcttcgccagcatccccgcgccgacgcttccgccgctgggcgggcacttcaggtccctcgccgatgtctaccgcctcttcggcctcgacgacctcggccggctcccggaggccaaggcggtcatcaacagcggcgcgccgttccccgtcgtgcctcaggtcatttcagtgaacccgacacattggcggaaggacgaagagttcgcgcggcagatgatcgccggggcgaacccggtgtgcatcaagcgcgtcaccaagttcccgctggcgagcgagcttgaccgcggggtgttcggcgaccaggacagcaagataaccaaggaccatgtcgagaagaacatgggcggcatgacggtgcagcaggccgtagaggaggggaggctgtacgtcgtggaccaccacgactgggtgatgccatacctgaagcgcatcaacgagctccctgcgagcgaggagaaggcggaggtgtcgcagaggaaggtgtacgccgccagaacgctcctgttcctggacggcgaggactcgtcgatgctcagaccgctggcgatcgagctcagctcgccgcacccggagaaggagcagctcggcgcggtcagcacggtgtacactccaccggacagcggggacgacggcatcacggccgggaggttctcaacctgggaactggcaaaggtttacgcctctgccaacgacgcagccgagaacaacttcgtcactcactggctcaacacgcacgcatccatggagccgatcgtgatcgcggcgaaccggcagctgagcgtgctgcacccaatccacaggctcctcaagccgcacttccggaagacgctccacatcaacgccgtcgcacgccagatcatcgtcggctcgggtgaccagaggaaggacggcagcgtcttccgtggcatagacgaggtcacgtacttccccagcaagtacaacatggagatgtcctccaaggcgtacaaagcctggaacttcacggaccttgctcttcccaacgatctcatcaagagaggtctggcaaaaggagatccaaagaagccagagacggtggagctggcgataaaggactacccgtacgcggtggacgggctcgacatgtgggcggcgatcaagaagtgggtggctgactactgcgccatctactacgccgacgacggcgcggtggcgagggacagcgagctgcaggggtggtggagcgaggtcaggaacgtggggcacggcgacctggcggacgcgccgtggtggccggcgatggactgcgtcgccgacctcgtggagacctgcgccaccgtcgtctggctgagctcggcgtaccacgcgtccatcagcttcgggcagtacgactacctgggcttcgtcccgaacgggccctccatcaccacgcggccggtgccgggcccggacgccggggcggaggtcacggagtcggacttcctggcgagcgtcacgccggtcaccgaggcgctcggcttcatgtccatcgcctcggggccgatggggctcaagggcacggaggtgtacctggggcagcgcccggacacggagcagtggacgcgcgagcggagggcggccgaggcgctggcggagttccgggcgaggttggaggaggtcgcgggcaacatcgacaggcggaacgcggaccctgcgctgaagaaccggacggggcaggtggaggtgccctatacgctgctcaagccgacggcacagcccggactggtgctccgtggcatacccaacagcatcaccgtttgagcagcagagcgccgtcggcagctgtcagctgtgtacagtacagaataataaggtggtcgtgtttggcgctatctccaccacataaacgtgaaaatgtttttttttgaattatatggacatgcagggccgcagcccgtaagcctggccccagtttcggttttctgttttttttttttttgcctcgatctggtgatcagcaagccacgtcggtccgggtgatctcgctaccggagatagaatgtgtacacgaaacctaataggtttttactccattaggatacgaggttgagtcaattttcatacctatagatttgttaatgagcataaatttatacccgacgagttcatgagtataagtttattatgtgaaccgtgggtttttaaacccgaccaaacttagtgtatattgtcattttattttataaacggacaataaacttgttatctccttatttacttcctgttttttatcaaatataaatgtataagtagttg

SEQ ID NO: 1255 - DNA, 1681 bp, Zea mays
atgttggtccttgatgcaatgtatccggccctcttcttcctccgtcctccgacctccgagatttgaaaccgtgctgcgaatcccccactcataaaattgaccactcgtcctcccccctgcccgtcatcatgcttaatctctctccagtttcccccagttcccgtttccatctccatcctcccccccgggagcaggagctgcagccaggagtcgagtcggcgtcgtcacgggagatatcagcttcgctatcaccggatccccctctgctccctccgcacctcccatctgcgctctctgttttcttccgcgcaccccggctgttggtgtcccgtccggcagcgttgctggtggctgaatccgagcctttgaggggtctgctgccgccgccgccgccgctgtcaccgctcttgagatctctttattgatctggagagattaaagagggattcttgccttcctactggagcaagagaaaggggagaacgtgtttcttcaggcgtggttgaacagtgaggaccggagaacaatgcgaggttcgggatttaaggtaactttttcctgctgcgcgatttcgatatgttttaggcgattcttcatctttcttttgattgagttcttcggattcttcaaagttggtgttgtccacactagcttctttgctgaaaatctctgggggaaaggttcgataatcttgccactgtgatctacccatcatcatctaacactttggttctatctccttacagatgttctggctttaggggcagttcttctgaagcaggggacgggcgattcgaccaccggagctcagatctgattacaaaacgttcagaaaacacaaggcgttctcacaccgcctttcacttcttgcttactttggcaaccactcactgcgactggtctccacctccacctacaccaaagaacacatggcaagccgatctagcgcgatggaaggaggggcggcaatacaaaggaggaatgccgtgaagcggcatctgcagcagcgtcagcaggaggcggatttcctcgacaagaaggtcatcgcgtccacctacttcagcatcggggcgttcctcgtgctcgcctgcctcaccgtctcgctgctgatactgccgctggtgctgcctcccctgccgccgccgccgtcgctgctgttgtggctgccggtctgcctgctcgtcttgctggttgtactggccttcatgccgacagatgtgcgcagcatggcctcctcttacctgtaaatagataaataggtcttggccagattttctgtgttttgcagctgcaggattcgtcctaagacgagtcatgagtgtaatgtgaagcaacttctccagggatagatctcaaccaagtttggtagccatacgaagttattgactggaatttagaacatatagttgtgcacaatttcgaacatatcttgtagtggagagcgggccgagcacgtgcgagtaactccagcagtagcaagtagcaaccaaatcagatttgtgtgctcacctctatttttattgatctaaatttacgctttcagtctaacagtagaattcaaataaaggctctccaatttcttcttatagtctgtgaccatgagacctgtaaggctatgatcgtgcataatactcgtttgcaccgtagacaaagtaaaatttaaaacaggagataagaatga

SEQ ID NO: 1256 - DNA, 929 bp, Zea mays
aaaacagcaaacacccgacgagcgtcgatggcgtgctgttcactgcgcagcaaaaagcagcgagccacgcggagacgttggggctgctgcgcattttgtcgagcgcctagcaagcatcaatggcgcaggcgcagcagcacacacacaggaaggaaaccgagtcacaaggcatggagggaatgctccgcggcatctgctgcagcgcgccatgggagagggctgcgcctgcgaggagaggcggggcgagctgctgctgtgtcccgccatgagggggagatggagctcagctccctgtttgctgcacgccgtggacagcagggggaggaagaagacccggctgctgttgcgcgagggagaacgagtaagggaaaagaaggggcgtcggcatgggggatttttctgggcgtccatgggagggagctgctgcgtcgccatggacagggaggcagcgccatgaggaaactcgagctcgagccatgggaaagggaagggagctcgctggggcatctcctgcgccatgggaggaagcaggacgccatggctgggggggcgcgtggagcagagagcctgctgctcgccttcagcaagggcgccgagttgggctggaagcagccgaggagggagctcgcccgcgccgtgaaggagagctcggcggcaagggtgcctggaggaaggagctcgccgcagggaaggctggcgccatgggagcagctcggcagagagcttctctgcgccatgagcaggagagaagagggaaccggctgggagaaatggcgccgtggaggaacgcaggcagggcgtcggggcctgggcgtccatggctgcaagccttgctccctgcttgctgccgtgggagccagggaggaagaaggcagggggatgcgtgcgttggctgggaggaggagagggagaaatgttgtggcggctag

SEQ ID NO: 1257 - DNA, 3533 bp, Zea mays
cctacgctgccactctatcgcccagccatacagcagctaccccgctgcctgtcactgagccagcgcggcgcaagtgcgcaaagccgagcgcgagaacccacgaaaccaacccagagcccccattaaggcaggctcgctgcagcacgtctcgcgctccatcgccgcctgtcctcttcctgtaatgtcactcccccgatgcctgtgcgcagctcagtggccatgacgacgacggccgcccgtgctctcgccgccctcgtgctcgtcaccgccgccgccgccgccgccgccgtcgccgacgatggggcggcgctggtggagatcaagaagtccttccgcaacgtcggcaacgtactgtacgattgggccggcgacgactactgctcctggcgcggcgtcctgtgcgacaacgtcacgttcgccgtcgccgcgctcaacctctctggcctcaaccttgagggtgagatctctccagccgtcggcagcctcaagagcctcgtctccatcgacctcaagtcaaatggcctatccgggcagatccctgatgagattggcgattgttcatcacttaggacgctggacttttcattcaacaacttggacggcgacataccattttcaatatcaaagctgaagcacctggagaacttgatattgaagaacaaccagctgattggtgcgatcccctcaacattgtcacagctcccaaatttgaagattctggacttggcacaaaacaaactgactggggagataccgaggcttatctattggaacgaggttcttcaatacttgggtttgcggggaaatcatttagaaggaagcctctctcctgatatgtgccagcttactggcctttggtactttgatgtgaagaacaatagtttgactggggcgataccagacaccattgggaactgtacaagttttcaggtcttggatttgtcttacaaccgctttactggaccaatcccattcaacattggtttcctacaagtggctacactatccttgcaagggaacaagttcactggcccaattccttcagtaattggccttatgcaggctctcgctgtcctagatctgagttacaaccaattatctggtcctataccatctatactaggcaacttgacatacactgagaagctgtacatgcaaggcaacaggttaactggatcgataccaccagagctaggaaatatgtcaacacttcattacctagaactgaatgataatcaacttactgggtcaattccaccagagcttggaaggctaacaggcttgtttgacctgaaccttgcgaataaccaccttgaaggaccaattcctgacaacctaagttcatgtgtgaatctcaatagcttcaatgcttatggcaacaagttaaatggaaccattcctcgttcgctgcggaaacttgaaagcatgacctatttaaatctttcatcaaatttcataagtggctctattcctattgagctatcaaggatcaacaatttggacacgttggacttatcctgtaacatgatgacgggtccaattccatcatccattggcaacctagagcatctattgaggcttaacttgagcaagaatgatctagttggattcatccctgcggagtttggtaatttgagaagtgtcatggagattgatttatcctataatcatcttggtggtctgattcctcaagaacttggaatgctgcaaaacctgatgttgctaaaactggaaaacaacaatataactggcgatgtctcttctctgatgaactgcttcagcctcaatatcttaaatgtgtcatacaataatttggctggtgctgtccctactgacaacaacttcacacggttttcacatgacagctttttaggtaatcctggactctgtggatattggcttggttcttcatgtcgttccactggccaccgagacaaaccgccaatctcaaaggctgccataattggtgttgctgtgggtggacttgttatcctcctgatgatcttagtagctgtatgcaggccacaccatccacctgcttttaaagatgccactgtaagcaagccagtgagcaatggtccacccaagctggtgatccttcatatgaacatggctcttcatgtctttgatgatataatgaggatgactgagaacttgagtgagaaatacatcattggatacggggcatcaagtacagtttataaatgtgttctaaagaattgcaaaccagtggcaataaaaaagctgtatgcccactaccctcagagccttaaggaatttgaaactgagctcgagactgttggtagcatcaaacaccggaatctagtcagccttcaagggtactcgttgtcacctgttgggaacctcctcttttatgattatatggagagtggcagcttatgggatgttttacatgaaggctcatccaagaagaacaaacttgactgggtgactcgcctacggatcgctcttggtgcagctcaaggcctcgcttaccttcaccatgactgcagcccacgaataattcaccgggacgtaaaatcaaagaatatactcctcgacaaagattatgaggcccatcttacagacttcggcatcgctaagagcttatgtgtctcgaagactcacacgtcaacctacgtcatgggcactattggttacattgatcccgagtacgcccgcacctcccgcctcaacgagaagtctgatgtctacagctacggcatcgttctgctggagctgctgaccggcaagaagccagtggacaacgagtgcaatctccatcacttgatcctatcgaagacggcgagcaacgaggtcatggagacggtggaccccgacgtgggagacacctgcaaggacctgggcgaggtgaagaagctgttccagctggcgctcctctgcaccaagcggcagccctcggaccggccgacgatgcacgaggtggtgcgcgtccttgactgcctggtgaacccggagccgccgccgcagccgcagcagcagcagcagaaggcgcacgcgcaccaccagctgccgccgcagccgtcgccgccggcctacgtcgacgagtacgtcagcctgcggggcaccggcgccctctcctgcgccaactcgtccagcacctcggacgccgagctgttcctcaagttcggcgaggccatctcgcagaacatggtgtaggggaagacgtagacgttcggtgaggcgccttgagtgaggccgattgcagggggagtagtttgactgacattttgtgggacgcagcgcaggagattaacatgggactcagtagctagggtgttgttagctgtaaaaaaagtcatgtgacgcaagagcagcggagcttcttcctcttctttatcccccctccccatttttctttggtggtctaacttactaggaggctgtattgatccatcatcatctctcccgttcctctgcttgatgatcttttgtgactttcgcggtcctctgtattgatccatgatcttttgtgacctctgctttattttctgggatctttacctcagaac

SEQ ID NO: 1258 - DNA, 1629 bp, Zea mays
acgatccatccgtctcgcccgcgcgctccgcagccacaagcgcaaaggcagagcacacagttctgtgtgcttggcagtgcccaccacccgacgacgtccccgtcgtccaccgggccaggacgcggacggctcgcggtctcgcccggccggcccggcccttccgatccctcgcgccacgcccatctataaatacatagctgcgcgctgcggagctgagagcaggcaaacaccgagcgcagctagcatcatcgtcctgagctgcttgcatctcccagcggccaatcgagctgatagcctatccatcatatggctgcctctaccacgtcgaggacgaactcgcgggtgaactactcgaacgagatccacgacctttccaccgtgcagggcggctccgcggccgccgccgccgccgccttgttctacccggacagcaaatccatcgccgacatcttcccgccgcaccttgggaagaaggtgatctcggaggtggtggcgacgttcctgctggtgttcgtgacctgcggggcggcgtccatctacggcgaggacaacgcgcgcatctcgcagctggggcagtcggtggcgggcggcctcatcgtcaccgtcatgatctacgccaccggccacatctccggcgcgcacatgaaccccgccgtcacgctctccttcgcgtgcttccgccatttcccctggatccaggtgcccttctactgggcggcgcagttcacgggggccatgtgcgcggcgttcgtgctgaaggcggtgctccagcccatcgccgtgatcggcaccaccacgccgtcggggccgcactggcacgcgctcgccatcgagatcgtcgtcaccttcaacatgatgttcgtcacctgcgccgtcgccaccgactccagggcggtgggtgagttggccgggttagcagtcggttccgcggtttgcattacgtccatcttcgctgggcccgtgtccggcggatcgatgaacccggcgaggacgctggcgcccgccgtggccagcaacgtcttcacgggcctctggatctacttcctcggccccgtcgtcggcacgctctccggagcctgggtctacacctacatccgcttcgaggaggcccccgcagccgccaagcccgacacccagaggctctcctccttcaagctccgacgcatgcagagccagtccgccctcgccgccgacgagttcgacaccgtctgacgcccgcccgcccgcccgcccgaagagatcgagtactactgtgtgtgctccctcgctctgttcaagatctcaggtgggagagagctatagctagctgcgcgcgcgcgtgtgtgctggtaggtacatagtccgtgtacgcgtacctacctacgtgtttgtgttttttgtgtcccgtcggccgtcgcctacaccacgtagcagcggatcggagcagtgtcacatgtttttatgtatcttcggctttgtgccacgtcagagttgcaaaggttaattgatgcagccgattatgcttgcccgtgttggtttttgtctattgtacttgatatacatgttctttttgtcatgtacacaacttcgaccatctaatgtgttcttttgagagatctctaaggggttaaataaaaaaatcaagggacg

SEQ ID NO: 1259 - DNA, 1760 bp, Zea mays
ccgtatcgcccgcgcgctccgcagccacaagcgcaaaggcagcgcacagagctgtgcctagcagtgcccaccacctgccgtccccgtccaccgggcccggacgcggacgcctcgcggtctcgctcgcccggctcttccctcgatcgtcacccatctataaataccttggccgcgcgctgcggagctgagagcaagcaagcacacagcgagcacgcaccagcatccttggcacttggcagcgatctgcttgcttctcccagcgcgcgcggccaagctagtaggggtctaggggatcgatcagatatccacgccatggccgccgcctccaccacgtcgaggaccaactcgcgggtgaactactcgaacgagatccacgacctctccaccgtgcagagcggctccgtcgtccccaccttgttctacccggacaagtccatcgccgacatcttcccgccgcaccttgggaagaaggtgatctcggaggtggtggcgacgttccttctggtgttcgtcacctgcggggcggcgtccatctacggcgaagacaacaggcgcatctcgcagctggggcagtcggtggccggcgggctcatcgtcaccgtcatgatctacgccaccggccacatctccggcgcgcacatgaaccccgccgtcacgctctccttcgcatgcttccggcatttcccatggattcaggtgcccttctactgggcggcgcagttcacgggggcgatgtgcgcggcgttcgtgctcaaggcggtgctccaccccatcgccgtgatcggcaccaccacgccgtcggggccgcactggcacgcgctcctcatcgagatcgtcgtcaccttcaacatgatgttcgtcacctgcgccgtcgccaccgactccagggcggtgggtgagttggcagggttagcagtcggttccgcggtttgcattacttccatcttcgcagggccggtgtcgggcggatcgatgaacccggcgcggacgctggcgccggcggtggccagcaacgtcttcacgggcctctggatctacttcctcggccccgtcatcggcacgctctccggggcgtgggtctacacctacatccgcttcgaggaggcccccgccgccaaggacacgcagaggctctcctccttcaagctccgccgcatgcagagccagctcgccgccgacgagttcgacaccgtctaaattaaaacgcccacacgcgcatccacaacactgtcagcctgcaggtcaactcttcgcgcgtacgtacgctggacgctggctgagagagtgagtgagagagagagagagtactgtactactgtgtgctcgctcgctcgctctgttcaaagacctcatcatatcaggtgggagctagagagatagagctgcgtgtatgtatgtgtgtgtgtgtacgtgcttggtgtaccctacctagcgggtgagagcagctagcgtgatgtttatgtatcttcgtcagtgttgcaaaagttaattgatatgcagctgatgtgtctggctttgctggtttgcaaaagatgcatgcatgtgttggaactcggaacacaaatatatatatgggtttttttttgtctactacgtactgtaccttatatatatgttctctttctgtttgggtttattttactgtaccttttcagtatcataaaatgttgttttggttttgcctcaagccagaacttctccttaattccagcaatttaagataaaaattgattaacatctaccataataaaataaataaa

SEQ ID NO: 1260 - DNA, 1773 bp, Zea mays
cctaatcctttcgccgttctgcacttctgctgcctataaatggcggcatcgaccgtcacctgcttcaccaccggcgagccacatcgagaacacgatcgagcacacaagcacgaagactcgtttaggagaaaccacaaaccaccaagccgtgcaagcatcatggagtacggtcagcaggggcagcgcggccacggcgccacgggccatgtcgaccagtacggcaacccagtcggcggcgtcgagcacggcaccggcggcatgaggcacggcacgggaaccaccggcggcatgggccagctgggtgagcacggcggcgctggcatgggtggcgggcagttccagcctgcgagggaggagcacaagaccggcggcatcctgcatcgctccggcagctccagctccagctcgtcggaggacgacggcatgggcggaaggaggaagaagggaatcaaggagaagatcaaagagaagctgcccggaggccacaaggacgaccagcacgccacggcgacgaccggcggcgcctatgggcagcagggacacaccggcagcgcctacgggcagcagggacacaccggcggcgcctacgccaccggcaccgagggcaccggcgagaagaaaggcattatggacaagatcaaggagaagctgcccggacagcactgagcggcgcctatacgtggctgtgctgtgctgtgctggcgcgtcaaagccgtactcttcagcgttccatagataataagataaacccatgaataagtgtccctaccctttgatcatgtgacagggacagggacagggacagtttcctgtacttgtggggtgaatttgtacgtgtgatacggtaacttggtccgtgtactgtttatgctgctacgttttccttcctaaaagtacgtatatatatacagcacttgcgagtggctttacttgtgtgcactgcctaaaagtgtcgatattacctccagcggtaaataaatgacccttgtaagaaacttacacagcatgtcttactaattaacagccgttattatgttcggcgcagtactcacactggaacttacgaacaagaattgctctatcaatcaccatctactttagatatatcttctgaaacttttttcaaatccaaaagttcagtatcttcctacaaattagtgaattaggaatccaaaagttcagtatcttcctacaaattagtgaattaggatacaaattagtgaattaggaggggttcttttgtgcagaaaagacattgggtatagtggagatgaatgggaagatagaaaaagacgaataagaaaagtttttttgattagacgcatgcaattggcgaaacattttattcaaacaaatgtagaaccagaatggatggttttgtgcttattaccggttcttcctcccgaattgagacccattgtttatagatctggggataaagtagtgacttcagatattaatgaactttataagagagttatccgtcggaacaacaaccttgcctatctattaaaaataagtgaattagcaccagcagatttagtaatgtgccaggaaaaattggtacaagaagccgtggatacacttctttcacatataaaaataccctatcctatccatttagaaatcctggttcaactccttgaataccggattcaagatgttccctctttacatttattgcgattctttctccactattattcgaattggaatagttttattacttcaatgaaatccatttttcttttgaaaaaagaaaataaaagacta

SEQ ID NO: 1261 - DNA, 1693 bp, Zea mays
tgaaagtttggggcaagcaggtcgtttggcagtaagaatccagcatgtggattgttagttgttacaatttatgagttgtctgctgaaatataaaataaaattggacccaaagaaaatagaaaagaaaagaaaaaactgtgggacagtacaaggggccgcctagcaactagcatatatatacccacacatgttctcgatttcccgcaaggcacaagtaactttttgttgcatcccaccctcatttgacgctgatgataaaaaggccctcgcggtcgcaccacatacaggcaaccagcctcttgatcacttgatcctcctgcacaccagagtaccagacaccactgcgcatcagtgcaaagaggtagctaccctatctgccatggctcaagagctccacgaaacgtcctcttgctctgccaccaccacctcgtcgtgcaccacatcctgctgctcgtccactgtcacagactcgtcctcttcgcccccgtcaccggcggcggccaatgccgcgcccgcgacacggaagcggcaggcgttggaggccgaggccgaggccgaggcgggcggtgaggaggaggaggaggaggaggaaggctgtgctggtaataaggcggcgccggccaagaagcgaccgcggggcagcgaggggaagcacccgacgttccgcggcgtgcggatgcgggcgtggggcaagtgggtgtcggagatccgcgagccgcgcaagaagtcgcgcatatggctcggcacgttccccaccgccgagatggccgcgcgcgcccacgacgtcgcggcgctcgccatcaagggccgcgccgcgcacctcaacttcccggacctcgccggcgcgctcccgcgcgccgcgtccgcggcgcccaaggacgtccaggcagccgccgcattggccgctgcgttcacgtcgccgtcatcggagcccggcgccggcgcgcacgaggagcccgctgccaaggacggcgccgcgcccgaggaggcagccgccgacgcacaggcaccagtaccagtagcactaccaccgccggcggcctctcggccagggacgccgtcgagcggcgtggaggacgagcggcagctgttcgacctgccggacctgctcctcgacatccgggacgggttcgggcgcttcccgccgatgtgggccccgctcactgacgtggaggaggtggtcaatgcggagctgcgcctcgaggagccgctgctttgggagtagcggtcagagatgctcgttgcctgcattgcaaacgaggtctaaacaatagtagcagtggtatcccatttcttcttcgttttgcttctcgccctctcctttttttctctctttcttgcttactttggggggaaaacagctagttctttttttcttcttcttcttcttcttttattaaattgagttttaataagtataaacatatataaacgagagagagatataagctgtgtacttaaaagtgtaagacgagtacctatcagttcattattacgtatctactagtggtaccagtagtgatcatgttgtcccggccgtgtgtgaattccagcggtagttgttgaccttgctagatttttatagttgcttgtgttgtgtgctgtaccaaaattccccagggaaaaagggcaggaagcaaacgaatgtaacgggaacacaagcagcatctaatctctattactgctgacaacg

SEQ ID NO: 1262 - DNA, 1500 bp, Zea mays
ccatccctaattaagccaaaaggcactgaagaagccagtcaatagcgagttctactactagtagctagcctgctgatctgttctgttgtttagttcgcaaagccttctgtttcggcgaccatggaggatgagaggaacacccagcagcaccagggcggtgaggcccagcaggacgccgccgatcaggtggacgtgaaggatagggggctcctggacagccttctcggcaggaagaagcacgacgacgaccaggagaagaagaagcagacggatgagctggcgaccggcatggagaaggtcacggtgtccgagcccgagaagcacgggcacaaggaggaggagcacgaggtcgtcggcgagaagaaggagggccttctcgccaagctgcaccgcaccagttccagctccagctcgtcgagcgacgaggaagaggaggcgatcgatgagaacggcgagattatcaagaggaagaagaagaagatgggcctcaaggagaagctcaaggagaagctgccgggccacaaggacggccaccacacggccgcaccgtccccggcgcccgcgcccgtggagacgcatgcccaccaccaggaggaagcgcacaggccgcacgtcgtcccgaccccggccccgccgcctccaccgcacgtccaccagcacgaccacggcgtcgtcgtccaggacgacgtgaagaccgggaccccgccgcatgcaccggaggaggagaagaaaggcctgctggacaagatcaaggagaagctccccggtggccacaacaagaagcctgaagccgctgccgctgccgcaccggctccgcccgtccacgcgccggcgccggcgccgcaggcggagaacgtgagcagcccggatggcaaggagaagaagggcttgctgggcaagatcatggacaagatacccggctaccacaagagctcagctgaggaagcagaccacaaggcggacgccgccggcgagcacaggaccagctcctaaggtcgcagtcgcagcgcgtgtcctggccgtggccgggccttgggcgatcagaaggtagctagcgttggcatgtgggttcggttctggtttgcttttaccaaaagtttgtttcaaggtggatcgcctggtcaaggtccgtgtgctttttaaggtggatcgcgtgactggcagtgagtgttgctgcttgtgtaggacgtggtacgtacgggttttattttggttccaagtcaaaagtcacggtcggtctggatgttgtgtactgggtttgttgaattatgagcagctgcgcgttgtaattcggctgggctacctggatgcgttaataattgctttggtttctgcccagcgcgcgaacgtgttagcgtgtaatctctattttgcactatccagcgactaataaaaagaaacgggtatatatatatatatatatatatatatatatatatcaattatcatttggatgttggtactgtggaaacttgtgatccagtgcacttctttcttttt

SEQ ID NO: 1263 - DNA, 2416 bp, Zea mays
accgaaccaaacaacacacgtcaaagcggaaaacctcagaaaaccacaataaatcatcctcgtccaccactgcccccgctctgctgcaactccactcggcccggccgccctttccacccaccttgatcctctgatccgttggtgcttgaccgatccatggacacccatatcggatccgtgaacggggcggcgtcgaaccagacggttggctgcccggcgtcggcgccggggtgcccgatggcgtccacgccggcgcagcccgcggcgaccctgtcggcgggggaggcgtcgctggggcgccacctcgcgcgtcgcctcgtgcaggtcggcgtcaacgatgtattcgcggttccgggggacttcaacctcacgctgctcgaccacctgatcgccgagcccggcctgcgcctcgtcggctgctgcaacgagctcaacgccgggtacgccgccgacgggtacgcgcgcgcgcgcggcgtcggggcctgcgccgtcacgttcacagtcggggggctcagcgtgctcaacgccatcgcgggcgcctacagcgagaacctgcccgtcatctgcatcgccggcgggcccaactccaacgactacgggaccaaccgcatcctccaccacaccatcggcctccccgacttctcgcaggagctccgctgcttccagaccgtcacctgccatcaggcggtggtgaacaatctggatgacgcgcacgagcagatcgacacggccattgccacggcactgagggagagcaagcccgtgtacctcagcatcagctgcaacctccctgggctgcctcatcctaccttcagccgcgacccagtgcccttcttcctcacccccaggacgagcaacaagatggggctagaggctgcagtggaggcaactgtcgaattcctgaacaaggcggtgaagccagtccttgtcgccggccccaaactgcgtgtggcaaaggcaggaaaggcatttgtcgatatggtagatgccagtggctatgcctatgccgtgatgccatcggccaagggtcttgtgccagagactcacccccacttcatcggcacctactggggcgccgtcagcaccgccttctgtgcggagattgttgagtccgcagatgcctacctctttgcaggccccattttcaatgactacagctctgttggctactcattcctcctcaagaaggaaaaggccatcatcgtccagcctgagcgtgtgatagtggggaatgggccggcattcggatgtgtgatgatgaaagagttcttgtctgaattggctaagagggttaataagaacaccactgcctatgagaattacaagaggatctttgtacctgagggccagccgctggaaagcgagccaaatgagccactgcgagtgaatgtgctcttcaagcacgtccagaagatgttgactggtgatagcgcggtgattgctgagactggtgactcctggttcaactgccagaagcttaagctgccagaaggctgtgggtatgaattccaaatgcagtatggttcgattggatggtcagtgggtgcattgctcggatatgctcagggtgcgaaccacaagcgtgtgattgccttcattggtgatgggagcttccaggttacagcacaggatgtgtcaactatgctgcgatgtgagcagaacagcataatcttcctgatcaacaacggtgggtacacgattgaggtggaaatccatgacgggccatacaacgtcatcaagaactggaactacactggctttgtggacgccatccacaatggcttgggcaagtgctggacctccaaggtgaagagcgaggaggagctgacggctgccattgagacagcgctaggggagaagaaggactgcctgtgcttcatcgaggtgatcgcgcacaaggacgacaccagcaaagagctgctggaatggggctctagggtttctgccgccaactcccggccaccaaatcctcagtagaagtcccgcaggctccaagcctcggagtgccagtagtgatagtaagctgtagcacggtgggggctcaaccgaataacgtgaacgcattgccctttctgttacgtgttttattttattgtgtttctgtggtcgtatatctgttttgtgacgtgttccctgcttctcccatgtgaattccagaagaactatgagaaaattcaggttggttgtcactatttgtgctgcgttaccggtgtgattttacttgccaggtaaacatcgccggccagggagtgaatcatctagagattgggctataagtattgtagcgataattattctagtacggaagcaggagatggagcatgtactatccagatttttaataattgattgtgcacactgcgggggcacaacacatacaggtgcgcgccccggtgcgaatcgccatgtcactatc

SEQ ID NO: 1264 - DNA, 3244 bp, Zea mays
cttccttggcgttctatttcaagccgtccttcccttgcacccgtgaccagcatgtagcagccgcccacaagcgagcgcgtgcaaacaaacaaggcgctgatccggcgtccaaacacgcggtggcccacgcccgcgccggcccatccactcgcccctctcctcgctcagcctcagcgtctcccagtccggtccagtccggccacatccacggccgcgccgcgtcgctactccccacgtcccgtctctgcctccccgtaccgcactctgcactgcgcaccaccagcgctgcagcgcaccgcatctggcctggccacctgcctccccctcttgtttacccgaggtggcagcgaggcgcctcgctttcctctttcccccccttcgccccgctgcccccaaccaattttcccgatccggcaccgcgcaatgccgctgcagctgatgccgccgcactactatcccgtcctgctgccgctactggttcttgcggctgtggcgggcgtctccgcgggtggtggcggcgacggagatgtcgtggagcggacgtacatcgtgcgggtggacgccgacgcgaagccgtcggtgtacccgacgcacgcacactggtacgaggcggcggtgctggcggccgccggcgacggctcggagtggccggaaggggggccgctgatccacacctactcggcggccttccaggggttctccgcgcggatgtcccccgcggccgccgaggcgctggcgtccgcccccggggtggcggccgtggtgccggagcgcgtgcggcagctcgccaccacgcgctcgccgaggttcctgggcctgctgtcctccccgccctcggcattgctcgcggaatccgacttcggggccgacctggtcatagccatcgtggacaccggcatctcccccgcgcaccgcagcttccacgaccgcgggctgggcccggtcccgggcaggtggcgcgggctgtgcgcgtcgggtcccgggttcccgcccagctcctgcaaccgcaagctcgtcggcgcgcggttcttctccaaggggtacgaggccacctcgggacgcatgaatgagacggcggaggtcaggtccgcgctcgacaccgacgggcacgggacccacaccgcgtccatcgccgcggggaggtacgtgttcccggcgtccacgctcgggtacgcgcgcggcgtggccgccggcatggcgccgaaagcgcgcctggcagcgtacaaggtgtgctgggtgggcggctgcttcgactccgacatcctcgccgccttcgacgccgccgtcgccgacggcgtcgatgtggtctctctcagcgtcggtggcgttgtcgtgccgtactacctggacgccattgccattggggcgttcggcgccaccgaagccggtatcgtcgtctctgcttcggccggcaacggtggtcccggcgggctcacggtgaccaatgtggcgccctggatggccaccgtcggggctggctccatggaccgcgcgttcccggctaacgtgcggctcggcgacgggcaggtgctcgacggcgtgagcgtgtacgggggacccgcgctcgagtccggcaagctgtacgaactggtgtacgctggggcgagcggcgggggtgcctcgtccgcgtccgacggctactcggcgtcgatgtgcctggacggctcgctggacccagccgcggtgcgcggcaagatcgtggtgtgcgaccgcggcgtgaactcgcgcgccgccaagggcgacgtggtccgccgcgcggggggcgtcgggatggtgttagctaacggggcgttcgacggcgagggccttgtcgccgactgccacgtcctgccggcgaccgccgtcggcgcggccgcgggcgacaggctccgcaagtacatcgcgtcggccaccaagcagaggccggccaccggcaccatcctgttcgagggcacccacctcggcgtgcacccggcgccggtggtggccgcgttctcggcgcgcggcccgaacccgcaatccccggagatcctgaaaccggacctgatagctccaggcctcaacatcctggcggcgtggcccagcggcgtcgggccggccggcatcccctcggacggccgcagcacggagttcaacatcctgtcgggcacgtccatggcctgcccgcacgtgtcgggcctcgcggcgctgctgaaggcggcgcacccgagctggagccccgcggcgatcaagtcggcgctgatgacgaccgcgtacgtgagggacaacagcaacggcacggtcgcggacgagtcgacgggcgcggcggccggcgcgttcgacctgggcgccgggcacgtggacccgatgcgcgccatggacccggggctggtgtacgacatcggcccaagcgactacgtgagcttcctctgcaacctcaactacacggagcggaacatccgcgccgtcacgcggcgcccggcggactgccgcggggcccggcgcgccggccacgcgggcaacctcaactacccgtccctgtccgccacgttcgtggccgccggggcggcggcggcggcggcggcgagtaggacgcacttcatccggacggtgaccaacgtgggcggcgggagcgcggtgtaccgcgcgtcggtcacggcccccgaggggtgcaacgtgacggtgcagccgcggcggctggcgttccggcgcgacgggcagcggctgagcttcgcggtgcgggtggaggcggcgctcggagggaggatggagcccgggagctcgctggtgcggagcggcgcgctgacgtggagcgacgggcggcacgtcgtccgtagcccgatcgtggtgacggtgcaggcgcctctgcagtgagtgctgtactgaccagctgccccgaccgccacgatgggaggtggagaggagaggacacagtctcagtgttctagcttttctgtactattaaggttgctgttagctgtagaatacgtcgtggaagagctgtatcgttagctactacgtaacgtaagctacactggaaatcatggagccctggagctccgttcttccccatttctttctttctcctcgccttgctgctaccatttgcttctgtattgccggcctccggcgtgcggttttgcacggaatggttttcaagtgcttcgtcgtctgcacctacggagtacggtcggtctggtgtgccagcagtggctgacctgaatggtcctcggctgagctcacatggccgcgtcatgtgagatatgatcatatggttgtgagtggg

SEQ ID NO: 1265 - DNA, 1129 bp, Zea mays
aagttggctcacagaacacagcccgcccggacgcaaggggcacgagggagaagcgaggaacggcggcggcggcaacatggcggcgcggaacatccttcgcggtgcggcatgcggccaccgcttcctcgtgcccgtcccctcaggcgctcttgctggttctggaagccggagcatcggcgctgtcgctcagggccttcgtcattacgcagcagacgaagcagtgggaaacttggaactgcatgcacccaaggcaaaacgtcggtcatatatcccaacgaaaaatggaacagccatgatgcttccgctccatattcattacgaagatgtactacgtcaggatctgttgctcaaacagaatcatgccaatatcatgcaagttccagggttgtttgaggtcaaattagcaccaaaagctggctctgatctcaagatcccaattgggaaaatggccatggaggttttgagtggtcagagattcaaagaggcaaaaattgaccctttcgccaaagcaagaaagtcttctcgaaccaatccatttattggggccgacaaggacggtagcactgtcttcgcgcaaccaaccgttcttcgagggcatgcaatgtacaactttttggtgaggatgctgacagtgatgtccatgttaaattctcgggccgacattcgggagaacactgtgaagttcttcatggaaacggagttctgtgagttctctccagaattggaagaccatttcgagatatttgagcacatccgaggtttcaatgtgactatcgttacttcagccaatacaaaagatgagacctcactactgtggagtggcttcatgcttaatgacgagggagagaccaagtaaggtagaactgttgatctttgtttctgcttaatctccctgatattgtagttgctgcccaactgaaccttcagttggctgttgatgtcaaaaatgattttggaaatttggtgcttcgtgctctaggagtgcgcaatgtcgcagccttctgttttgtagactgaatgagataacgtgattgtttttcatcttgacgcgtggagctcatgtttgataactacgtctagttccatgtatgaacataataatcttggtctaataagcattgttttgctt

SEQ ID NO: 1266 - DNA, 1475 bp, Zea mays
cccgcggcgacatggtagccttatcccctcacacgctgacatgacacgttcacgatcacgcagctctagcctcccccgcccgccccgcgaattttggagcccccacgccatcagtccaccaccaccacacaggcacacacacacacacactttcctcgcccaaccccagcgctttctcctcctggcttcccctatttaagagcgccccgtcgtcccgagacctccattcccaagcaaacagccaaacacacgcgaaaagaaggagttcgagtacaggttacagagaggcagagagcaaagatgtgtggtggtgcgatcctcgccgagctcatcccgaccacgccggcgcgccgcggcggcgcggcgtggcccgccggcaagtgcaagcggcggaaggcgaacgacttcgaggccgcgttccgggagttcgacgaggactccgaggaggaggaggaggacgagggggtggtggagagcaagcccgccttcgtcgtccgcgcctcgtccgcggcgacgcagcccagggcgcgccaggagcagcggagccggcgccgggcgcccgaccagcagcagtacaggggcgtccggcgccgcccgtggggcaagtgggccgccgagatccgcgaccccgtcaagggcgtccgcgtctggctcggcaccttcccctccgccgaggccgccgcgcgcgcctacgaccacgccgcgcgcggcatccgcgggcccagggccaagctcaacttcccctcctcctcctcctccgccgccggggcccccgccagccgcaagcgcgcccgcaccgccgacgccgacgccgtcatcgacctcgaggaacaagagcagcgcccggccgcggcggccctgaagcacgaggccgccgagtgctccggatccgacgcgctcccggacttctcgtggcagggcgtgtcggcggcctacgacgagccccccgcgccgcgcccggccttcgacttcgaggcgcggccggagagcgccgcggacgaggcgtcgccccgggcctccgactccgagtcggacgcgctgttcgactcgctcctcttcggcgaccagttcgccttcttcgacgccggcgcgtacgagtcgctggacagcctgttcagcgccgacgccgtgcagagcaacgccgccgccgcggcggaccaggacatgccgctgtggagcttcgacgacggctgcctcgtcgaggacaacctctcgttttaagcttcggcgactgttgttgtgtcttgagttttgtaaattacgacctgttttttttttggagtttctgctcatgtatatctgtatcgatggtgagctgaatgaaatcatccttctcaggaagtaaaacaaaggaacatccctccattctaaaagtcatgaacacactaatttcataattgatcgacagcctaacccgactagaagatgcatcttctagaccatgttgaagacggaccctcgcctgctcgacggag

SEQ ID NO: 1267 - DNA, 2110 bp, Zea mays
attaactaaaaaaagaggccaacaagccgaaagctccccgcattcccgcagtctcagtcgcacagtgataaaggcctcgagccgaggcgacaagaatctctcaagacagccagccacgcacctccgcgccgagctcctccctttgcctaccgcccttcccaccgcgcgaggaaaaagccagcagcagcagcaagcaagcaactcagcggagcacggcaaagcaaacgaagagctcgcgttggcgttgccgacttgccgtgccttgcctagctagcttcgccacgacgaacctgacgtgagagcgcggcgaccacccccaccggccaccggcgcgcgagtagcttcctgtcgttcgttccctccgagagcgtctatttacccccgagagagccggacgcgcgagatggagatggcgggggcggccgaggccgacacgccgtcgcacgagccggtgcgcacgggccggagcaacaccatcctgctccccatcgtcggcgtcctcttcgcctacctgctctaccgcttcctccgcccgcgcctccgccgcggcctgcgcctcgaccgccacgtcccgttcccgtcgggcgcctccctgcccgcctggctccgccgccgcgcgcccagcgggagcgccgtgctgccctacttcgcgcccatcgccgaccgcctcggcgcgctgccgtacctcggccccttcgccgaccgcctcccgcacggcggcggcgcccacgcgctcgtcacgttccccggcggggaggcgctgtcggtggcgaccatcctcgaggcgcccggggaggtcgtcgccaagtccgcgcacagcacgctgtaccgcgccgcggtgcggtccggggaggccgcggtgctgctccggttcgtgcgccccgcctgcgccgtcgccgccgaggaggcctacgccgccgcgcggagggtcggcgcggtcagccacccgaacctcgtgccgctccgcgcggtgtacgtcggccccaggggcgagaagctactcgtgcaccccttctacgccgccggctcgctccaccgcttcttgcaagaggggatcgaggagtctcatagatggagcatagtctgcaacctttctctgggcattgccaagggactggatcacctgcacacaggcttggacaaaccgatggtccatggcaacctcaagacgagcaacgtccttctggacgccaactacgagtgcaggatatcggactacggcctctacctcctgctgagccccgccgctgcccaggagatgctggaggcctccgcggcgcaggggtacaaggcgccggagctggtcaagatgcgggacgccacgtgcgagagcgacgtctacagcctgggagtggtcctgctcgagctgctcgcgcagaaggagcgcgcggacgacgacggccggccgaacccgcgggacatcctcctcccggcctccttcaagaacctggtcctggagaggaagatctcggacgcgttcagctccgaccttgccaggcactgcaagaggtcggggaaggagaagagcctgaacgccttcttcgagctggccacggcctgctgcagcccgtcgccgtccctgagacccagcacgaggcaggtactcaagaggctcgaggagatcgcgagataaatggacgcgagtgctgagcaggcctggcgacttgctgcttaatctgcatcgctctctattgcagcataccgttgagctgagaagcgtctaccttccctaagctaaacgaagaacgtatttttgtggtgggcgagtaggaaatggatgcatgtttttcacgtccagtaacctgtactgtacagtttcaccgagatgcagggttgttcatcagaaaacatacagggtgtgctttcggtgcatgaggaatctccatgtggcggaatgttctctacagcgcgtatgtaacatggtatttgtcgtcgacatcgtgatactcgcatgctcgcggtgccataccatcaagtctggggttggtgatttgtccttatcacttgacacttgccaatgtaatcaacggatgaagatcccccttagctttcgacttgtttcgtagcctggcgcggtggtatcttgtcaagaaatacgaatctttcttag

SEQ ID NO: 1268 - DNA, 2091 bp, Zea mays
gcgctcacgttttgctcgctctgccttcgcgttcgcattcgctctcgccgtcacaaaaacctcgccgccggcattccctagttcaccttcccctcgcaatgccctcctcctgaaccctagctccggctcagtaccatcctccacccctctctccgtcgcgatggacgaggactggagcaccgatcccgctcaccgccgacgtcgcctcctcttgccgacgagctgtcagacccagacccagaacccgccacagacacagcccccgctccccatggacctcgcctcccagtacaaccgacgctttgcaccgtcacttttcctcccaccgatggcgccccgcctggcttccagctccggcttctcggtcttcagcaactaccagagcccgccgacgctcgtgcccacggcggcgggcgccggatcgcatctcgctcggtcgctcccgaagctgcctcttttctccatggactctctaggtcttctcccgtactccaccaatcctgcggcgggggcggcggtcccgcgttccctgtcgtcgcctggcggctccgagcagcaagtgccgtccgcgtccggcctgccgccgcgcggggcggggcaccggaggtcccgtagcgatttcctcgtcgggttctcgcgcccgaatcagctctccctgccgatgactcctgcagctggggaatacaggtcgagggaagcctccgtactcgaggagctattccgctcgtacagggacccgaatctcagctcctccggggataacaacagtgaaaggaacgatcacttaggcagacaactcaccggccaaggcgcttggagccccggtgatagcagcgacaatgacgctgagagctgggcggctagtggcagcgcagccgcaggcaccagcgctagccatagccatactcgccattgccgcagcctgtcggtggacagcatcatgggcaatctcaactttggaggcctgggccaggtttctctgagactgccgcctccgtctccggtggcaggcgccggcggcagcctctcgcgtgctggaagtggggcatcgggcggtgcggttgcgactgcctcttctcaacctgccaacggagagttcagcgagtctgagatgaaaaagatcatggccaatgatcgccttgctgagctcgctcttgttgatcctaggagggtcaagaggattctagctaatcggatctcggcagcgaagtctaaggagcgcaaggtgaagtacatgggtgagcttgagcgcaaggttcgtgtgctgcagatggaaactagtacgttatcttcaaaagcagcatcgtcgcagagggaatgcgaggcacttagaattctgaacaatgagatgaagatcaggctgcaagcaatggagcagcaagcacagctgaaagatgctctgaatgaagcactgactgctgaagtgcagcgcctgaaacaaattgctggtgaggccagtgatcctcatgtgccgaatatgagccgcaagattgtcgaacagcagctgcagaagcagccatcggaggcccagctggctgagcagcagcagccacaggaatcagaggagttcaaagctcagcagaagcagtggaaccattaataagacgcgtttcacagaggacatgcttgaaggtctaatccatacagcagatccatgaagggacaccttgtgttctcccggacattcgtttttttttttttccttaggttttagaacgacagcggttggacatcctgtcttttgtggtttcttgcaaaggtatttggttggttggcagttggtaatgcatggtgtgggttctgtgttgtacaagcttccagtctctttagttttccgctagagctattcaaaccattttctggtacatttgtgtagcgaattcaagggggcaatttgtggggtacaacatattgtgtagacgcggatgcgtgagatcatgcagcttgtattcttattcattagtcattgtattaagaagttcagatggaattgtcatagttgatgtttatgttttagcatgatttgctattgatcttgtcgtccaacgcagcgttgcagatgatctgcccaatggtgctgctatgttgtat

SEQ ID NO: 1269 - DNA, 1896 bp, Zea mays
atggcgaagcccacccggccatttcccataatagcaaaaatctcttctcccagtgcttgggccgcccagtggccagtatatatcgttagttcgctacacatggccgtcccgggcaaagaagcaccgacaacagtcgacacgatggccagcccgttgctgtccctggccaccgcggcgctggccgtagccgtcctcatctccacgacagaggcttggcgcgcgacgccaacgccgctgccagtgctgccgatcccgtcggcggcgcagctgaaatggcagcgccgcgaggtgatcatgttcttccacttcggcatgaacaccttcacggactccgagtggggcacggggtgggaggacccgtccctgttctaccccgcgaggctcgacgccacccagtggatggacgctgcgcgggcggcgggggcctcgctcgccatcctcgtcgccaagcaccacgacgggttctgcgtctggccgtccgagtacacggcccactccgtgcgcgccagcccctggcgcgggggccgcggcgacgtggtgagggaattcgtggacgccgcccgcgcgcgcggcgttgacaccgggttgtacctctcgccgtgggaccggcacgacgagcggtacggccaagaggtcgcgtacaacgagtactatgagtcccagctccacgagctcctcaccgggtacgggagcgtgtcggagatttggttcgacggcgccaagggcaaggacgcgaccaatatgacgtaccacttccaggaatggttccagacggtgaagcagctgcagccctccatcaacatcttctccgccgtcgggcccgacgtccggtgggtcggcgacgagacaggcgaagccggaaccacctgttggtccaccgtcaaccgctccatgatcaccataggcgaagccagcgacgagaagtacctgaacgagggcgatccgcgggggagcgactgggtgccgccggagtgcgacgtgtcgatccggccaggctggttctggcacaagagcgagacggccaagccgctgcgccagctgcttgagatctactacaactccgtcggccggaactgcgtgctcctgctcaacgtgccgcccaactccacgggccttgtcgaggacgccgacatggcgcggctgcgcgagttcggggccgccgtggccaccatcttcggcacggacctcgccgcgggcagcgaggccagggccagcagcgtgcgcggcgccgggttcgcggcgcgcaacgtgctggacggccgcgaggacacgtactgggcgccgacggccgaggacgggcgaagggacgtttactggatcgagctgcggcggccgccgggcgcgcaggcgcggccgttcaacgtggtccggatccaggagcacgtggcgctggggcagcgcgtggagcggcacgcggtgtacgtcgacggcgcgcccgtggcctacggcacaacagtggggcacaagcggctgcaccggctgccctgccccgtcgccggcgggacggtgagggtctggatcacggcgcggcgtggcccgcctctgctctcggcggtgggcctccactacgaccccttcgtcgcggcggccaccatgtgacgtggcgagcgcaagggacttaggctgtctccagcaacgaaccctaaatggtcctgtactctaaatttagaggatgagacgtccgctatcggctccagcagcaacctgtaaatgaaactgtaaaatagcggacgactttgacgagcgctaaagccagagcgtacttgttcatccgctatcctgctctcacatgcagtccagcctcttcctctctctactttttctcctgcgcttgtcagatgccgtacagatgccatacaaatttgtctgctatcgcttggttgtagtcggttttaa

SEQ ID NO: 1270 - DNA, 2037 bp, Zea mays
gggagggagagggacagagcgaagagagagaaaactgaagaaacaacattttccgtttttcttgcttagtgaaaccagtggaagagggagagaaaagaagacgaagacgacaatataagtaaataaaaaaaaggcagcgagcgaggtggggaaaaaggggcgagttgatagagagaaagatagagagagaaggcgagggaggcagggatcacgaggtgtgcttcctcctccgcccaatcgggcccaaccaaatcccgccagcgccgcctcctttatactcccacctctttcccggagcttcttggatcacgggacgcgcgccgcgggccggtacgctgctggtgctggaccgctcgactctcgcctaccagctgctgctttggctggcgcgccggcgagagagagagagagagagggacgcgacggcgatggaccgggcggcgctcaccgtgggcccggggatggacatgcccataatgcacgacggcgaccgctacgagcttgtccgcgacatcggctccggcaacttcggcgtcgcgcgcctcatgcgcaaccgcgccgacggccagctcgtcgccgtcaagtacatcgaccgaggcgagaagattgacgagaacgtgcagcgggagatcatcaaccaccgctcgctgcgccaccccaacatcatccgcttcaaggaggtcatcctcaccccgacgcacctggccatcgtcatggagtacgcctccggcggcgagctcttcgagcgcatctgcaacgccggcagattcagcgaggacgaggcgcgtttctttttccaacaactcatatcaggggtcagctactgccattccatgcaagtatgccatcgtgacttgaagctagagaacaccctgttggacggcagcaccgcgcctcgcgtcaagatatgtgatttcggctactcaaagtcatcagttctacactctcagcccaaatctaccgtgggaactccagcatacattgctcctgaggttcttctgaagaaggaatacgatgggaaggttgccgacgtgtggtcgtgtggggtaaccctctacgtgatgctggtcggcgcgtatccattcgaggacccagacgagcctaagaatttcaggaagacgatccagagaatactgggcgtgcagtactcggttccagactacgtccacatatctccggaatgccaggacctaatctccaggatcttcgtcgccaacccgtccaccaggatcaccatgcccgagatacggagccacccttggttcctgaagaacctcccggccgacctggtggacgacagcgcgacgacgacgagcaagcagtacgaggagcccgagcagccgatgcagggcatggacgagatcatgcagatcctgggcgaggccaccattccggcggcggggtcccgcgggctcaaccagttcctgaacgacggcctggacctcgacgacgacatggaggacctggactcggacgccgacctcgacctggagagcagcggggagatcgtgtacgctatgtgacggcgccgagtgctcagcgacgaggcaatgtctcgttgcgctcgcaggttgccgagataactagagagacggagagggtgggtgtgtgctgctgctgcctgcagcctgcgtgtagttgtgtgctttcaggtctctgctgctcatgcctgatgccgtcgttcgtgatggcccctttttaccgtcctgttgtgtttggccgttgttatttggtgcgccttcagtgcagtgttttgcaacggtttagccatttggaatcgctactgctacaacctcgttcatccgagaggaccctttgtttctgcatccccagcgatgtacttgtattactacactgtatcatatgttatatttggtgtaggaaaataaaggaactccattgcccgttctctgtctgtccccatctttatttcatccgtatctcagttttgtgagaacccgctggagatctttctcgattttggtgtcttcttggctcatatatctcaagtcgtgcacaccctctatcagagcaaat

SEQ ID NO: 1271 - DNA, 1358 bp, Zea mays
cccagccagcgcatgtggggtccagtccagagaggtctagaacaccgcgccactctccagaaaccaccacgtccttcttttctcttcttcctcctccctcgtgatgtggccttacctgaatttaagaacgccgctacggtcaccactcccgtgcactgttgcactgaccatcgtctcactcatctcatcaccgctttccgtttcgctcgtccgatcctcatcaccagctcgggagggaggtcgggagagagcacggacgatgtggcacgccgcggcggcccccaacaaccttcacccggccgtcgccacaacatcgtcccctgcccttcgccgtgcgaggtggcccatcgctcgaccctcgtcgtcggtgaaggtccagtcctccaccaggaacggcaatggctccgctgacaacctggaccacctgcagagggcgtccaagggcaggcagcagcggcagggggcgagtgctccaggcccgagggctagaagggtcgtccgcaccacaccattcgggctgtggtgggacagcttcccggaagcaaggacgctggaccagatggtgcggaccatcatggacgccgacgacgctgacaccgacacccgcttcggcggcgtcgtgcctgcggcggcggcggcggcccccaccgccgtgccgcgcgccgaccacgggcggacgccgtgggaggtcagggagcgcgcgggggagtacctggtccggttcgacatgccagggatggcgcgggacgacgtgcgggtcagcgtgcaggaccggacgctcgtcgtggccgcagagaagaagcaacagcctgctgctgacggcggcggcgacgaggagggagataatgaggaggaggcgtggccgccggcgagcttcgggcggtacaggacgcgggtggagctgccggagaacgtggacgtggagaggatcgccgcagaagtgaaggacggagtgctgtacctcaccatccccaagctgtcggcgggggccaaggtcgtcaacatccaggtgcagtgatgctgtgggtcagattcatcaggacgatgagcacctgctgccgtgcttttcgcagcttctagaatctggatgcttgggacgagagcgatatcgatctagctaccactcttcttttcactcttctttttctgtttcgttcctcgattttgtttgctatgtcacacatggtaaatcttggtagttggtgccagaagataaggtgtaatctttgacctgtttggaacaaattccagaatcgaacgcaagagaatttaaatattattctgctgcaagcaacaaaagccgcctcttaaatatttggatgtgcctctgcacttctccaagttaaaaagttggaaag

SEQ ID NO: 1272 - DNA, 1699 bp, Zea mays
atggcacgcggcgacgtcttaccggctgctcgcgcgtccgtggcggcgtggcgcaacgtgttgggtgggccggtgggcggtggcacgttagcctgccgctaggaaactccgggttctctgttctctctttccttccgactttcccactgccgtgacgattttcacagcgaattctccggccggcgccgccccgtccgtccgtccgtccgtccgttcattccgataccgaactcgccagtcgccacagcgatctctctcgctcgctccgccgacgcagcgctcggcttcagctcgagaggaggaaatggccagcagcggctacgaagggatcctcctgggaatggggaaccccctcctcgacatctccgctgtcgtcgacgagggcttcctcgccaagtatgatgtgaagccgggcaatgccattcttgcagaggacaagcatttgccaatgtatgacgaattggctagcaagagcaatgttgaatacattgctggaggagccactcaaaactctatcagggttgcccaatggatgcttcaaattcctggtgcatcaagttacattggttgcatcgggaaggataagtttggtgaggagatgaaaaaaaatgcacaagctgctggtattaatgcccattatcatgaggatgagaatgctccaacgggcacatgtgctgtttgtgttgttggtggagaaaggtcacttattgctaacttgtctgcggcaaactgctataagtctgaacatctgaagaaacctgagaattgggcacttgttgagaaggcaaaatatatttacattgctggatttttccttacggtatccccggattctattcaacttgttgctgagcatgccgctgcaactaacaaggtgtttatgatgaacctttctgctccctttatatgcgaggttttccgtgatgcccaagagaaagctcttccgtacgtggattacatctttggaaatgaaactgaggcgaggacctttgctaaagttcgcggttgggagaccgagaatgttgaggagatcgctttgaagatctcccaattaccgaaggcttcaggaacacacaagaagattactgttatcactcaaggttgcgatccggtagttgtggccgatgatggaaaggtgaaaactttccctgtgatcctcttgcctaaggagaagcttgttgacaccaatggtgcaggtgatgcgttcgttggtggcttcctgtcccagttggtacaagagaagaacatcgatgagtgtgtcagagctgcctgttacgccgccaatgttgtcatccaacgttctggctgcacttaccctgagaagcctgacttcaactagagccatttcagaatttagaatctattggcatctggtctgtataattagtcgggttcgccttggtctgtttgcggcacattctagtgccaccgtacaggtcaaatgttcatgcgtgtaaggcgtgtcatggcactctacaaaagtgcattcgtgcgtcacctcttgcaagggaaaccagctggttgtaagttcagccatgggcacactcttgaggccacaatatgtgccagaaatggcagtgtaccccggcctgccccggcactcggatgcgtgcatgcctctcccggttacggactctttacagttgcatctaaaacaattcaaagcaccttgcggtgcatccttgaaaagttggggcac

SEQ ID NO: 1273 - DNA, 2717 bp, Zea mays
ggagaatgtcaccccgctctgggatgagaatgagatccaccacaccactcaactcaccaacccggtcgccaactaacccaccaacacccggcctcagtgcctcacctaagcccccgctgctattgctagtgctagtgctagtgctgctaccctatataaccgcctcgcccccgctccatttcccttcaagaagagctccaaagtccatccaccaccacagctgcctcccgagctcttcttctgccacaccgcatcagcatcatcacacacatcccctcccggcccaaatggcgagcaacacggccatcctcgagagcgacccgctcaactggggcaaggcggccgcggagctgacggggagccacctcgacgaggtcaagcgcatggtggcgcagttccgcgaccccgtcgtcaagatcgagggctccagcctccgcgtcggccaggtggcggccgtggccgcggccaaggacgcgtccggcgtggccgtcgagctggacgaggaggcgcgcccccgcgtcaaggccagcagcgagtggatcctcgactgcatcgcccacggcggcgacatctacggcgtcaccaccggcttcggcggcacctcgcaccgccgcaccaaggacggggccgcgctccaggtcgagctgctcaggcatctcaatgccgggatcttcggcaacggctccgacggccacacgctcccgtccgaggtttcgcgtgcggccatgctcgtccgcatcaacaccctcctccagggctactccggcatccgcttcgagatcctcgaggccatcaccaagctcatcaacaccggcgtcagcccgtgcctgccgctgcggggcaccatcaccgcgtcgggcgacctcgtcccgctgtcctacatcaccggcctcatcacggggcgtcccaacgcgaaggccgtcacggttgacggcaggaaggtggacaccgccgaggcgttcaaggcggccggcatcgagggcggcttcttcaagctcaaccccaaggagggcctggccatcgtcaacggcacgtccgtggggtcggcgctcgccgccatggtgtgcttcgacgccaacgtcctcgccgtcctgtccgaggtcctgtccgccgtcttctgcgaggtgatgaacggcaagcccgagtacacggaccaccttacccacaagctcaagcaccacccggggtccatcgaggccgctgccatcatggagcacatcctggatggcagctccttcatgaagcacgccaaggaggtgaacgccatggacccgctgctgaagccgaagcaggacaggtacgcgctccgcacgtcgccgcagtggctcggcccccagatcgaggtcatccgcgccgccaccaagtccatcgagcgagaggtcaactcggtcaacgacaaccctgtcatcgacgtccaccgtggcaaggcgctgcacggcggcaacttccagggcaccccgatcggcgtgtccatggacaacgcccgcctcgccgtcgccaacatcggcaagctcatgttcgcccagttctccgagctggtcaacgagttctacaacaacgggctgacctccaacctggcgggcagccgcaacccgagcctggactacgggttcaagggcaccgagatcgccatggcgtcctactgctccgagctccagtacctggccaaccccatcaccaaccacgtccagagcgcggagcagcacaaccaggacgtgaactccctcggcctcgtctccgccaggaagaccgccgaggcggtggacatcctcaagctcatgtcgtccacgtacatggtcgcgctgtgccaggccgtggacctgcgccacctcgaggagaacctcaagagcgccgtcaagagctgcgtgatggcggtggccaggaaggtgctgaccaccagcctcggcggcgacctccacagcgcgcgcttcagcgagaaggccctgctcaccgccatcgaccgcgaggcggtgtacgggtactacgacgacccctgcagcgccaactcgcccctgatgaagaagatccgggccgtgctggtggaccacgccctcgccagcggcgaggccgagaaggacgccagcgcgtccgtgttctccaagatcaacaggttcgaggaggagctgcgcgaggcgctgcccagggagatggaggccgcccgcgtggccttcgagaccggcgccgcgccgatcgccaacaggatcaaggagagccggtcgtacccgctgtaccgcttcatccgccaggacctcggcgccgtgtacctgaccggcgagaagctcaagtcccccggcgaggagtgcaacaaggtgttcctggccctcagcgagggcaagctcatcgaccccatgctcgactgcctcaaggagtgggacggcaagcccctgcccatctgctgaggagtgaggaggaggacgccaccggtgccaagaggcaagacccgcaagaggaggagatgacaccgtacgcgcgcgaggaagaaataaagaagggagtatttcggtattctcaagcaggcttcatatcgtttgcgatctgaagatcattatatgttgttcctctgtactcatcttttttgtttggagcttgtagcagtgatcgtgtaaacgtgtattctgtctgttgttcttggctttctcatctgcaatatgttttggaattaaaatatactactactactactatattgagtacatggtctcctcgctctatggctc

SEQ ID NO: 1274 - DNA, 1758 bp, Zea mays
ctatttctataaagaaggcttctccttctattagccgcgtacagcagcaagcaaagcaagcaagagatagacaagcagctccagtccaaccaagaacaaacaacaaccgcagcaagaggagaggaggctcaccggtcgcgaccaaattctcccagagacggtcggaaatgaggagccaagcgctgttcttcctcacgatcgcccttctcaccgtgctcgcgcgatccagcaacaggcaccaccaccaccactcccacgttcaaagcagagggcagggagcagcatcaggaggaggaggaggaggggagctggcgagccgggggaaggcggcggcgcgcgcgtggccgtgctgcgacagctgcggcggctgcaccaggtcggagccacggctgtgccggtgcctggacgcggcgccccgcgggtgccacccggcctgcagggactgcgtcaagtccagcctcagcgccgacccgccggtgtaccagtgcatggaccgcgtccccgacttctgcctgcgccgctgcaccgcgcccgccgccgccgcgcggtgaccaggcgactggtttctgcttgctcttgagtcttgacccacccacccaccaccaaccgctccagcctttcgcccaccccaccgccggcgaatcgtgtcgtctgaactctgagccagctgtggattaggtttttttttgttgttgttgcgtggaaagagaggctgtgagagacgagggatgtgtaatctgatgagcgaacaaccgaccaaaccaaccttggacgctgtcctgtccgtctgtggtgtggtgtggtgtgttgtgttgtcctttttcttgttcttctgttttcttttgtttttaatccgacttcacactgctctgcgctgtatggttgactcttctcgtctgtgaggagacgagcacggtgaatcgccgagactggggaaaagacgcttgcttttcttgcttgccgttcacagcatgagctttgagctttcgacagggaacacgccgcggcttatgctcatcatgttgttgtctggatattttgggaggggagcagagacggtcgtgcctattcatggctgaagatgatgcacctggacgctaatccggcggcaggacgaggacgaggctggctgagaggcaggttcatctaccgcgggacacgaaggttgctttgctctcactgacccgaggcggccgacaagcttgacaagcacaggcaaagcggtcaggaagtggagtggatgtggaggctccagcagcgaccctacacgcggcgcagatgcgcatttcccacgcggatatgcggcaattgtgcgccgtatctcaagttgcagaggcacgcagggaagaaggaatatcccatcccaattcccaacaagaaactcaacctctgaaccgcttgcatatctctctaacgtgaaggtttctgaacatgtatttcgtcgatacaggtactccatccgattaaggccctgtttgggaataaagtttttgaaaaccacagtttttaaaatactacagtatactttagtcatgacaataccgtagttgacaataccgtagtttacaataccacaattttggaaactgaggtccagacctaagtttagaataccttaaaacaactatagtatttgcaatacttcagttttgaaaacagagattttagccaccttgccaaacaacattctgtatataatactgcagtatttgagaatactgcggtattcttccaaaactgtgaaaaaacttcactccc

SEQ ID NO: 1275 - DNA, 3260 bp, Zea mays
gcaaaaccccaagcctccttcctacgatggcctctcgtgggcgcggtggtggcggagggaaaggccctagcggtgggcggggcggtgaaggcagggggcgggggatccgtggcgggggaggttaccatcacggcgacgatggaggcggcgaacgcggaggcagaggcgacccgggccgagggcgcggggtcggcggtcgtggccgcggtcccggaggccgaggtgtcgacgaccaccagcagcagccgccgccgctcgggaacacagagggcggaggccagggccgcggcggcatggcggtagcggtaccgccagcccgccccgccgcgccctgtcctctagcgccggacgccgctgccccggcatttcccgcagcagcggcctcgtcttctgcgcaagcgcctcgagcccccaccgaggcggctggagctgccttggcggatggcatggggaagttggccgtggcggacgaccggcccgctgctcctcccgtgcccgcaggtaaacccgtcgcgcaaggtcccgcgcaccagccccaggaggctccgccactctcgaggaagaggatcgtgccgccgccccgccccggtttaggcacgtctgggagaaagctggcggttcgcgcgaaccacttctttgtcgaggtgtccgtgaacgacatcttccattacgacgttttaatcaatcctgaaccaaaagcaagaaaaaccaacaggatgctgctctcagagcttgtcaagatacatggcgcgacatctctcgcccacaagacacctgcatatgatggaagcaagagcctgtacactgcaggcgagctgccgttcaaatcaatggagtttgttgtcaagttggggaaggcgggccgagaagttgactacaaggtgacaatccgatacgcggcacggcctaacgtgtaccaacttaagcaattgatcaattctcagctaaggaacacgccatttgacgcaatccaagcactggatgttgtcttgagagagtcgccttctctcaactatgtaactctttctcgatccttcttctccaagaagttcggtgatgacgacattggcggtgggctagagtgctggagaggatattaccagagcttgcgtccaactcaaatgggcctctcattgaacattgatacatgctcgacttcattttaccaacctatcgatgtggtaaaatttgttgccgattgtctccagctgacaaaccctggccaaccttttttggacagggatcgtttaaagcttaagagagccctgcgcggagttcttgttgagactgaacaccagcagggaaagagaagcatctacaggataactgggattacttctgttccattggctcaactgagcttttcttgtaacgaaggccctcagctgactgttgttgagtactttgcacaacggtacaatgtccagctgcgctacactgcttggccctgcctgcagtcgggcaatgattctaagccgatatatttaccaatggaggtgtgcaaaatcattgaagggcagaagtaccctaggaagctcagcgacacacaggtggccaacatactgaaggcaacctgtaaacgtcctcaggatagggaggagaacattattaagatggttcgccacaacaactattctgctgataagatggcacaggtgtttgggatcactgtggccaaccagatggctaatgtgcaagcccgtgttctgcctccacctatgctgaaataccacgaatctggaaaggagaaaaccgttgcaccaagcttggggcaatggaatatgattaacaagaaaatggtcaatggtggaaccattcacagctggacttgtctgagcttttcgcggatcccgcttcgtttggtagacgaaatatgccatgaattggttcaaaagtgcaattccattggcatgagtttcaatccaaggccggtgacagaagttcagaaagactcacacaacaacatagaagctgctttaagggatgttcacaggagggctccgaatctgcagctgcttattgtgattcttccagatgttactggttattatggggaaattaagaggatgtgcgagactgaccttggtatagtatctcagtgcatcaatccgaagaagaatagaaacaagcagtattttgaaaatcttgcccttaaaatcaatgtgaaggctggagggcgcaatacagtgcttgagagagcctctgtgcctaatgggataccttttgtctcagatgtgccaacaatcatttttggtgctgatgttacccatcctacagcaggagaagaatcctcggcttctgttggagctgtggttgcatccatggactggccacaggtcacaacatataaagctctggtctcggcacaagcacacagggaagagattatacaaaatctcggcggaatgataagggagttgctgatttcgttctataagaggactggcaaaaagcccaaaaggattatattttacagggatggaataagtgaaggacaattcaaccatgttttgctccttgaaatggacgcgataaggaaggcttgtgcctctctggaagatgggtatctacccccagtgacatttgtcgtaatacagaaaaggcaccacacaaggctcttccctggagttcatggaaggagagatgttactgacagaagtgggaacattcttcctggaactgtggttgataccgagatttgtcatccgcgggagtttgatttctacctttgtagccatgctggaattcagggaaccagcaggccaatacactatcatgtcctctacgatgaaaaccgtttctcggctgatgggctgcagatactcacaaacagcctgtgctacacatacgcacgatgcacgcgcgctgtctcagttgttccaccagcctactacgctcacctggcagcattccgcgggaggtactacgacgaacaaggtagcagccccgcccccgatggaacctcagttgtcggtggcgatgccgctgcagccggtgatgatccacctgcgtgccgcaggctcccccagatcaaggagaatgtgaaggaagtgatgttcttctgctagttgctcagcgcgagctgcatgtcttgattcaggctgcctcaatatacaagaggccttttttttgtgataaactggtatcgatggttgtcctgactattttgcatcagtggctgctaattagggcttgtttgataacaatgtttcttaaaatcatgattttacattttttttaattgtcaggatgataccgta

SEQ ID NO: 1276 - DNA, 1656 bp, Zea mays
ttctagagctaatacgtggaacaaaccccgacttccgggaggggcgcatttattagataaaaggctgacgcgggctctgcccgccgatccgatgattcatgataacttgacggatcgcacggccttcgtgccggcgacgcatcattcaaatttctgccctatcaactttcgatggtaggataggggcctaccatggtggtgacgggtgacggagaattagggttcgattccggagagggagcctgagaaacggctaccacatccaaggaaggcagcaggcgcgcaaattacccaatcctgacacggggaggtagtgacaataaataacaataccgggcgcgttagtgtctggtaattggaatgagtacaatctaaatcccttaacgaggatccattggagggcaagtctggtgccagcagccgcggtaattccagctccaatagcgtatatttaagttgttgcagttaaaaagctcgtagttggaccttgggccgggccggccggtccgcctcacggcgagaaccgaccggctcgacccttctgccggcgatgcgctcctggccttaactggccgggtcgtgcctccggcgccgttactttgaagaaattagagtgctcaaagcaagccatcgctctggatacattagcatgggataacatcataggattccggtcctattgtgttggccttcgggatcggagtaatgattaatagggacagtcgggggcattcgtatttcatagtcagaggtgaaattcttggatttatgaaagacgaacaactgcgaaagcatttgccaaggatgttttcattaatcaagaacgaaagttgggggctcgaagacgatcagataccgtcctagtctcaaccataaacgatgccgaccagggatcagcgggtgttactaataggaccccgctggcaccttatgagaaatcaaagtctttgggttccggggggagtatggtcgcaaggctgaaacttaaaggaattgacggaagggcaccaccaggcgtggagcctgcggcttaatttgactcaacacggggaaacttaccaggtccagacatagcaaggattgacagactgagagctctttcttgattctatgggtggtggtgcatggccgttcttagttggtggagcgatttgtctggttaattccgttaacgaacgagacctcagcctgctaactagctatgcggagccatccctccgtagttagcttcttagagggactatggccgtttaggccacggaagtttgaggcaataacaggtctgtgatgcccttagatgttctgggccgcacgcgcgctacactgatgtatccaacgagtatatagccttggccgacaggcccgggtaatcttgggaaatttcatcgtgatggggatagatcattgcaattgttggtcttcaacgaggaatgcctagtaagcgcgagtcatcagctcgcgttgactacgtccctgccctttgtacacaccgcccgtcgctcctaccgattgaatggtccggtgaagtgttcggatcgcggcgacgggggcggttcgccgcccccgacgtcgcgagaagtccattgaaccttatcatttagaggaaggagaagtcgtaacaaggtttccgtaggtgaacctgcggaaggatcattg

SEQ ID NO: 1277 - DNA, 1593 bp, Zea mays
cacaccaccccccacgcggacgccaaggcgcaacggagagaaagaaagagaagggggatggagcgagaagaataagacatcgtcttcgaccaccccggccggcccctccactcgatctcccagcccctccgtcagccacctcgatctcatccgatgctctagctaggcaggctagcttcgcatggattcacccgcggctgcgtcgtcgctgctcctggaccactcgtgccgccgctcttcctcttcctcttcctccgccgcctgatggtgatggccagcgccggcgtcaacgtgcccggcggcgacgaggtacggaacccgaccgctgcgtccgcgtccaccccagaatgccggatgcgcaggcgccaccgcctcgagccccaaggatccggcgacgccgccgccgctgcggcgccgggcccgagctgggtgcgccgtctccgtcctgcggcctcccggttctcgccgtcgccgtcgccatcgctgtcgccgtcgtcgtcccagagctctgcggacaggcccaacgacgaggagcaggaagagctcgaccatgaggtggaggtggagctcgcgccggcggggccgcagctcgagcccggcgaggctgaaggtgaacctgaagccgaggccgtcgccgtcgccccgcaggtgtggcccgtggccttcggctccctgtccatggcggggcggatgcggatgatggaggacgccgtctcgctccatccggacttgtgcacctgggccgccgacggctcgcccatgcacttcttcggcgtctttgacggccacggcggctcccatgtgtccgcgttatgccgggaccggatgcacgaggtggtggcggaggagctggccagggagggagccaccttcctgcggcggcggcaggagtcggcggcgtcgggcagcgccgcctggtcggagcgggcggaggaggagcgcgcgtggcgcgcggcgctgcagcggggcttccggcgggtggacgatatggcggcgctggcgtgcgcgtgcgggcgcgtggcgcggccaagctgcagctgcccgctcgccggcacctcctccggcatcgtcggctccaccgccgtggtggccctcctcgtccgcggccgcctcgtcgtcgccaactgcggcgactcccgcgccgtgctctgccgcgggcccgccgggacgccgcccgtcccgctctcctccgaccacaaggaaggcagcgggcgctgctgctgcagcacggatatcaaagcaggccatgcagtggcagtcccgtggatagctcggaactttcagggcggtcgctgtgcgccgtcgctgtcgccggttggacacgtggcgggaacggcgggggattccgagggtgaggggggggggcacgtgtcggtggatgctggggcacgtggggagacccgagtggtcgccggctggtgggcccttgtacctcaaagctgtggggccggggctgcactctccactcgctgggtcgctgtcgcctgtgcggcggggcccgccggagaggaaaagggtgtggtggccggaggcgccacctgcccgtctctgcgtgcccgcagcagagagaagaggagagaatcgatggaatga

SEQ ID NO: 1278 - DNA, 1370 bp, Zea mays
gcgaaggcccagtcaaacaaattgtttactagcctaagtgtaagagcagcacgatggtgcatcaggctcagggacagatggtgcaggaggtggccgccgccggcctccccgcgctgccgagccggtacgtgctgagggaggaggaccgcccaactggtgacgtcgcggcacccgagttggccttccccaccgtggacgtcaatgtcttgccgaccccggtgacgtggaggaggccagcaagctccggtcggcgctcgaatcctggggcctcttcaaggtgaccggccacggcatgccggtatccctgctggacggcatccgggacgccgggctggagttcttccacctgccagcggcggagaagctgaagcacgccaaccgggacgacgccggcgagttccagcccgagggttacggcatcgaccgcgtggacaccgacggtcaggtgctggactggtgcgaccggctgtacctgacggtgcagccggaggaggagcggcggatgcagttctggcccgcgcggccggcgtcgctcgtggggctcctgcacgagtacgccctgggcagcgagcaggtggccaggcgcgtgctccgggccatggcgcgggtgctggggttcggcgaggggttcttcctcgggcacgtgggcgagaagggcggcacgtacgcgcggttcacctactaccctccctgcccgcgcccggacctcgtgtacgggctgaagccccacacggacaactccgtcgtcaccgtgctcctcctcgaccgcgacgtcggcggcctccaggtgctgctcagggggcctggccccggccggtgggtggacgtgcccgtgctcgcccgcgacgagctgctcgtcgtcgtcggcgaggagatggagatcatgagcaacgcggtgttcagggcgcccacgcaccgcgtggtcaccagcggcagggagaggatgtcgctcgtgctcttctaccagccggagccgcacaaggacctgcagcccgcggaggagctggtgagcgaggaccggcccgcgatttacaggaggctcaaggccaagaccttcggcgacgggttctgggatgcgttcgcgctcggcgagcgcaccatcgacttcctcaacatcaaggtcgacgacaaggagcatggaggcggattagtaacctcagcgccagcttgacgccatgcatgtgaacgaactactgtacacgatgtatcactggtagtgtaatgtaataagagacatggagcggttttccatgcaatataatctagtttatcacaggatctggttggtgttgatgtgcaaaccgtaaggagccgttctgttgtgtagaaatggtgacctgaaactattccaaaacgaattactttttaaa

SEQ ID NO: 1279 - DNA, 2085 bp, Zea mays
aaggcaacccgcgtcccagctctcgaggcgccacccacacaaatcccaccaccacccgcatggccacatcggagttcgcgccagcccaatcgtgcgcgccgccgcgaccccggcccgagaagggtcagacctggagcgcgtgccagtgccacacatgatccgcgtcgtccggaggcattgcgatggtcgcgcccaaatacggggaggaacgaattccattccacggcgtcgaaagaaatcctagccgggggccgcgatggcgatggcgatgcgggtggaatccgtggaggaggcgaagcaggccgccatcctgcccgcagcgcaggagcagcgcagggtgttccctgcggggatgctcaagctgttcctggggctcatgctgttcggcgtggtgatggggctgtcagcgttcggcgtgttcctggcgcggcacgcggaggagatggcggcggtcgcgcccgcgctgttccggccgtgcctcggggcggctgcagcggcggagccggagccggaggaggggctggagcggtggacccgccccccggctcgcgcgcagcacgcgatgacggacgaggagctgctctggctcgcgtcgtacgcgccgcgaatgcgcggccggagcgggtacccattccagcgcgtgcccaaggtggcgttcatgttcctcacgcacggcccgctgccgctggcgccgctctgggagcgcttcttccgggggaacgaggaccgctactccatctacgtccacacgatgcctctataccgcgccaacttcacctccaactccgtcttctaccgtcgccaaatccccagtaaggctgtgcaatggggccagatgactatgtgtgacgctgagagacgtctgcttgccaacgctctactggacatatccaacgagtggttcgtgctagtgtccgagtcatgcattcccctcttcgatttcaacacgacctacgaatatttccagaattcaagccacagcttcgtcatgtcgatcgatgatcccggaagagacgggagagggcggtacaacctgaacatggcgcccgaggtcgagctcgagcagtggcgcaaaggctggcagtggttcgaagcagacagagacctcgccgtcgcgatcgtcgaggacacggtgtactatccgaagttcaagcagttctgcaggcccggatgctacgccgacgagcactacatccagacgatgctcaagatcgaagccccgcacaagctggccaacaggaccgccacctgggtggactggtcgagagggggtcccaactcggcgcatccagccacgtttggtcggggtgacatcacggaggagttcttgaagggggttcgagggggagagacctgcctatacaacggccggaatacgacggtgtgcttcttgtttgctcggaagttcgctccgagcgcgttgcagccattgttagagttagcacccactgtgctcggttttggttaatggtcgttttgttttgatcggtgcatcctgctgctcctgtagtttctttgttaggtcactgtggatcattgcgtgtgtggagatatttcggtggaagaattgacgcagccatggacattgctgcccacctcctccaggtgatcattttacagggtatatatactgtattacagcatgtattttacttataaggacatgttttagtagtttgtatggtgaacctacaacggatcatatgaccctgtatttcttggttccttcggaagaatatggttcaaatcttcagaaaagaaaactgatgttcccacagctatagcttggaagactccttgggtgccgctctgtggattcccgctaaggcctgcactacacgtcgatgatctcttgcttttttaaggggagtttggttcccacctcctagtcacttttggttccatcagtgtttgttgtaacaattgttgtcacaatggaacttgacgtatatatgagacaagagggacattagattacatggtccgagggacgccaagccatttcattacttttgtttgaacctcttatgaaatgggcaactgatgttgatgaacatgtggatatgtttgtgatcagaatgcagg

SEQ ID NO: 1280 - DNA, 2063 bp, Zea mays
atgatgggtaattgacaacgtactcgtaaactaaatattagctggctacttcccttgcaacgattggttgtgttgtgtggctacaaatacgaatacacagcagccctctgctctctgcacctgcgcattttgtaaaggtacgaggagcaaggtgaggcaccaccagtaccaaccgggctccgagttcatcacgcacgcatggaaggctcggcggcacaggcgccggggaagaccgtcctgagggtggtggcgatctccggctcgctgcgcagggcgtcggccaacaccggcctcatccgcgccgccgcggagatctgcagggagtcgatcccggggctggaggtggagcacgtggacatctcggagctgccgctgctgaacaccgacctggagggcccgggccccggcgcgttcccggcggccgtcgaggcgttccgcggcaaggtgcgcgccgccgactgcttcctgttcgcgtcgcccgagtacaactactccatctcgggcccgctcaagaacgcgctggactgggggtcgcgcccgcccaactgctggggcgacagggccgccgccatcctcagcgcgtcgggcgggtcggggggcagccgctcgcagtaccacgtccgccaggtcggcgtcttcctcgacctccacttcgtcaacaagcccgaggtgttcaccagggcgcaccagccgcccagcaagttcgacgacgacggcaacctcgtcgacccggacaccaaggaccaggtcaccaaggtgctcctggcgctgcaggctctcgcgctcaggctgcacctggggaagctcgctgttgctgcacactcttcttgaacgtcgtcgtcgtcgggggtgcactaaactacactacacatcgtcgccgagctccaaatgccgtgccgtgtccgtgtgtgcgcgcttcaataaattctcggcgtccaacttttaatgagtgatgcacaatcgtgttcatttgtgagatgccctgatcgaatcgatccgtttgcgttttgccacgatcatcaaagaccaaaaggttagctggttgaaaacaaattggctttgtcatttgctaggagatactgcgacttgagtaccctgcgtgcattcttggtctcatcgaagtcgccttgtaatttgactcagagaaagaagaagaggaggaggaagcttccgtgctgacagtaccaacatcagcaagcaacctcctccaagaacaggggaaacagccacgccattgctgccgtaagcaagaggtcgacaggtgcgtgcgttacgtgcgtgctcgtcatgtatattcatgccgtcagagtcaacctccggcgtcaaccggttcctgttgcatcatccctcggttcagtgatacggagtagaatcgaacgtatctactgtgttctaataagttaaaaggtggttgatctcactcagggagttaatatagatcctcactaacttataagatagagtccaatgtacactatccctaaaattatttaaaaaaaaaagggagatatacgtgctacacgcgcgttcactcgccctgccaaagccgccatggccaagacgttccgtgaagggggcgtgatgtgctagaattcaatctcatcaatagcgtctaagttcttcatgcttactcttttctcgcctataataaggacatgtcacacacacacctccctcttagatcacattctctgacaactcgtgtattcctgcatacaagacatctcgctttcttcctcaaagcttcctgatattaccgagaagagcatctccatcaccaaggctctacgtgcatggacccgacaagagtagccctctgaattcctgactgttaaagatcatgtccagggtagcgaccaataaagtttttttgggggaacatttacatgcaactgctcgttggacagctacatcatctactttctaacggttgttcgaaggactgcactgcatcaactcttcactatgttagactttacagctacaccaattaagaacaatcaattagtatgactgctccacttggtaataacgcatccaatacctctggcaatagcttcgcg

SEQ ID NO: 1281 - DNA, 1675 bp, Zea mays
gtcagtgtcagcactgcggcgacggagagtgaagcaagacggggagcggccgggagcagtgcatggtgtggtggtggtggtaaaaggacggggattggacagcgacgctgatcatttatgccgccgtgtaaatacccaccacaagcagctagcttcgcaggtcggcttccacatctctctcattctcgtctccccccactgctagctgctgcagctctcaagctagctggcagctagggtttacaccgatccggggtccggtcgccgccggccggcggaagcgggcaatcgagctccgcgacgtcgagatctgcttaattgctaggtggtcgccgcgccggcagccccggcacagagaaagtcaattgctctttgcaggggttgctgctcgttttaaaagagatcctctagccagcagggacaccgcgagatggcgggcgccgtcgggctaacaagacgatgataaggggcggcaaccaccagcaggcggcggacgtcgaggaggagctagcccggaacagcaggcacgccgccgccgtggcgacgtcgcggcaatggtcggcgcagacggagtcgcgcatcgtgcgcgtctcccgcgtcttcggcggcaaggaccgccacagcaaggtgaagaccgtcaagggcctgcgcgaccggcgggtgcgcctctccgtgccgacggcgatccagctctacgacctgcaggaccgcctcggcctcaaccagcctagcaaggtcgtcgactggctgctcaacgccgcgcgccacgagatcgacaagctgccgccgctgcagttcccgccgcaggacctcatggttgggcacctgacgccccacaacatgccgctgatggtgcacgacgagaagttcggacacctcgccgcggccgcggcgctcgcgagcggcggcggcggcggcgccaaggtcagccagcagggcaacgtcgtcgacgtcgacgggaccggagcccaccacttggtggggaggttccccggcggctaccaccggttcatggagctgaacagcgcgttgggcatggtcagtggcgcaatggcgccgccgtataacaacaactacaccggagaggcatggaataacagcggcggcggcgtgcatgacagcggctcgccgcagatcgtcgccgcagccgctcaccactcgccgttcccatcgttgctctccttggctccacgtccgcatcagctggcgttctactcctcggaagctgatcagcagtttcaggtggagaaccttggctcgcaaagcctgtccttgagctcggcgagggcttaccatgatcaggctagctagcggactgcgtactggaacgactcttcgatcgagattaaggtagcaataatgctcactgatcccaaaattcccaagtacaatatactatctagctgtgcaagagtgtgcatgtcagagtttccaagtgccttttaaggatcggatcggaggcagttaagcttgtgatgatttcataattagtagtagacctgaaacagaataaaatgtgcggggcttgatcttgaagcgtacgtgtgtgtgccatacgaatttgttacttctttcaatacacaaaggagtaatattaatctgtatgctggcttgtagaataacaatatatggtttgctaatattacggttttagttataacattttatcttggct

SEQ ID NO: 1282 - DNA, 1938 bp, Zea mays
ttggagcgggattgttttgagaactgcggctatgcttcagagtcggtcgattctttgtccacaagataaggaagcaagcatgagtactctgtaaaattggagagctcgaaaggctctgccaattaggggaaggaatggatgtttcatcacgctcgttcaaaactgaaaagacagtgaaacaccagaggaaatgatggtgagcctagagagcgggaggcggagcggctactatgttttgtcgattttgttttttttttccaaaaaataaaagacaaaagaaaaccgtccctcttcgccccccccccccccccttcttgcttcgcgtcttcttcctccccaagtcgcctccgcgcctccgcatataggcagcgtcgcccctctccgctttcccgaattagcgccaccgccacctccgcctccgatcccgcctctcccgggaacgaagccgagccgcccgaatcgccctccacccacccatatagccgggccccggaccgctccccaccggctcgcgcccccgacccctccgccgtccgccgccgcatcgcgtgggagggggaggaggaggaggaggaggaggccatggccgctgccgtagcttgcaggcgcgcggcgctcctgcacgggcaccagcagtggccgcagcggtgggcggccgcgccctgcccccgctccatctcgcagctcgtcaagaccaacggccgccgcgccttcctcgtagacaccctcgccctggtcaggaagctggagtcgcagggcgtgcccaccaagcaggcggaggcgatcacctccgccatcacggaggtcctcaacgacagcctcgagagcatctccgagtccttcgtctccaaggccgagatgcagaaggcaagcgcctcgcctttggcattgcgtggatggttgtttcatagaggtttgcttgggtcctgtggacggattgctcggttgtctttctcatttggtggtcttggtactctgtttgcagagtgagatgctgcaggagtccaatatctccaagttcaagtcccaagtgcagagctcgcaggaaaaccatttctctttactacagcgggagactgagaaacttcgcggagatattgataagatgaggagtgaactgaagtatgagatcgacaaggtcaccgcaggacagcgattggatctgaatcttgaaagagggcgcatacgtgatgagcttgccaagcagaatgaggaaaccactgagcttaccacaaagcttgacaaggtgagtggtagtaaactaaggccgcatgcccatgctttccgtgtcatcgtttacatcagagaccaaccaaaatgttttgccggccatatgcaggaaatccactcactgaaggcccagttggaggcagcaaagtacgatgtcatcaagtactgcataggtaccattgtttcgatctcagccgtcggcctcgccgtcctccgcatcgtgatgtgaaggcagcaaagcaaatacgttctttggttttacccatattcgtcgcccgtccgtggaaacccgcaagaagagaataggttctaattctgttcctagtttttaaaggggacaaaacgtgctcaggggagggggacacttggtagtagggagatgttgctcaaacttgtaaaaatagattgcccgtggaagaaatgcatccgaaatgattctttacctgtgctgaagcgtgcctggtctccagagctgctgaagccactgttactgtgggggatcctgaactgtgttagcctcgtcctgtgttggagccagcaatttgggctctgccatctggccgttatcagttctgcccactcgtttgatttttgattgttgttcctgtcagatatggactttagctcccgtcgaggactcgctgcgcatgttatgtgtaggaccgatcttgctagaagctggtagagctagccctaaggccaactcca

SEQ ID NO: 1283 - DNA, 2714 bp, Zea mays
cacgcgtatataacccaagaggagcgcgcggacgggacgacgcccgcgccaccacaattcacaagccacccacgccccccgtgcccgtgcgcgcggcctatatatcgccccgtccgtccccgatgggcgcgcccgcgccgaggccgccgccgccgcgcgcaaccgcccgcgccctgctcgccgtctccgtcgccgtcgccgcgtggctcggcgcctccgcgggctcggacagcggcgccggcgtgctgcggcgggcgcagcgcggggagttcgcgtcgtggatggccggcgtgcggcgggccatccacgagcggcccgagctggcgttccaggagcacgagacgagcgcgctggtccggagggagctcgacgcgatgggcgtcgcgtacaggtacccggtcgccgggacgggcgtcgtcgcggccgtcggcaccggggcgccgccgttcgtcgcgctgcgcgccgacatggacgcgctcccgctgcaggaggaagtggagtgggagcacaagagcaaggaggcccggaagatgcacgcctgcggccacgacgcgcacaccgcaatgctgctcggtgccgccaggatcctccatgagcgccgcaacgacctgcagggcacagtagtcctccttttccagccgggtgaggaggtcggtattggcgcaaagaggatggtggaggcaggcgccgtggagaacgtggaggccatattcgggttccacgtcaccgtgctgctccccaccggcgtggtgggctccaggaccggcccgctgcttgccgggtgcgggttcttcgaggcggtgatcaccggggtcggcggccacgccgcctccccacacaacaccgtagaccccgtcctggcagcctccagcgtcgtgctcagcctgcagagcctcgtgtcgcgcgaggcggacccgctggactcgcaggtggtgacggtgacgaggttcctgggcggcggcgcgttcaacgtggtcccgggctccgtgacgatcggcggcacgttccggtgcttctcggccgagggcttcctgcggctgaagcggcggatcgaggaggtggtcgtggcgcagtccgcggtgcaccggtgcgcggcgtccgtggacttcagcgccggtgggagcccgctgctgcccccgaccgtgaacgccgcgccgctgcacgcgcacttcgaggccgtcgccgccgacacggtcggcgtgggcgccgtccgtggcgccatggagccctgcatgggcagcgaggacttcgcgtccttctcggcggccgtccccgcctcgcacttctacttcgtcggcatagggaacgaggcgatcggggccgtgcacgccgcgcactcgccgcacttcctcgtcgacgatggtgcgctcccgtacggcgccgcgatgcacgccaacctcgccatcgagtacttgcggaaccacgcgatagccaataggtccgttggtccccacgacgagctttagttagatctactgcagccagcctttcgcgagcagccacagcggtggcggcggcgccggcgccggcttcacgctcatagctcgtgcccagcgaagctcaagacgagctcatgcttgcgatcgtcaagcaatcacgtcgtgatccgatcattttgtggctcagggagggcgttgtaggaatgcagtgcgactgatgttgttgttcaatgcgcggggcgtaattaagctggttgagagataagaatgagatgttgcctttacaatacaggcgctcctgtccgagctctgttccacaattagtttgggaaatgaaagatgagaccgtggactccaatgtttcacatcctgcttttttttttataaagcaccgaaaattttaaaattagaagtactgattccgttctcgaatattgtcgcgtgctatataaaaaaaagaacggaagaagtaggttggaaggaaggagtaggttggaagggacatcttttgtatagttcatcagagaagaaacattacacaagaaattccagagaaaaaatcattaatatgcataatggttggaagggacgtgactctgattctgaaacaaatacctactgcggctgaggaactgccgatatagaatatctgaatcggtaaagatacatcatcataattcatacatgcgatgcagctagcgtaggaagaaacatgctaggactagtactagtacatacaaagtaggaacgggacaaactcgccgtggcctggagcactcagtggcgcaggctgccgaagaggagcgccacggcggggcagaggacggcggcgacgacggaggacgagacggcggcggccccagacgtggggctgggcgcgggcgcgtcggcggccatcgcgacccccgcgagggcggacgcggcgagcgcggcggcggcgacggcgcggaaggccttggatgccatttccttacggtacagtttgcaggcttgtaccgtgcaccgtagaaagggagatgccgaggagggatctgggattctgggttgtactggtgcagtggtgtttgtgtcagagatgaacggcgcctgctatttatagctgacgaacgccaaaggctggaagcggagccaccgcgttcacagactggctgccctggcgtgccatgcctgcctggtgcttgcctccgagacagctcacgatcgacggctggttggccgacgcggtgcctgcgagcctggcgtatagctgcatgtccagtgttcatcgatgagacg

SEQ ID NO: 1284 - DNA, 1845 bp, Zea mays
cgcgggttgcccgtgctctctcggccccttccatcgcgcacgatggccgcctcgtcgcctgctccggaaaggacctcctcggctttgaacccaacgggtccttcgcctggatcgtgcccctcggccacacgtgcaacgacagcatcggccctgtattccagggagagcaggtgtatctggtggcagaggacaaggtcataaaggtcacaccacggaacgtgcacacggccaagccagcatcggaggttttcttcagccacaatgcgacgtcttcagggaggtccgaggagatcattggcctggccgtcagtggcagctactcgtctctcttcctcaccatcagaaaccggggactcttcgccttctcgctccgaggcgagctccaatggagcgctgggcctgcgcttgatttcttcggttaccgtcttggctgcaagagaaacgtctccggctgctatttcgattcggctcctgttgttgatcagtgcgagggggtgctctatgtaaggtccataccagttgcatacataattgttctgtccactttctgtgctagctcattgtgcaccagccatgttcttacagatatccaacactgaaggccagctctattccctgtacatcgataaccgtggggtcaggtggatccaagacttgagctcacatggcaaagtgatgacagttgcgccgggaaacagtgggtgcctatacatcgtctttccacggaagtctatcgtggtggggattaatgcttcgacaggaaacatttcttggacgcagaatactggcccaatcagtaatgagaaaaacttaccaactgtcgattccaacggttggatgtcaattggttcgctagatggggccctctactcgatttctcctgatggtgagatgagaaagtttcttggagaaacagcaaatggttcagtgatccatgtaggtccagttcttgactgctcaggactttccatgtatgtcgctaagaccatagcggaaggaaaatccatccagacaactggtgactatacctatgtatcggtgaagaagccatcattcattttgttcaccttgttggctcccgcaactggaactatttactggactggagagtatcctggggaactgtcaaatttgctgtccagtagtgatctggacgactttaccgtagatgagactgttgttctaactcttttatctgcatcaaagacagggatcagcaacaccacacagtgctgtacaagaaggcaaaagattgcttcgacttgcaggcaagccaaagccaagtttgtgcaggctgattcagaagctgtagccatttcgttatgttgcatattttgggcgaagaaaaggctccaaggcaatggattgcagaagttcctggagaagaggcactcacttcacagcaagagaagaatcttaggaaagaagatctcggagctcgagcagaaggcagctgaagatgtctcgtcgaatgaagctttggggaagctgggtgaaatggtgaaagccaaggaaagcgtggagagaaaactgtccggatcatacagccttggcagggacgagcccagcttgcagcagcaaggctccttgccactgtaccatggcaagtacagcagccattcgttccacagctcacagaaagagagcattacggttttcaacgtgctaagtgacacttctacttcgggtgatggtaccagtagctgttcttctgatgatagcgactacgagagttgcagtggtacgagctctggagaaatggaactggatgtgtggccttctaggtcagcagaagaagctgggcattccaacactgcaaatgttgaggaggaaagtccaacatga

SEQ ID NO: 1285 - DNA, 751 bp, Zea mays
cccttgctctcccattccccccctcccccgcgggcgcgggcgcgggggtccgggattagggtttcgtgctcgcctcgaccagcttctagggacacgctcgcccggtcggggctctgcgcgtcgtcgtccgcgatcgatccgagcgcgcccctaccgctccgcgcctcggttcggttccgccgcgcctcgcgatctctggcccactcggctcgatcgtgctcttcgcggacgcgatcgatttgaagggtgaggcaatgaagagtggggagagtggtagggaatggcaacttcagatcccggaggaatcccctgtacatactgctctcttcttggtcttggaggagataacctgagactccctcaggttaagccccaacgcagcgagccctcgcaagaggagctattcgtctgcacgtgcccatgaactactcctgcaactattctccacactaacactggtgagctcatccgggtgggttctccatcaagttgagatctagtgatagctaactacataagtacgctactaccaccaccgtccaccattagtttctcatttctgcaaaagcttgacagcgtgctcaagactggagatggggtgttgtgccttgctacttgacccctgttagaccaactactagaatggagattggtggactaaatgcttaaatttgtaaagtaatgtagtgtaatcctgatcctgaatcatcggtttcactcgcgctatacaattctgatgtggttatcttaa

SEQ ID NO: 1286 - DNA, 1759 bp, Zea mays
agtccattccctgttgccgcatgcacaattgcacacacacacggcgtgccgcatcgtgtaaacaccagggacccgcgcgatcgcacgcctattctaggcgcaaacccaagcgcggagacaaagcacgcaagcaagggccccccgccgctgtaactaaccgaacgaggaggacaagaaagcctcctcgttaagattggaatccagccagagacagggccagtctccagtctccacccaccgttccctcccctcccctcccctcctctcccctcccctgtcgagtccggctgtccccacgacccccacgccacgcgctctctcccgctcctcgcaacggcaaaaccccagcgaattccccacgcgcccgccagctcggcggcggcccagggatccatggagaagtacgagctgctcaaggacatcggctccggcaacttcggcgtggcgcggctcatgcggaacaaggacaccaaggagctcgtcgccatgaagtacatcccgagggggctcaagattgacgagaatgtggcgagggagatcataaaccaccgctcgctgcggcaccacaacatcatccgcttcaaggaggtcgtgctcacgcccacgcacctcgccatcgtcatggagtacgccgccggcggcgagctcttcgaccggatctgcagcgccggcaggttcagcgaggacgaggcgaggtatttcttccagcagctcatctgcggtgtcagctactgccacttcatgcaaatttgtcaccgggacttgaagctggagaacacgctattggatggcagcccggctccgcggctaaagatctgcgactttggctactctaagtcatcgctgctgcattcaaagcctaaatccaccgttggaactccggcgtacatagctccggaggtgctctcccgccgggaatatgacggcaagatggcagacgtttggtcttgtggagtgactctttacgtgatgctggtcggtgcgtacccttttgaggaccccgatgatcccaagaatttcagaaaaacgattgggagaatagtgtcaattcagtaccagataccagagtatgtccacatatcccaagactgcagacagctcctggctcggatcttcgtcgcaaatcctgcaaagagaatcacaattagggagattaggaatcacccctggttcctgaagaatttgcccagagagcttacagaagctgcgcaagcgaagtactacaagaaggacaacagtgcccccaccttctccgatcaaaccgttgaagagatcatgaagattgtagaggaggcccgcacgccaccccagtcatctactccggtggctggttttggttgggctgaggaagaagagcaggaagatggcaagaggtctgatgatgacgagcagtatggggaggatgaggactacgatggcgaggacgagtatgataaacaggtgaagcatgtacatgccagcggggattttcaacacctcctaaaatgaagctcctggcagcgctcaagtcctcaactggtgagatactgtctggatttgttgtagtttgtggtgctgagatgctgcaccctcggcgcgtacttgtagtttccttctgtctggatccacctttttttttcgcatattgtgtgctatactctgtaaattatcaaactggcttcctcaatgcctatgtaatgaaccgttgagtgattaagatagaaggcgaaatataatttctatggaacatacttcaatcttcggcaacttccacacatcg

SEQ ID NO: 1287 - DNA, 451 bp, Zea mays
gttagggtttcttaacaaggagcagcggcagcggcgaggtctatggcgtcgacggcggggtacctggctcggcgggcggcgcagaaggagcgggtgcgcctgctctaccgcagggcgctcaaggacacgctcaagtgctcaactgggccatccaccgccacatcttctaccaggacgcgtcggatctccaggacaagttcaaggcctaccgccacgtggataacctggacgtgattgacaggctcatcgacgacgcggaggctcagtacaggaacttttaccaccctgatcactacaccggtaagctttctcttgtcgtcctggtcctctctgggcgtgtttgccgccatgacccagcagcctggctgcgctcccgggctgtagctcccgtgtttgcatcgcctggcttgctcgggagccaggctgtgggcgtgcaaatttagcctctcag

SEQ ID NO: 1288 - DNA, 2732 bp, Zea mays
ccatggaaattcgcatcacaagcaatcgatcaagctagcatggcggtgaaggtgtgggtgttcgccgtggcactgatgatgtgcgctggtgtagggcttggagctgacgacgacggcggcagccgccttattagccgctgtcgtctgagctcgcccaactaccgcggcgccctggcaaaggccatcctcttcttcgaggggcagcggtcggggcggctgccggcaaaccagagagtcaggtggcgcggggactcggcgctcaccgacggccaacccgaaaacgtgaacttgacgggtggctactacgacgccggagacaacgtcaagttcggtttcccgatggcgttcagcgtcaccctcctgagctggagcgccgtcgagtaccgcgacgaggtggcggcggcgggtcagctccgccacctccggtccgccatccagtggggcgccgacttccttctccgtgcccacaccacgccgaccaccctctacactcaggttggcgacggcaacgccgaccaccaatgctgggagcggccagaggacatggacacgccgcggacgctgtacaagatcacccggagctcgcccgggtccgaggccgccggcgaggcggcggcagcgctcgccgccgcgtacctggtgttcagggacgaccgggacaagaccttagccacgcagctcctggccgcgtccagatccctcttcgacttcgcaaacgactacaggggatcctaccagttgtcctgcccattctactgctcctactcaggctaccaggacgagctccagtgggcgtcggcatggctctaccgggcaaccaaggacagcaagtacctcgacttcctgcagaacaaccagggcggcagcgccaccgagttcagctgggacaacaagtatcccggagctcagctgcttgcaacacaggagtacttggctggaaggacagagctggaaggctacaagaggggcctggactcgttcgtctgcgccgtgatgcccaacagcggcaacacgcagatccgcaccacccctggagggcttctcttcacccgcgactccgttaacctgcagtacacaaccaccgccaccctgctgctgtcgatctacgcgaaggccctcctcgcttctgcagcaggagcagtccagtgcagcgccgcgaccttctctccggaccagatcagttcatttgcgacgtcacaggtggactacatcctgggagacaaccccaggagcgcgtcctacatggtcggcttcagctccaagttcccgaggcgcatccaccaccgcggctcctccattccgtccatcaaggtcctcccccggaaggtcacctgcagcgagggcttctcgtcgtggttcccgacggccaaccccaaccccaacgtccacgtcggcgccatcgtcggcgggcccgacgggaacgaccagttcggcgacaacagggaggactccacgcactccgagccggcaacgtacatcaacgcggcatttgtgggcgcctgcgctgctgcactggggcgcagccagcaggtgcctgtggacgaaacagcctcagcccacagtgatgttatgtaactagctacaacggaggagtatgcaagggcgggcaaccaaaccatgatatcgctttgtgtaacatcccaaggcccctacccccactaccactcttgatcatcctgataagaagagataaataaataattaaatacaatggcaaatctgcagtagtaaacattatctgccgagtcaaacatgcatcattcagcaaaacccaatcacatgactagagaaagcagtcaatctcgtttcaactttgatcgaaatgaagtgtcttatctacaatggtttgctgcagtactccagcaacagctggacaaatcaaaactaaactgggggggttctatttttctttatactgccatttctatatatagtagtgtgccgctaagctagctggccaatccaggaaccagccagagatgcacaattaaccgcggtgccaaagaagagttcccagaaccaaagatccaccgcgagaaccgaagagaagatgagcagggcgagcgtctcgtatctattcaaaggccagcctgaagcctcagccagcgtcttcaacaaggggagggattcgctgtctatctcccggcttcttattgaccacgcggtgacccactgcacatcggccgggaccatgtccagctcttctcgaaggcgtcttcccaggtctggcatgtgtccgccgccgtagaggaccgctattctcttgtacccaccgtttattgcttcctggatcttctcggcagcaactctgttcctctccccaatgataactgatttctcctcaacgggtgtaggcacagctgtgaatctttaataaaaaaaagagaagtaaatcagcgaatactaagaacctcaattgcctgattggtttcagattactcactcagatgtcagttgctttgccaagaaaatcttcagtgcagctccaaaatctagcctggacaatgcctccagctctggaaacccatcttgcttttccactggcagacacagcccagtgatgacgagtagcccaacaagtggcattggtagcacacgcgaggcccatagtaacttcgacctccaaaagttaaggccatctggcatgttacttggctgcaccaaggctttggttgatttcagtgtcatgtctatggcaaacgtgagaatactttcacctctttcactctgga

SEQ ID NO: 1289 - DNA, 2317 bp, Zea mays
accaagcaatctaaaatagcatttccatcaaatattctagaattgaagtacataataatctgtcgtgacaatctactcagtgcctatgccgtgacattccctttctaccaagaagccaactcgtaaaagagacctcaccagataagctacgacagcattttaacatcgtttgaagtaggaacctcacccagattcattgaaccgccagctctgccatcttatccttgccacgtgaagtgacgttcttggcgaccccatcaatctcctcgatttggatgtccacgagcttattgagctgttgctcctgcgtcctgagatcctctggctgctgctcaacagtttgttcatcctcatccccaatctcatgtgtccaatacacagcaaaagatgcctccttattgaaactggttggcatctgcaacagacgcttcctgttagttccagaggcactgccaaggatctcccccttcatgaggtcatatatgcaggccctgaagttgtccatgctcttatgatcctgagagtcgaggcttaggaagatcagaatttcccagcaccggaggaactgtttcttctttatcttcagcttctaacgaacagtctccatcaggtcagccggtggaaccattctcaaactttgggccctttttgacaggttggtctccttcagagacgagacaatagcaccaagtgcaggtttgatcggatcaaacatgagcaaacggaggcagtcaacggatgatctcacatactgcagcaataacaatatacacaaagacgggagagagaagagagatggcggaagcgacgccgtacgaggagcagcggcggaggcaggtggaggcgaacaaacggaagctggaggagctgcagctccaccacctctctgctgccatcagagaggccgccgccgccgccaagccctcgctggtcaagaagcggaaggcgcgggtgcctctcgacgtcgccgacgccgtgatggagccagtacggcggtccggccggctcgccaacctcccggataagcccgtgtaccgcgagaaggttcccgattttgggatgaagattaggaggtatgcgctcggtttccatctcttcaatcagtcaggtcttgtttgtatgtcattagctaatcttgctttgctttggtttggtctatcttcgttattgagcggcaggacgtacggatcggtgagaagagatctgaccaaccgggtgtacgcgaccgacgatgcgaggagctacgccatctctaaggcggaggatctggagcaagagctggactccagcttccccatcttcatcaagcccatgacccagtcccatgtcaccgggggcttctggctgggccttccgattcatttctgccggaagtatctgcccaagcgtgacgagatgatcaccctggtggatgaggatgatgacgagtccgacacgctgtacctcgcaatgaagcgggggctcagtgctggatggagagggtttgccgtccagcagaagctggtggatggagattgcctggtcttccagctgattgagcaaacaaagttcaaggtctacataactagagcaagttcctactacgaaagcgaggactgatgaaactagtagcttgtaatctggtgattggagctcagtgaacattacacaattttcagaatggctgccatgatgttaaccggtttccttcttcatccactcagttatggaggtggctgcgttggacaagcttgcatctgggaatcgctggggtgtcttgaaactttttggtggcagaaagttagctgatgtatgaaacccagtatctcctaccaattgttgctgatttgtgtacttcttgggcttaccacttgcacggttcagaaacctgcactatgtaagggggttgttggtggcagctaacctcgttttgtaaatgattggtgcccgtccatgtttctcttagcgttcaatctggcctgttagttcaatttttaatagctacttccatcatgccaccagtattggctttgtcaactgggctaggctggccatttctcattgtgaggaacatggttgatgggcagagaattgcggaggtcgtggagggaagaggtgagacgacgagggactgggtgccaccgccgaaactgtagtcatcgctggagaggaactggccattgctgttgtagcctgcaggcgcaggaggatgcggcggcacagacaggaggggcagactctgttgtatggttttcgcttagatttttttggtagcagttgtatgttctatatacaaactaccccttcttcttgagaggagagagtgcacaccccttca

SEQ ID NO: 1290 - DNA, 2272 bp, Zea mays
cgactgacgagtctgggagacctgcccgctacggcgcgccccccgggccaatcgcctcctcgcacctcgctcgcttcttccccttctccctcctctgtcctttcacacgtactccagcttgctcttttcctcctcccttcggccctcgcccatccgcctctctccccacgcgcgcgcgcatcgccctcccacagtcccccccccccccccccccccctcctcatcacccacccctagcaataccacactcctactgcaagacccgcccgcccaccgcttcctcgcatctcgggcgcgtgcctgcctgctctcgcggacgtggtggtggttctccggcgccgtggtgggcgggggacgagcgggtgggggaccggcgggtatttttggttgctgtggtttcgtgatggcggcggcggcgatctgcgtggaggacgaggcggcgtgcgccgccgcggaatgcgcggggatcgggaatctggatctcgctgccgccggcgccggggctggcggcaagaggagcgtctatctcatggactgcgcgccggtctggggctgcgcgtccacgcgcggccgcagcaccgagatggaggacgcctgcgccgcggccccgcgcttcgcggacgtgccggtgcgcctgctcgccagccgccgggacctcgaccgtctgggcctcgacgctgacacgctccgcctgccggcgcacctgttcggcgtcttcgacggccacggcggcgccgaggtggccagctactgccgggagaggctccaggtgctcctgaggcaggaactgaggctgctcagcaaggatttgggggagacaagcgaggccgacatgaaggagcactgggacgagctgttcaccaggtgtttccagaggctggatgacgaagtgtcggggcaggcgagcaggctcgtcggtggcgtccaggagacacggccggtggccgccgagaacgtcggctccactgcggttgtcgccgtcgtgtgctcctcccatgtggtggtcgccaactgcggggattcgcgtgttgttctctgccgtggaaaggagcccttagagctgtcgattgatcataagcctgacaggaaggatgaacgagcgaggattgaggccctggggggaaaggtcatccaatggaatggctaccgggtctccggtatacttgctatgtcaagatcgattggtatgtatattgcttctggaactaaatcttggcagaatgaccttttcccctttttaagtgggatgtagattatagttgtagcatcatgaaaaatgcttattctgttaaccgtaggctgcatgatgtaaagtatgttagttaggtgaagcagactagcaggccctttctgcaagttttaatatcaaatttaagcaaccaagttggtgcacacattagtttttttgtggttttatatgacctaggcaattttatcccagaaataattttgttaaaagactctgtactgttctcatgttctgtagcatggtgattttttgctagatgtcatgtttccttttaggaagatgagatgagatattttgatgtgccctcgtttacaattaccatgttatagttgctttacatttaaaaaaaaaggaacttactccatcagccatttggttaaacagcttgtttctgtctgagataggaagcatgagacttaaaaaatctactgaaatcatgttccagggtttgattgcaactgcctggatattggctctaatcctattagtgaagctttaaaatgagcttaagtatatttctgtgacatagaactcaggatgcagatgtgattaggaaattgttggggacttgttctcaaatgctaagaattaagaacaaggcaacataaaaagtgttaaacgttaaagtccttcgtccttcgaagcattatgtcccttcgggaaataatgagtttcggacgaaggtcataagagacgtaccttcgtaaacataacaagtgatgacgaaggatttatataaagcatgaaatataatataagcatcatcataaaatcatttctattttattaacatggaaaaatagaaatgatttcaaattacaaatgtaccttcggtcctgagagaaggtagatagtacaggcgttgtgcaaaagcaaaatgccaagtcagcgtgaacagtacgggggtactgttcatctatttatagacacaggacgcagcctgtgacgaattacaattatgccctttacaaaagtttacaacattatgttagacttctatggataaaaaggtcattctgcctc

SEQ ID NO: 1291 - DNA, 1088 bp, Zea mays
cctacaccgcacctgcacacaaggtagcaacatgaataatccccaaaaccctaaagccagtgctccttgcaccttgccaccggagcttcccaaagaagcagtggcgaccgacgaagcaccgccgccaatgggcaacaacaacaacacggaatcggcgacggcgacgatggtccgggagcaggaccggctgatgcccgtggccaacgtgtcccgcatcatgcgccaagtgctgcctccgtacgccaagatctccgacgacgccaaggaggtgatccaggagtgcgtgtcggagttcatcagcttcgtcactggcgaggcgaacgagcggtgccacaccgagcgccgcaagaccgtcacctccgaggacatcgtgtgggccatgagccgcctcggcttcgacgactacgtcgcgcccctcggcgccttcctccagcgcatgcgcgacgacagcgaccacggcggtgaagagcgcggcggccctgcagggcgtggtggctcgcgccgcggctcgtcgtccttgccgctccactgcccgcagcagatgcaccacctgcacccagccgtctgccggcgtccgcaccagagcgtgtcgcctgctgcaggatacgccgtccggcccgttccccgcccgatgccagccagtgggtaccgcatgcagggcggagaccaccgcagcgtgggcggcgtggctccctgcagctacggaggggcgctcgtccaggccggtggaacccaacacgttgttggattccacgacgacgaggcaagctcttcgagtgaaaatccgccgccggaggggcgtgccgctggctcgaactagcctagcttctcagttccccgtgtacaataagaggggcggtcgcggcgccgcgccgcgcccttgggttgggccgggcgctatgctgcagtttggtttgtaaactaacgagcctagggtagctggtgcacgcgcgccacctcgccggacgtcgccgtcgtcgtcggcatggacttaaccggcgggccctgttgttatttctcaagtttgtagccaacgcactgttcggtgcgttccataatttaatttaccatgttgctctcgaaatgaa

SEQ ID NO: 1292 - DNA, 1610 bp, Zea mays
ttccttccctccccctccctgctcggtgctcgcacacgctggcgcggcttgcccccacgctgcgctcccaccaccaccactatataatccccgatcgcctcacgcacacgcaccgacccaccggccgacgaggggcgaccgccgcaacacaaatccacacgcccgccgccaccgccgccatacggacccactcctcctttgccctggtgcgagcaggcttcggcagcaaaccccgcagactgctcccggacgagggagaacgcgcggggctgggctagccgctacccgctagccaggggaccggggcggaggcagcgaggaggtacgtatggacaagtacgaggcggtgcgggacatcgggtcggggaacttcggggtggcgcggctgatgcgcaaccgcgagactcgagagctcgtcgccgtcaagtgcatcgagcgtggccaccggattgacgagaatgtgtacagggagatcatcaaccaccgctcgctgcgccatcccaacattattcgcttcaaggaggtgatacttacaccaacacatcttatgattgtgatggagtttgcagcaggtggagagctttttgatcggatctgtgatcgtgggcggtttagtgaggatgaggcccggtatttctttcagcagttgatctgtggagtgagctattgccattacatgcaaatatgccatagagatctgaagctggagaatgttctcttggatggcagcccagctccacggcttaagatctgcgattttggctattccaagtcatcagtgttgcattcaagacccaaatcagcagtaggaacgccagcatatattgcacctgaggtgctatcccgtcgcgagtatgatggaaagcttgcagacgtatggtcctgtggggtgactctttacgtcatgcttgtgggagcatacccatttgaagacccagatgaccccaagaatatacgcaacaccattcagcaaataatgcaagtgcaatacaagataccagatcatgtccacatatctacggaatgccagcaacttattgcccgtatctttgttgccaatccaatgaggagaatcacaatgaaggaaataaagagccatccatggtttttgaagaacctaccacgggaactcacggagactgcacaaggcatgtactacaggagggataacagggtcccttcttattcagaccaaacgtcggaagaaatcatgaagatagttcaagatgcaaggaccatgccgaaatcatccagatcaggctatgggtggagcagtgagtattcggatgaagaagaagagaaggaagaggaacacagaccagaggagcatgaggaagaggaagatgaatacgataggagggtgaaggaggtccatgcaagcggagaactccgtatggacgctcttcacatatgaaagctagtggaagagaaagttgcatgtagataactgggttgttgcggatctgaaggatccagtgggatgtatgcagttttggcttgagaatttgcttctgtttgtcaattttcatgtaacataatttaatacaccgagacaacagactaccatgttcttatattggtaaatatgaagcatgtaccttctatctgca

SEQ ID NO: 1293 - DNA, 4728 bp, Zea mays
ctctgttaccgcggtaagcctctgccctctgggaaaatctccgacccgggtccaaatccagtcgacggccgttgactgcgagcgagaggcagtggctgtggctgggagcgagcgagaggagtgactcggaagcaagcggaggcggctggagggacggcagcggatgcggtgaccatctcgcgcacgcctttccccgtgagcgctggtcctggctttccttatctccccgagcaaccccaccgcacccttctcggtggatccgagggctggagtctcggcggcggcatgaagcggcagaggtcgtacggcgacggtctggacgacgaccggcggaggttctacgaccgcggccccccgccgcgggactacgacggcgataggttcgatcgcaggaaggggttcggtggcggcggcgggttccacgacagccggtaccgagactacccctccccaagggggtatggtggggatcgggccttgcaccggtccgagagtttctctggcttccgtcgggagttccccaagggtttccggtcggagcgtgacaggtcgcggcgggatggtgacggcagctcgacgtggcgtcggccgggaagcgggtggacggacgccgagtgttttgaggagtacagggcacccgccaggctgggagcgtcatcgctgcctgggcagccgcggcggtcacggtcacggtcgcccagtgagccgaggaggaggtttgaggttgccaaggcagagaagccgaggaagcacagtgccggcatcaatgaggtggaggaaggtgagctctcaccagttgctgagcccaaggccaggcctgctgccgtggagcatcggaagcaggttgagtcaagtcgtgtaaaggagaagggactggagcaaggtaaggcgaagaaactgaattctggggtccaagcaaatttgggagctcgagctaatggatcctctagtgcatctgatcctaacaatgcagcgagggaggaaggcaagaaaagggatgacatactggtagctgaagcaatggatgaagtgcgtgagaagtcttcaacaatggttacagaggaagtcgtcagtggaggacatcaggtacaagcactacatgcggctaccactgattctagtgagtttgggctaaccacttcacccatgcagcaaggagtgctgcaggaggaagtgaagccacaagaggagactaccaattcggttgacatggttggggagaacacttcctctaccatgctgaaggagggtattcaggaagaagcaacaacaagagataaaactaacaatgataccgatgaagtcagagagagtgcttcatccaattttagtcaagcagtgcaggaagaagtgacggcattacacaagactggcaatgctgctattgaggttggaaagaacatttcacctctcatgcagcaagaagtgctacaggatgcggtggtggagttagacgatactgcacatgcagttgatgaggttgtgaagagtgcttcctctgatatgctgaaggaagttattcaggaagaagtggtgcaacataatggaagtgccgatgttgttgatatggttgacactgacacttctgatctgccatgggaggcaatgcaggaaaaaacagtaatactggatggaaatgaccataattttgatactgtggaacctgtcagttattctggtatgctgaaggaagcgatgcacgaaggagagttgacaagggatgaaactgccattaacactattgtagcaggacaaggtaattcaactgatatggtggatgaagtgatgctcggtaaagcagctgtgcgggaagtaatctccagtgctgttaattcagttggcgagagcaatatgtctaccgggctgcagggagaggtgatggtttctcaaaaccaacaggctcctgaaagtaaagaatttgaaaaaataactgtaatggcagagatggatgagccagcagaagatatcacacctcagcctgtagaagtggaactcgagatacatcattgcaaagaaagaggtacatcagaggaaactcttgtagtagaaaaggatgcatctgctatgcatgacaatgttgagaaagaagtaaaaggatttgatatcgaggccaaagctgaccgtgcctttatgttccataaacccatgaaagaacatgctgggggtagtaaggaaagaagttgccaatccaaatcttatgacaagggatttgactgaaagataaaagaaatggcatagaatttgatgtccttagtaagaaaagttaaaagtagatcattcatgttcactgggaagaggtctttgactcaacattgcagcgtggtgtagaaccaacacaaacatcaaaatctgcttcaaccactgttgtaaagacagaacatgatacaatcaagctagagaagcttgatctgtcattgagcttatcagtttgtttgcagaattctgaatctaagtcttcgattcctaaaactgcttctctagtccatgcagcattctctcagccgttatcatcatcatctttccacaccaactcagatggggttcccaacttcaataccattgaccaattctgaaacacttgatcacaatcctagttgctcactcacccaacaatcattggacaattatgagcattcagtaggcagcaaacctttctttatgggagttgatcagatgagcaatcacacaagaagacaagctcagttgtctagtgaatctacacagaaggggagtgctaccccactccttcagagagtactccaaaatggccatatggcagatactagcacttctgcgataaaaaagcatactagtggaatatccactgacctacagaggcaaatctcaggagttttgttgccaacacatagtcattgttctcacaactctggattggaacataatagacatagaaggcaacttacaagagagagaagtagtaacagccttacaagggatgaacggcaggaggggggacaactagttgttaatggtgctggtgttattgagaggattatttccaaggttgtttcagaacctttgcatcttacaggaaggatgcttcaagaaatgacagaaaattctataacatatttgagggaggccatttctgaaatcatagtcgatccagataaaagaggacagataattgctttgcaggaggcactcaagaaaagatctgacttcaatattgatatgttgcgatcatgtccacgtgtgttgatggagatacttgtttctataaggactggccttccatattttataaagaaaagcagtagtgttgctacatctaatttggtcgacatttttctcaacttgaaatgccgaaatctctcatgccaaagcattcttccagtggacgattgtgattgtaaaatttgtcagaggatgactggtttctgtagttcttgcatgtgcattgtctgctcaaagtttgactcagcatctaatacttgtagttgggttggttgtgatgtatgtcttcattggtgccacacagattgtggtctacgccactctctgattcgaaaggggcaaagtgcttcaagggcatatggaactactgagatgcagtttcactgttctgcctgtggatatccatcggagatgtttggttttgtgaaggaagtatttcgaacatgtgcacaacaatggaggatagacatgctggttagagagttacagtatgtagaaagaattttttctgcaagtgaagatgtaaggggcaagagggtccgggacttcgtgaagcagatgctaattaagtcagaaaacaaggcctatcatgctgaagttgtcagatgtgtcattgcattcttttctgatgatggtgctaaccttggcagtgatccatcagtaccactgaaaggcattccatgcagcatttctgaagctgttgatgggattcctagttcaagtcggaaggcatggataccatttaccttagagggacttccagttttagacaaaacaactcttcctaccacaagcacagggagcccatctgtgcctagaaaatctggtgaagctgagtttcagacaattgataataagcctgccactgatgaactggatagcttgatcaggttaaagcaggctgaagcatatatgtaccaggaacgtgcaaatgatgcacggaatgaggttgacaatctgagacacattgttatggtaaaaaatgcacgaattgaggaagattatggcacccatatcgctgatcttgacataaatgagttacaagagcggcgcaagcgaaggattgaagaactccaagtaattgaaaggacacaccatgaatttctcagcatgaaaactaggatggtagctagcattggggagttattgtcaaaaatggaggcactgaaacaaaaccgaagcacatgaactgaggttactattgcagaaatcgaagttgctcaacttgtttaaggaagcctgcacatattgttcttacaggaatgcgcaaagcatcgacatgtgaggggtaaccgaatgtctcactggggatgagccaccccagggccccccacgagtagccgaaggaggagaggtgcagacggacgacgaccatgatggtcagaatgtaacataggtagatatagaggatgtttggtttccatgaccaaagtttagttcatgtaatattaaatatttgaatatcaattataactaataaatgtagacttaattatatttaataaatttgtctcgtctttatctgtataa

SEQ ID NO: 1294 - DNA, 4282 bp, Zea mays
cgcgagcctagtgcggtgcggtggtggggctcctcggataaggatagcaacggggcaacaacacaagccgcgggacgggatcggcaacgccgagcgcggcgacggcggggtagggtgtgggtgaggccggggagccaatgaatgcgccgtcgcgcgtcgcccgcagggtcgagggaaaaaaaaccatggggttatttttatagtggcagcgcacctcttcaaatccagcaaaattcgattcactcgaatcccggctgctttctccctcgtcgcgaaaagccgcaagccaacaaaaacacatcaaagcagcggcgggagagcatagaagagagagagaggattggcggaaaaaaaaagcgaggaggcatcctcctgagtcctgacctcctctctctctctctctcttctctgtcaaaaggattctcgcgaaggagcaggagtggtcggtggcctgcggcgcagaccgcagagcatgtgagagctgcggcggctggggggtggagcctgggatgggcgtgggaggaggcggagggcaggccgcggtgtcggcgccggcgccggtgccggcggaggaggcggggaaggatgcggaggagggcggcgggtggaccgtgaaggcgaagctgatcgccgcggcggtgctggtgtgggtgctgggctccgcggcgctctgggtgttcctgcactcctacttccgccacgcggcgctgcgcaaggcggaggaggcgctcgtcagcatgtgcgaggagcgcgcgcgcatgctgcaggaccagttcgccgtctccgtcaaccacgtccacgccctcgccatcctcgtcgccaccttccactacgagaagcacccgcccgcgctcgaccagaacacgttcgcggactacaccgccaggacgtcgttcgagcggccgctgctgagcggggtggcgtacgcgcagcgggtggtgcacgccgacagggagggcttcgagcgccaccaggggtggatcatcaagaccatgaagcacgagccgtccccggcgcaggacgagtacgcgcccgttgtatactcgcaggagaccgtctcctacatcgaggggctcgacatgatgtccggcgaggaggaccgtgagaacattctgaggtcaagagcatcggggaaggcagttctcactcgaccattccggctcatgtcgaatcacctgggtgtcgtattgacttttcctgtctatcatgcggatcttccttctgatgccaaggaggaggatcgtgttgctgccaccgcaggataccttgggggagcatttgatgtagaatcattagtggaaaatttgttgaggcagctagctggcaatcaggaattggtggtaaatgtttatgatgtcacaaacatttcgaaccctcttgtcatgtatggatcagaagttcctcttggcaacccctcaccatcgcacatctgcatgctagattttggtgatccattcagaaagcatcatatggtttgcagatacagaaacaagcctcatgtcccatggtctgcaatttctaccccatctggtgtctttgtcatatgtatgcttgtggggtacatcgcgggtgccgcttggagtcgttatgataatgttaaggaagattgccggaaaatggaggagctgaaaaaacaggcggaagcagccgatgttgctaaatctcagttccttgcaactgtttctcatgagatcagaacgcccatgaatggagttctaggaatgcttgatatgctgttagacactgacctaacctcaactcagagggattttgcacaaaccgctcaagtctgtggaaaggctttaatatcgctaatcaatgaagtgcttgacagagcgaaaattgaagccagaaagttggatcttgaatctgtaccatttgatctgagatccatccttgatgatgtcatctcattattttcttcaaagtcaagagagaagggaattgagcttgatgtatatgtctctgaaagagttcccgaaatcttgttgggtgatcctggaaggtttcgacagataattacaaatttagtgggcaactcaattaagttcacagaacggggacatatttttgtacaagttcatctggcagatcattcaaatcttgcaacagaatccaaagttgagccggtggctaatgggatgaatggacatacagatgagaaaactgctgtagcaaccagtgtttctctcaacacactaagtggttttgaagctgctgatagccgaaatagttgggaaaacttcaagcttttgctttcttatgagaaaaatgagatgccctatgaaagtgtatctgataaagttactcttgtagtaagtgtggaagatacaggaataggtataccattggatgcacaagccaaggtgttcacacctttcatgcaggctgatagttcgacttccaggacatatggtggtactggaattggattgagcatcagcaaatgtcttgttgaactaatgggtggtcagataaactttgtcagccgaccacatgttgggagtacgttcacatttactgcggttctcaaaagatgtgacagaagcgctattggtgacagtaagcctgttatgttgcatcctcttccatccagtttcaaaggtttatctgcactattggttgatagaagaccagtaagagctactgtaactaagtatcacttgcaaaggctgggaattgcctgtgatgttgttgcaaccattgaactggctcttggtgtgctgtccgggagaaatggcagttccctaaccagtatgaagcaaccatgcatgttattgatcgagagtgattcatggggcttcaatattgatgtttctttacgatctagactcctggagatgaagcagaatggtcacacacatgtattacccaaaatcatccttcttgcagctgcagaatcgggcaaactcaaagaacactatgcagttgattctgtgatcacgaaacccctgaaagcaagcgcacttgccgcttgtctgttccaaacacttggcatcaaacagtcaagcaacgagagaagtgacaactcaggttctctttacgggttgcttcttggcaagaacatattggtggttgatgacaacaaggtaaatcttagagtggctgctggcacgttaaagaaatttggagcaaaggtggagtgcgtggagagtggaaaagatgccctcgccctcctacaggtcccatataagtttcatctttgtctcatggacattcagatgcccgaaatggatgggtttgaggctaccaagcaaataagggcaatggaagcgaaggcaaatgagcaggcagtcgcctgtgacaattcagaaatagatggtgcgacaagggcagcaagatggcgcctgcctgttcttgcaatgaccgccgatgtcatccaggccacccatgaagagtgcacgaagtgcggtatggatgggtacgtcacaaagcccttcgaggagaagcagctcttccaggcgttgcagaagttcttggaccccggcatgtcctgctaacgccgaagtgatgcgttggaggtgaggcactattctcctctattctgtaattccctaaccttggccgcaacctgatccccaagaaagaccgtgcagcgcgggctgctcgtcgatcatgccagcggggaacagcaggcagacaaggcagcacgcaccacgggccttcgctggtctgcctgcctgtgcaggcgtcgtgtaaatgtattgtatttgcagggatactgtttacagcgctagtatgccccgtgccacaatgtccgagctacctgtggctgatgcacgttgcgcataggtggttttttttgtacagcttccaccatttttgtgctccagatcagaccaccgaaggaggcaagcatgctcgctggtgcagtgcagcactggaaggaaaacctgacttcctgagagtagatttttgctgtttaattgcattgggatttatgatgtattataatcagataaatgtgtgatgtaagctggcgtaattggcccaatgcatttccattgttatggatgagttgaaatggcattggttagacacttagactacactattgggtgtatgcccttccacagttccattttccctgcaaaatatcaaaatgtgcaaagggatagtggaatcatggcttgaattatatgaattttctttggtgtttttttcccgtatcgaagctcgactataacattagaagaaagcatctggaggcatgtttaagttttggttattacacactataaaatacaagtggtatttaacatatttcattaaagttaaaacg

SEQ ID NO: 1295 - DNA, 1244 bp, Zea mays
cttgtccatcttctccaagtctcacacgcacgtccaagcccggttcacatgcgtttgtttgcttccgcctcatcgccccgtctcctctctccctctgtctcaaatctgacctgcattgcgggctgcggctggtccccccccccccccccccccccctcccccccccgcgattattccaagctccccgagcccatggccgcaatggctccagctgccgtgtcgttcctggcgatggcgctgctgttgctcagtgacgcggaggccaagttcctgcccaacaacatcaccgtcgttggctccgtctactgcgacgcctgctccaacaataccttctccaagcacagcttcttcctgaaaggggccagggtgctgatcaagtgcagcttcaaggtgaactcgacgtcgtccgaagagctgtccctggaagcggagcgcaccaccgaccagcacggcgtgtacaagctggacgtgccccccgtggacggcttcgagtgccgcgagggccacgagctccggtcggcgtgccgcgccacgctcgtccggagctcctccgccgcctgcaacgtcccgggcctcggggcctccacgcagcacatcgagctccgctcccgcgccaccagcgcctgcttcctcaacctcaacgcgctcaacttccgccccgccaaacgggacggcgcgctctgccacgcccaagggggcgacgacgcgttcggctcctcgcttttcttctggcccttcctgccgctcttctggccgccgttcagggtcccgggcggcggcgccggcgggacggtgtcgttcccgtggccgttcccggtgccggcctggctggtgccgttcctgcggccaccgttcttgccattcccgctctacgagccggcgccgtcaccaccgccgccgttctaccgtttcccgcctccccgagaagcggtttctcggccttgaaatcccatgagccaagaagcttgtcaagatacgctattttagcctttcttggcattagattgtgtgttagtgatgagaaactgatcagaggtcgtgtgatatttggcccggccccatgataggttgacctccgtgcgcatgtaaccgatgctagtactgatgctgccatgtagttcattgtgctcgtgaactgatgaacacgtgtggtctgatatttagtagtggcaaactggcaatggttacttgttacatctcctatttgaaggttcagccaagaaagcccatggtgtatatttccg

SEQ ID NO: 1296 - DNA, 1633 bp, Zea mays
ggccagcgcgcggccgggaccggcgtgcgctgcggccgggtcggatctgagacgagacgagttaccatctcatcccaactccggaacgaacaagttaccatctcatcccaactccgcctcgaccggatctcgtcggactcggatccgcccgaccaccccgcgccgccgcagatcaaagaagatggcagctgtcgacacattcctcttcacctcggagtctgtgaacgagggacaccctgacaagctctgtgaccaggtctcagatgccgttcttgacgcttgccttgctgaggaccctgacagcaaggttgcttgtgagacctgcaccaagaccaacatggtcatggtctttggtgagatcaccaccaaggccaatgttgactacgagaagattgtcagggagacctgccgcaacattggttttgtgtcaaacgatgttgggcttgacgccgaccactgcaaggtgctcgtgaacattgagcagcagtcccctgatattgctcagggtgtgcatggccacttcaccaagcgccccgaggagattggagctggtgaccagggacacatgttcgggtatgcgaccgatgagacccctgagttgatgcccctcagccatgtccttgccaccaagctaggtgctcgtctcaccgaggtccgcaagaacggaacctgcccctggctcaggcctgatgggaagacccaggtgacagtcgagtaccgcaatgagggtggtgccatggtccccatccgtgtccacaccgtcctcatctccacccagcacgacgagacagtgaccaatgatgagatcgctgctgacctgaaggagcatgtcatcaagcctgtcatccctgagcagtaccttgacgagaagaccatcttccaccttaacccatctggccgctttgtcattggtggacctcacggcgatgctggcctcactggccgcaagatcatcattgacacctacggtggctggggagcccatggtggtggcgctttctccggcaaggacccaaccaaggttgaccgcagcggagcctatgtcgcaaggcaggctgccaagagcatcgtcgccagcggccttgctcgccgcgccatcgtccaggtgtcttacgccatcggcgtgcccgagcctctctccgtgttcgtcgacacgtacggcaccggcgcgatccccgacaaggagatcctcaagattgtcaaggagaacttcgatttcaggcctggcatgatcatcatcaaccttgacctcaagaaaggcggcaacgggcgctacctcaagacggcggcctacggccactttggaagggacgaccctgacttcacctgggaggtggtgaagccactcaagtcggagaaaccttctgcctaaggcggcctttttttcagtaagaagcttttggtggtctgctgtgcttaatcatgcttttatatggcttctacatgttgtggttctttcttgatctgcaccgcgcttatcgtttgtgttgtactgccctaataagtggtgcttatgaggactgtttctggttttgctgcttatgttgtaatgctttgaaacaatgaaagaagctacaggccacagctattttgagaagtaatggaacctcgtgccgttttgattatatcgcaa

SEQ ID NO: 1297 - DNA, 2034 bp, Zea mays
ggggggatccttggctttacagcacaaacctcgatagcctatccagccagcatcgttggattggagcacgcaaacaaaaccaaaagggagagcgacagcgtcaggaaataatacccaggggaaaaaacagagagagaaagaaaagaaaagaaaagaaaaggccattcaatcttatcaacacaaagttgatttaataaaaaaaggcaggaatcggtacagaagctgctgaattttctgttccattccatcaagcaataatgaagcgggggagcatggcccgccccagccttgcagcactattgtgctttgttgtcacttacctactcttcactccctccataaatagcaccactgcaccctctccttcgcgcactcatccattccatcatcccctttgcaagtatagtctctctgctaagcgaagcgaagcttcaagctagtctcggcggctctagaagacgatgggcaaggacgacgtgatcgagagcggcgctggcggcggcgagttcgctgccaaggactacacggaccctcccccggcgccgctgatcgacgcggcggagctggggtcctggtcgctgtaccgcgccgtgatcgccgagttcatcgccacgctgctgttcctgtacatcacggtggccaccgtgatcgggtacaagcaccagacggacgcgtcggcgtcgggcgccgacgcggcgtgcggcggcgtgggcgtgctgggcatcgcctgggccttcggcggcatgatcttcgtcctcgtctactgcaccgccggcatctcggggggccacatcaaccccgccgtcaccttcggcctcttcctggcgcgcaaggtctccctggtgcgcgcgctgctctacatcgtggcgcagtgcctcggcgccatctgcggcgtcggcctcgtcaaggcgttccagagcgcctacttcgacaggtacggcggcggcgccaactcgctcgcctccggctactcccgcggcaccggcctcggcgccgagatcatcggcaccttcgtgctcgtctacaccgtcttctccgccaccgaccccaagcgcaacgcccgcgactcccacgtcccggttctggctcccctccccatcggcttcgccgtgttcatggtgcacctggccaccatccccgtcaccggcaccggcatcaacccggccaggagcctgggcgccgccgtcatctacaacaaggacaagccctgggacgaccacgtacgtaaacgcatgcgtgtactgactatatatgactgtgactatgacgacgcgatctcatcgtttaacctttcgcagtggatcttctgggtgggccctctcgtgggcgctgccatcgcggccttctaccaccagtacatcctccgggctggcgccatcaaggccctcggctccttcaggagcaacgcgtgatgagcggggcttggctgtggagcaatggcgggcgacctacgggcggggggccgtgagcgaggagaatgccatcattcatcgatcgacttgggtgccggtggttggttcgggtcgccttttttttgtttcagcagctgctgcgttgcgcgcgtgcgtgagatttggtttggtttcgttcccctgcaatgtaatcatgtcgtgactctcaagggattattccgctctgctcttatggtctctgttttctatttaatgattgttattaccatgtagcagtaaccatcgtcatcagtgagaaccttgttgcttctgtctaaatcaaccgagacgtgtggagtggatggatcgaacattcagccttgtgctctctctcgctccctcgtttggctgtcctgtctgctgtctgtattattgcatcttggccctctcaatcaatcccttgtgattcctcccactaccttgtgattctctctccacagcggtggtgggggctgccgcgcccgctttagcagttacagctaggtacactacccggtaggaggagcgtgctgcgcagatttcatcaaatcttcaccgggtcgcttctgctgcctggaatatgatataaattaaaaaaaaagga

SEQ ID NO: 1298 - DNA, 1194 bp, Zea mays
atggcgtataggcgtgttgatcctgagccctttcttccgccgggcttcagtgcttcggtggtcctgcatcgggaggttatggccaggtcagtgactcggcgtctcccgccattgcatgaggattgggccattatcaatattcaacctttgcctgatcatgaggtcactttcctggcggtgagggacgtggtcagagaatatttggtggagcaccgacgacttggggtgcgggatattcagcggtcgcacctaggtcaggttctggttcagtttagtagtgtgcttgaaagagacaatcttgtcttgcttggtccgcaacattaccttgatgccatcttcactgctcagcggcataatgatgcctggaaccacagagcccttgtttttaattgcgaatgctggcttatgttgttgggattcccgcttgattatcgttcatcagaatacttgcaggctgccattggttcctttggcagattactcttatgggaagaagacaggcataatgtttacaggactatgcttagggtccgggtcacgtctcgcgaggaggtcccgcagttcattgttttctcggaagctgatgtctttattggggactcgtggacagttcagtgcgaaatcattcagcaaaccttgctggggggccaggcccaagatgaggacccggttccagtggccccggaggatggtcaacagctccccctcaagttctttggtctgggtcaacctgtgcctgctgcggggtgggatctcaatctcccgccagaagacaatgctccggttcagccagcagacaatattcatggggattgggaccaacggattgtcaatgacccacctgcgcagcagccccagcaggacctaccaccggacgagcagcaagtcagcaacccaaattcgtacctgtcctcggatagttcttctggtcacattcatggcgttccggtgcagaatgggcagattcttgatgacctggatgttgttgggacggtgctcccctttaatgcccctgccctacctgctgtgggtggtgctcctttgaatgggcttcaagtgattgacgggccaccaatccagggagacctccaagtgccgagggataattttatccctgatgcccagcctgtggagcctaacatcaatggccccaataatgtgatgttgaattatatgttcacccaggattggtag

SEQ ID NO: 1299 - DNA, 2791 bp, Zea mays
gccaaggcgaggcgcattccgtgtctccacgctgcctagctcgatcggacctgccggcggacggacggacggacgtttacccatgcccatgtctatgtgagaggcccggccgccgctgcccccgtctcccctgccgatgcgcgtttgagatgccattattccggctcggctcctaaccactctccccggaacgacgacgataccgccgaccgcgcggcggccctgtgacgccgcgcgccctcatggcgtcaaccgagcaactggcgtcgtcccccgcgggagggccgccagggccgaaggcacgggcagcaccgcctccggaatcatcgtcgtcgccgccacccccgccgaaggcttcctcgtcgtctcctccgccgccgacaccgccgccgccaccgtcgaagcagtcgtccccgcctcccccggcccacaacagcacgacgtcgccgaacacaccagcgaccccgccagagaagtctccggcggcttcccctcctcctccggcctcgccgccgccaccaagccggtcctctcctcctccttcgccgtcttcgccgcccccgtcgccacctccgcagtcttcgccgccgccgcccgcggcgtcgacgtcgcagcagtcgcctccggcaccggaaccgaccaagccaccgacacccccgtcgtcggagaagcccggagcagccgccgggacgacggcctcgtcacctcccccaaatgcgggacaaccgccaccgcgcgagacaccgtcgacgccaccggacaccgccggtcaccagccacctccgccggcgcccacgcaaatgctgcctcctccgatggcgctgacggtgatcatgccgggcggcgtctctggcggcccacctgcaggcggcatgtggaggtccccgcctgggccccccgcgggtgggggtgggtcgggcagcaacagcaacatgaagaacgaggcggtggtcatcgggatctccgttgccgggctggtcctggcactggcgtcgctgctgataatcgcgtgcgcaaccggcaagcagggcaaccgggggaggaagcgggagcggcacgcgtcgcgcaggcacagcatcgtggtgccggaacgtcagtgtggcgcagccgcgggcgtggtgtcggcggacgtgtaccagccgtcgaacgggccggcgccgtcgccgtcgccgagcgggacgtcgagctcgtacgacctgtcgggggccaacaagtcgtggttcacgtacgacgagctggcgggcatcacgggcgggttctcggcggcgaacgtgatcggcgagggcgggttcgggaaggtgtacatgggcgcgctgggcgacgggcggcgcgtggcggtgaagcagctcaagctgggcagcgggcagggggagaaggagttccgcgccgaggtggacatcatcagccgcatccaccaccgccacctcgtcacgctcgtcggctactgcgtcaccgagaaccaccgactcctcgtctacgagttcgtggccaacaagacgctggagcatcacctgcacggaaaagggctgcccgtgatggattggccgaagcggatgaggattgcgatcggagcggcgcgtgggctgacgtacctccacgaagactgccatcctaggatcatacacagggacatcaagtcggccaacatactcctggacgacgccttcgaggccaaggttgcagatttcggcctcgctaaactgacaaacgactcgctgactcatatctccacgcgcgtaatgggcacgttcgggtacatggcacccgagtacgcacagagcgggaagctgacggacaggtccgacgtgttctcgttcggggtggtgctcctggagctcatcaccgggcggaagcccgtagacgcatctcagccactgggagaagagagcctggttgaatgggctcggcttctcctcgtggacgccttggagacggacgacttccgagaggtcgccgaccccgcgctggagtgcaggttctccaagaccgagatgcggaggatggtggaggcggccgccgcgtgcgtgcgccactccgccgccaagagaccgaggatggtgcaggtgtggcggtcgctggacgtggacgagtgctcgtcggacctgaccaacggcgtcaagctggggcagagcatggcgtacgactcgacccgctactcggcggacatcgagctgttccggcgaatggcgttcgccaacgacctctccaccgccgagctgggcgtcgtggacgaggacgaccaccggtaccacaacagcagcaaagccagctccagctccaggcggtacaagtaatcgaaacgacacgcgtgcgtgcgtgaaccacaaacacgtgatccagtccaggcggcaggtcgatcgaatcgcgcaaaggaccgcacgccagccgccactacatacgcggcgcgcggctgcacgggggacggtatacgtagtagcggagaatcgcagaggagaagctagctgacgacgtgaggcacagcacagcagcaggcggcaataatcttcgtttgagctagctagcacggtatctgtacgtacgctgctattcactgcgtgctgtttgcttttgtgtgtacagccgtgcaattcttgtcgcctataacaaaagaaaaccgcttggcatacggtacaaccacgtccatctggttattagacgctctccaacggtccactcaagcctccccctcccctcgcgagagtgcatcatctccgaaacgcctaccattatatatatgtgttactgaactgtatatggtattacataccattttttatgtcttagaataccc

SEQ ID NO: 1300 - DNA, 2315 bp, Zea mays
cgcgtactgatcgcaatcgaagaagggccgcgtcgtaaaagctcccacgcaagtacacaacacagtacttcagaaacaggacgcgggctcgacgacacaccgatcaggcgcgccgaagcagcgtccgcagccgacggtcatctcccggcgccggtcgcggccatgtcgaagaagaaggcggtcacgacgatgacgctcaaagacttccacggcggctccatcccctccgagctcccgctcccctccgcccccggcgtcaccccgcgccccgcggatcgcaccgtcgcctccgcatcccccgtcgcagccgcggtcgcacggccacgcgtaccggtcgcttcgcctgccgccgctgcggcggcagccgcgatgccttccttcctcacaaacccgtcccgaatcggccgtcacttcgacgaggacgagcgcacccccttcgagcccaccacgccacgccgtcccgcgccgtccccaacgtcgttcgcacccgctcccgtggtggcgcccaccagatcaggtccggggaacgcatggggcccgaagaaggaggcctcttcggcgccttcccctgtgggtcatgctcctgcctccgccggcgaccagatctggtccgcgacacgcatcgcccaggcgagcgcagtggagaaggtaatctccggaagatggcacccgccgaagcccacgtctccgccggcgccggtgtcagttccggtgttggagactcccgtggccccgccagagattgagaggcctaggtccgttggggtgagagagctggatagtggggtggagaggggcgccgcaccagtgagacccgcgtcacatgaaggaaggattggggaagggagagctggggaggtgccagagagacccaagttgaagctgcttcctcggtccaagccaattgaggatcctgaacagcgtcctacctatgtcgaagcgaagcaggtgcaccaggtccaggttactgctggcctcatgaaggctgaggataaccatgatctgcaccagaatgcaagggctactgaaacaggagttttgggagcagatgctgagagcagggtagcagagcgaccacggctgaatctgaagcctcgttcctatgtaacaggacagtctgatgaaattgctgtcaaggaaaggccatctctctttggtggtgctcgccccagggaacaagttctcaaagaacgtggagtggatgttttggccagtgatctcgagaagacttcaccagttggcaggcctaaaggcgaatttgcaaaggttgagcagaaggttgaagctatgtccattaacccttctgttgaaagacatgagagttttgcagctggtcatagaggcccaaggaatggtgataagaaagatcataagtggaatactgacagggctgatgcatataggcttactcgtcgagaggacaacaggagggttgctagagatatggagaagccacaggagcaaccacgcccagagcctgagacctggcgtaagccggtggagcctccaaagctagaggttgcaacacctcgttttgggaaagcagcaaccgcgttggagctcgcccaggccttctcaacgtctatgtctgatactgcaccacagagccggttgaccagtgctcccagtccaagagttcctcctagcccaggggctagtagggatcagtctggcttttcaaggctcactgacagcaggacgttacactcgggcccttcccagcgaaagataaatggctactgatcgcttggcacacatattacatgtgccacgatgatagcccaggcatcatggcctcgatgaagcgcccagctgtatcttcatactcaactgtccctgcgtggagaagtccagttgttgctctgtccaatggtggtacgcgagggtctctaatctcattgctggcaagcaaaaggctcctctcccataagtttctggtcagtgatttataactgacggttcgtttcctctcttgataacgagagatgtgaatttgtgaactgtttctgcttatgttcgccagccactatttattgctggggaataattgcagctgcctgcgcaccgtagttggttgcacttgcagacgccgcaaaattgggattttatcgtgctagttttgttttttttttttgccagaagaaactattgatactttgtagtcttgtttactttacggtgatattatgattagaggataggaccttcgttcttggttgtctatttggtacaatcctcgattggatcactgaaatttcgctggattacgactggaacagagaaattatgtttgaaaatcctgtgcaattggtgcc

SEQ ID NO: 1301 - DNA, 570 bp, Zea mays
atcttcaaaccctaaccttaacgcactctcctatatccgccgccatcgtctcgggctctcatctctaatcttcgggttcgcgtcgcagtgtcttccgcccgggctaccaccatgccgaagcagatccacgagatcaaggacttcctgctgactgcgcggcggaaggacgcacggtcggtgcggatcaagcgggccaaggacgccgtcaagttcaaggtgcgctgctccaggtacctctacaccctctgcgtccacgacgccgacaaggccaacaagctcaagcagtcgctcccgccaggtctgactgtccaggagatttaagtttgtaggtgggctccattgctgtgtttgaatgaattatgaagtttgagtttgggatgcgaatgatgtgtcgaacctatgagcctgtgttgtaatggttaccccagaccgcaaaggatggcaatctatcataagttaaactgatttccgtgattttcgcttcccccccttttgtctgattcctttgttgtttttcgcctgagcctttttctgccacagcaattgcgaactttgacgtggcaatggtgg

SEQ ID NO: 1302 - DNA, 1410 bp, Zea mays
  misc_feature (1256)..(1355): n is a, c, g, or t
gacagaggctggcctcttcgcctatcaccccgaaggcccgaaacaagattagattagagatagcaaaaggcgaagccacggtaaccgccaccaccaaatcgctaccgccaatccgccatgatgctcccgacggccaccgcgacggccgtcttcctcaccgcggcgccttcctctttctccacccgccgtcggcgcagtcgcgccatcttcgcatccctttcgccgtccttctccgcctcggaggagccgctgctggtgcgcgcggcgcggggcgaggacggcctcccacgcccgcccgcgtggatgatgcggcaggcagggcggtacatggcggagtaccaggcgctggccaagcgccacccctcgttccgggagcgctccgagaacacggacctcatcgtcgagatcacgctgcagccgtggcgtgccttcgcgcccgacggcgtcatcctgttctcggacatactcacgcccctgccggccatcggggtgccgttcgatatctcggactccaaggggcccgtgatccaatcgccagtacggtccaaagagcaggtgagggagctcgtccccatcgaccttgatatgctccagttcgtcggggagtcactaaagattctgcgaaatgagattgatggaaaagctgctttgctaggatttgtgggggccccatggacaattgcaacttacattgttgaaggggggatgaccaacacgtacacaaatataaagagcatgtgccatacagctccagatgtcttgaagggtcttctctctcaccttgcacaagccatatctgactatatcatttaccaagttaactcgggggcccagtgtatacagatatttgattcatggggtggacagcttccacctcatgtgtgggagcagtggtcaaaaccatatatcaaacagattgtgagtaggattaagaaagagtgccctaatgtaccccttgtgttgtatataaatggaaatggaggtttacttgagcgcatgaagaacacaggagttgatgttattgggcttgactggacagtggacatgactgatggaaggaggcgccttggtaatggcattagtgtacaagggaatgtggatccagcatttttgttctcaccattaccagtactgactgatgaaattcatagggttgtgaaagcagctggtccaaaaggtcatatacttaatctggggccatggtgtacttcagaaacacccgaagaagctgtagcacatttctttgatgtcacaannnnnnnnnnnnnnnnnnnnnnnnnnnnnnnnnnnnnnnnnnnnnnnnnnnnnnnnnnnnnnnnnnnnnnnnnnnnnnnnnnnnnnnnnnnnnnnnnnnnaaggaaacaaccatttaaatacgggcccctcgagtctgattccaatgtaggtcat

SEQ ID NO: 1303 - DNA, 1283 bp, Zea mays
cacagccccacttttgaatttgaaatatttatggctgggcgttagcgttaccctgttcagcatcagtggtgtggtagtccgggctcctcctgagagaataatagttctgttttgaatttgaaatttgtttgatcaggtttcacttgctcgcggagtttgacgaggccaagcgcagctgtagaaagaggctcgatgggcacaaccggcgtcgcaggaagccgcagccagataccatgagctctgggagctttatgacgagtcaacaagggacgaggttctcgtcgttcccggttccaaggccggagccgagctggcccggagtcatcaaatccgaggacagcggctcatactacgcgcaccagcgccacccggtcctaagcagcaggccgcacttcgccggcgggggctccacgccgccggcctactcgtccaaggaaggccggcgcttcccgttcctccaggacggctgcgaccagcagcaggtcggcggcttcagcgcgggcgcgggggcgcagcagctcgaggtctcttccacgtccacggtgtgccagcccctcctcaaggccgccgccgccgccgccccaccgccgccgccagagagcagcagcagcaacaagatgttctccgacgggctcgcccccgccgtgctcgactcggattgtgctctctctcttctgtcatcccccgccaactcctccagcgtcgacgtgggccggatggtcgtccaccagcccgcggagcacatccccatggcgcagcccctcgtccccggcggcctccagcagcagcagcagcaccacccgttcggcggctcccccgcctggttcgcctgctcccaggccggctccagcgccgtctccgccggcggtttcgcctgccccccgggcgtggagagcgagcagctcaacaccgtgctggtgccgagctccgacggtggcggccacgacatgaacatgaactaccacggcatattccacgtcggcggcgacggctcctccgacgggacgtccccttcgctcccgttctcgtggcagtagctagctttccaattcaagcgtccagcagtctatcgtttcagctgtactagtggtcgttttatttatttattcgctgctccctcgctccgttttaacttgtcctgtcgtttgctcgtttcttcgttttgcatgcctgatgcatatgcggcctggaaaaaaaactcgcataaaattactgagaccgtccgtgtgtctggttctggaagcgtacctgtctccatcaaccgaatcgagacaagtttgctg

SEQ ID NO: 1304 - DNA, 2242 bp, Zea mays
aaaattatgaacatgcattttgtcatcccacccccagcagccagcacctaccttgcacgacttcttctttccggtaccttctccccttcctctccctccctagtccctagtcggcagtcccccgaccccgacctcgctaagcaaactcccagagcgatcgccgcagaagatcccgcatgcatgccccggcgccgccctcctccgtcgatctgccgttgtcggcgccgccgccgccggtgaaggcgccgtccccgcggcctccgccgccggcctcgctgcagcccgagtccccgggcgtctttttctccgccaccgcacccctgggcacctcccaccgccgcatcgccatcgccgtcgacctatccgacgagtccgccttcgccgtgcgctgggccgtcgccaactacctacgctccggggacgccgtcatcctgctccacgtgcgccccacctccgtgctctacggcgccgactggggcgccgtcgacgtctctctccccatccctagcgcctactccgaggatggctttggcggcggcgacgccgattccgaggccgccgctgcgcgcaggatggaggacgactacgacgccttcacggcctccaaggccgacgacatcgccaggccgctcaaggaggcgggcatcccctacaagatccacatcgtcagggaccacgacatgaaagagcgcctctgcctcgaggtcgagcgcctctcgctcagcgccgtcatcatggggagcaagggcttcggctccacgcggaggaccagcaaggggaggctcggcagcgtcagcgactactgcgtgcatcactgtatctgccccgttgtggtagtgcgcttccctgatgagtgatgacggctctgccgagtgtggggaggcaggtggtttgcccgccgcggttggtgctgaggatgtgctgcaccccgtgccggaggaggaggaggccgagtatcatgattcatgacgccgctgaggagcacaaggatacctgacctcgttgatgtattgtgaagtcctcttggattcaggttagcatagaactaaaatgtcctatttgggctgtattgttgttgtatgatatgcatcagttatggaactatttctgtaactgttcggtctttggttaagactgctttcaacggctcccgccggcctcctcctccccttgccctgtagttgtttagggggggggggggggctcttggtccacaatggtaagtcctacacgctatgacgctacaccctcctctaccagccttcagcctgcaggacgggagcacacgccagagcacgctggatgtagcgcaacagcagctgcccccctgccctcgggttgtgtgcgtggctgtgttttttagttggaaaaatttgataatagatggtgaataggtatggaaaatgacattttatgattatagttgtgtataggggaagaatttagagagaaccgttgtagagggtggagatataggggaagagagatagctgacgtggcgggatagtggggtatagggggagaaatttagaggagacgattgaagacagtctaaggctatccgcagcggttccctctaaaattctccccctatatcacttttttacgtcatatcatcaacattttatcccctacttcttcttctcctgcagcggttccccctaaattattcccctatacctcactacaaccataaaatatcattttttatacatacttttcatctattattaattttttctactaataattggaagtgggcccacgtcaacaatgcttggagggcagccgcacgcacgccagaacgagggggaaagagaagcggacctccacgtaggagccctgctaggggcagcgctgcagcgaattttggctcctgtagccggcatacaggggaggggccgggcggcggtaagggttgcgtacaccctaaggcatcaaactgtctccagagaatgtaaaggttgtagcattcgacagttggctgggtgctaggtgggatttctacccgagtgcatgtgaagtttgctgaacttccattacccgtgcccatgtatctgtgatttcgctttgtttgtagcttctgttacctttgttcatgtagcttgtctgacttccactgcctggtgaatatctttgtctgaacatttgtacttactttgcgttgcactgtgtttctgatgaaagttataggttaaccacttctatagaaccaactaatcaagggtgcaaattcctccta

SEQ ID NO: 1305 - DNA, 2628 bp, Zea mays
atgaccatgacttcgccgcaggcgctgtccgccggggctgtcaccgtggaggacgatggcggcctcgccgttccacttctagcggacggcagcggcgccacgaagacggaggaggagtgcggcgccgaggccgagggcaagtactgggtggccgccgacgaggcggagaggcaggcggtgacggactgcggcgctgaggacggccgtgcgctgctgttccggacgtacaagctcaggggcgccatcctgcacccctacagggcgctaatcttggtgcgcctcgtcgcggtccttctattcttcgtctggcgcatcaggaacagcgcatccaacgtcatgtggttctgggctacgtcggtcgccggggacgcctggttcggcttctcgtggctgctgaaccagcttcccaagttcagccccgtcaagagcgtgcctgacctcgccgccctcaggcgacactacgacctgcttccagctgatgatggcgccgcctctaagctccctggcgtcgacgtcttcgtcaccaccgccgactccgtcgacgagccggtactctacaccatgaactccatcctctctatcctcgccaccgactatccagccgacagactcgcctgctacgtctccgacgatagcggcgcgctggtcctctacgaagcactggttgaggccgcgaaatttgcaaggctgtgggttccgttctgccgcaagcactgcgttgagccaagagcgccggaaaggtacttcgagacggaaccacagggcgggagagcatcgcaagagtttgtgaatgattataagcgggtgcagatggagtatgacgagtttaaggtgcgcttgggtaatctccctgacaccatccgcaagcgatcgggcacgggcagcatgagagcttcagaaggagatgcgcaggggacttggatggcagatgggatgcagtggccaggcacatggatggatccgacagagaagcacaggaaagggcaccatgctggaattgttaaggttgtgttggaccatcatccaagccgtggacaccatggtccccgagcgggcgctggcgccggcgccgagaacaagcagtctgctgacgacttcggtgctgctgctgggctgcgcctaccgatgctcgtatacgtctctcgcgagaaggatccgaactacgaccacaacaagaaggcaggcgcgttgaacgcgcagctgcgagtctccgctctgctctccaacgcgcagttcgtcatcaacttcgactgcgaccactacgtcaacaactcgcaagcgctccgcgcggcggtctgcctcatgcttgaccagcgagaaggtggcgacaccgccttcgtccagttccctcagcgcttcgacaacgtcgacccgacggaccggtacggcaaccacaaccgagtgttcttcgacgggaccatgcttgcgctgaacggcttgcagggcccgtcctacctcggcaccgggtgcatgttccgccgcatagcgctctatggcgtcgacccacctcactgtaggcaacaacaactagagagcgtcgcgcctgaacctgctagcaagtacggcaagtcaacggccttgatacactcggtctcggaagccatgggagaacgagaaaggctgaccacgccgccaccagtaccaccacttgacgtggagatggttgtggcagcttcctacgacggagggactgactggggcaagggcgtcggctacatctacggcatagcaacagaggatatagtgacagggttccgcatccatgggaaagggtggcggtccatgtactgcacgatgcggcgcgacgcgttccgtggcacggcgccgatcaacctgacagagcgcctccaccagattgtccgctggtctggggggtccctggagatgttcttctcccgcaacaacccgctcgtcggtggccagcggctgaagcttctccagcgtgtctcctacctcaacatgacagtctacccagtcacatcgctcttcatcctgctctacgctctatgcccggtcatgtggctcgtccctgaagaagtgcacatccagaggcccttcactaggtacgtcgtgtacctgctcataaccatcctgatgatccacatgattggatggctcgagatgaagtggtcaggggtggcatggctggaccactggcgcaatgagcagttcttcatgatcggatccacgagcgcgtacccgatagcgctatggcacatggcaaagaaactcctcaccaggaagggcatacacttcagggtcacctccaagcaaaccaccgcgggcaccgacgacaagttcgccgatttgtacgagatgaggtggacgccgatgctggttcccacagcgtttgttttggttgccaatgtcggcgccgttggagtggccatgggcaaggccttggtctacatgggagtatggacggtggcgcagaagacgcatgctgcgcttggccttctcttcaatgtgtggatcatgctgctcctttacccctttgcactggcgatcatgggacggtgggcgaagagacccatcatcttgttggtactgctgcctgcagtctttgcagttgttggcaccatatatgtggctcttcatttcttacttgctaatgttatcccaatataa

SEQ ID NO: 1306 - DNA, 2020 bp, Zea mays
gacgatgcgtgcgtgaatgattgacacggactacgcgtacacttgcaataatgctgccgcatgcccccagcagcaccccgtcccctccccctattaataaaaaaaaagattctgacagccgaaagcgcgcacggtgcttgctgctgacctgccctgcccacgccatgttcgcgcccacccgcttcacgtggccggctccccgcggctgaccggatcgttgagcccggtcgtacgtacgtcgcccgctgccccctcgtcgtcgcaccccggcattccccattcccgttcccgttcccaggcagtgcgttgcttgcagttgcggtgggcggcggcggaggcgtcgacgaagcatggggaaggcggggcgctggctccggagcttcctgtcgggcaagaaggacaggcaggcggcgcctcccaaggacaagcggtggagcttcaggcgccccccgccggcggcgcaggaagggacggcggcggaccagcaccaccatgggccgccgctcggtctgccggcgccgggcgtcgacgagctcgacttcgaccagaagaagcacgccgtggcggtggccgtggcgaccgcggcagcggccgacgcggcggtggccgccgcgcacgccgccgccgcggtggcgcgcctgtcctcccgcgccgcgccgcgcttcgcaccgccgccgtgcctcgtcgaggacgccgcggccgtcaggatccaggccaccttcagaggctatctggcgcggacggctctgtgcgcgctgaggggcatcgtgaagctgcaggctctggtgcgggggcagctggtgaggaggcaggccaacgccacgctccgctgcatgcaggcgctcctggcggcgcagtcccagctgcgggcacagcgcatgctggccctccagctccacgaccaccaccacccgacgcctcccagaccacgccagtcgccgcagcacccgaggcaccgccgctcctacgagatggaccggtcgtgcgaggacaacgccaagatcgtggaggtggacgtgggcgagcccgtgcggcggggcgcggcggggaaggacaggcagctctacgccggcggccggtcctccccggcgccgtcgctggcggcgacggagctgctgagcccgcgggcgtacagcgcccacttcgacgacctctcggtggccaacacggcgcagagcagcccgcggcaggcgccggaggcctgctgcccgggctacatggccaacacggagtcgtcccgcgccaaggcgcggtcccagagcgcgccccgccagcgcaccgacgcgctggagcggctgcccagccgcaggaagcaggggacgccgcccagggccgccgccaggatgcacttgcagcgctcgtcgtcgctggccggcaactactcctccccgtggtcgtcgtcggctgccaggctcgacgtctccgccgcgtcgctcaaggacagcgagtgcggctccaccagctccgtgctcaccgccgccaccctctacagccggacgcggtcgctcgtcggctccgaggtgcgccgtggcctgtactgagaggagctagctcgtgttcctggcgaccccatggatggatgctgatagcttctgttcttccaatggtccgtgattcttcgatgggagatgggagcttcaaataaatggaatgcttatgaccagttcgtgctacataaaatagtcgcgtttcaaactgtacatttttgtagcccacttgtggccgtctgcaggtattgggtactagtatatagacgtgtacagctacacaaaatgtttgtacaacaaggtttgcgatcgcttgtaatgggtctgcttagctgccaagaagcaggggttgttaatgcgatcgcttgtaatgtgtctgcgatgacgaagatgggtaaatgatccttggcttcgtgctgaagcccccaagggctgctggcccgcatcccaactatatattgtgcacgtctagtttaatttatgtagttttttcgtgctactgtcgtgccaatctaacaagtgaaattatctgc

SEQ ID NO: 1307 - DNA, 6194 bp, Zea mays
tttttttttttttttttttgtagcgctggggtggggggtagttggaagcttcaatgaggaaagtactagctttctgtttctctgtctcttgtcttaagaaggaaagaaaatgaatgtaatttccattaattagtactccttctgcacttacctttgagttaagaataccagttagccagatccaaacaggcactaattctgtcattggttctaacgtacacacgacgtgtcccagcgtgtcgatcgacctcttccacgacaagaaagagatggaagagaagggggatcacatatcacatatgttagcatcagggtttaccaatttcgtttttattgatcaaaatttcgtttttttactaaagtttgacttttgtatttttttaatttagaactgaaatatataaatgttcggaccgaaattccaatttcgtctagcaccgaaagcgagaaaaacaataggcgaaattcgccgaaattcatatccctggttagcatactgcatccatgatacgtccgccccctgttccctttcgtctttgttgtcttgataatttaggcaaacgagacgttgagtttgggtgtcaacggtcaacgtaccggggaccactcgcctcgagcgcccccaggcaggcgaagagctggccggccgtttgcccgtttcgcctccatccctctataaagcagacgacgagccggccggccatttcgtccatctcccctgcctgcaccaattcctgaggcaccaaccaagcctctcttgttgactccgacgccgatcgaacgtacagacggccatggagacccaagcgccggagaaggagaactacctccctgaaaaggatgcgaggagcgcacgggagaaggccatcgacgagtggctcccgatcacctcgtcgcggaacgccaagtggtggtactccgccttccacaatgtcaccgccatggtcggcgccggcgtgctcagccttccctacgccttgtccgagctcggctggggccctggcatcgccgtgctggtggtgtcgtgggtgatcacgctgtacacgctgtggcagatggtggagatgcacgagatggtgcccggaaagcggttcgaccggtaccacgagctggggcagcacgcgttcggcgagaagctgggcctgtggatcgtggtgccgcagcagctggtcgtcgaggtgggcgtgaacatcgtgtacatggtgaccggcggcaggtcgctgaagaagttccacgacgtgctggtgtgcggcgacggcggggcgtcgtgcgaggggaaggacaacatcaagaccacctacttcatcatgatcttcgcctccgtccacttcgtcctctcccagctccccaacttcaactccatctccggcgtgtcgctggccgccgccgtcatgtcgctcagctactccaccatcgcgtggggcgcgtcggtggacaagggcaggatggcgggcgtggactaccacctgcgcgcgaccacgacccccggcaaggtgttcggcttcttcggcgcgctgggcgacgtggcgttcgcgtacgccgggcacaacgtggtgctggagatccaggccaccatcccgtcgactcccgagaagccgtccaagaagcccatgtggaagggcgtcgtcgtcgcctacgtcgtcgtcgcgctctgctacttccccgtcgcgctcatcggctactgggcgttcggcaacagcgtccaggacaacatcctcatcacgctcagcaagcccaggtggctcatcgcgctcgccaacatgatggtcgtcatccacgtcattggcagctaccagatctacgccatgccagtgtttgacatgatagagacggtgctggtgaagaagctgcgcttccctcccggtctgacactgcgtctcatctctcggaccgcctatgttgcgttcacaatgttcatcgccatcaccttccccttcttcggcggactgctcggcttcttcggcggattcgcctttgcaccgacgacctatttccttccctgcgtcatgtggctcgcgatctacaagcccaagaggttcagcctctcgtggttcaccaactgggtaagaaagagctaacacccaattcctctgcagcagcctatcttcttcattctttctgccatcgaattcctctgcatgacattacgtctggtgtctgcgttgatcagatctgcatcattctcggggtgatcctgatgattctgtcgccaatcggagggcttcggcagatcataatggacgcgaaaacgtaccagttctactcgtaaactgctaccagacactgagtttttttgtcgtgccaacaacagaggggaacttcctggtaccatgtataagctgttacagatgttgggttagttatatatatacatgcatacgtattgtttcttaatgttccaaggtgaccgtgggttgtgtatatggtaaaggagaatcgatgatgatggttgtcccagatatttggtggtttaattctattcacttgtcccatatatttggtggtttaattctatataacgaacacctgaatcataggattgctaacaacacagaaacacagaacaaaactgcaacctcaccacaagcagcaaaaagctaatctcaggtcccatattagcgagcggttctgtcacagatggtagcaggaagggaagcaaaagtgcaaaacatgtccagactcagcatgaacctggcgacccagaggcacgcgccatccacatttattctcggcatacacaagcagcaaccatccatgagaagcagggggaaaaaacccctctactgggtcttgaacatgtggcggatcaggtcgacgacgcggttgctgtagccccactcgttgtcgtaccacgagacgagcttgacgaagtggtcgttcagagcgatcccggccttggcgtcgaagatgctcgacctgagtgggaaaaaggcagaatgacaaaaatgaatcatggaggaacactgagaattccgtagtagcacagtttcgttagttggttgctaaatgatagaagcaaatccatacctgctgtcaccaaggaagtcggtagaaaccagatcctcctccgcataacccatgatacccttgagtggaccctcggaagcagccctgtaatcaacagcaagcattaccaaacatatatggagagaactactatagatcaagatagacgcagtgaaacatagacactgaacatgtggtagtggcgattaatccaacaaggagtgtttattaccttcagacattggtttagaaataaattgagtggttattaaaagaataaattgttgatcacttacttaatagctttcttgatatcctcataggaggcccccttctcgattctgacggtgaggtcaacaaccgagacatccacagtaggaacacggaaggacataccagtgagcttgccattcagatcaggaagaactttaccaacagcctgcatgcaaactcatcaatattgaaatccagcattccaactagattcatcagaacagaatggctaccaactctattacaaatttacaactacagtaagtatcaaaatgacatgaaacaatatttgctgatttggcaccctcagtagttgaaaattcatgttgtgatgctccagaatcatcacaaagaagatgtaggtagagaacataaatttgagtgtagttgcaatcactataccttggcagcaccggtgctgctaggaatgatgttaaagctggcagccctgccacctctccagtccttggctgagggtccgtcaacagttttctgggtggctgaaagtcaagcatcatgctgtcattttacaggcaactgcaagtaccttctgaagaatcctaggaatacagccaaagagaactaaccagtgatggcatgaacagttgtcatcaaaccctcaacaatgccgaagttgtcatgaatgacctggtttatgacactagacatcgttaacaaatgatcctacattggaagagcagaaacagctacagaatgcttaagagaaggacagtgcaccttagcaaggggagcaaggcagtttgtggtgcagctagcattggaaacaatgttaacatccgaggtgtacttgtcctcattgacaccaacaacaaacatgggtgcgtctttgcttggggcagagataacaaccttcttggcaccaccctgtcattcaaaaggaaagtaaagctatcagaaacatccaatttaacagaggaaaatccaatctgacacaaagtagaagtgatgtgataagagtaacgagggggtagatgaggtgtactagatcctagacatgacgctgcaatacaagtctaacaatttcaatctccacacaaagtccagtaacagcacttatatagcaatgaaactgatgcacattccaaaacctcaggttatcacagcgtgtcagaagcaatccaccaactcaactggaactctggaagcaagaagctatgctgaaatataaaaatagaactctgccttattgcggctcttgagcttccatgcagcagcactaataagaatttacctgtgcaaacttggacacgttatggaaaaaactacttggcagcatcactaaaaatttatgcaccgcacatgtacatccctcaaaatgaacatatttgggatctgggagaacatggtacccaaacaagtaaacaaacaaaggaccataaagcagaaattataccttgagatgtgcagcagccttgtccttgtcagtgaagacgccggtggactccacgacatactcagcgccagcctcaccccacgggatttcctcagggttcctgtagaatcgcagcagttaatacattagctcacagctcgaacgcaaaagctcagtccacgtctggacgaagcaggagaggggagcacctgatgccaaagacggtgaccggcttgtcaccgaagagaagggtcttggagtccttgagtgtgatgtcgctgtgcttccagtggccgtggacggtgtcgtacttgaacatgtaggtctacggaagatggggtggggagcacaaagaaccacgatgagcacagcacacggatttcaaaattcgctcggaactgaagcaagcgctagatcgacgacacctcaagcagcacaaaccaagtaagactgagtactgacggcataaataaaatactgctgtagtagagcaaaccgatagagtccccagatctacggagagacccagtaaaaataaaattttgaagccaacaacaacactgaacgcgacgattaacggaaccgagcacgctggcttgcgacggatcgatggtaaacccggcgcaaaccccgcgtacaccaccagatctactcacggcacggaacagacgcagcagatcgaggcgcgtaccatgtagtccgtggtgatgaaggggtcgttgacggcgacgagctcgacatcctcgctctggagggcgaccctggccacgagcctgccgatccttccgaagcctgagcggacgcggacgcggacgcggacgcagtcgcagagagaaggcgcaactcagatcggaccgaaccagctcgaggaggagaaatagcgtagcatggggagaggggacaaactcaccgttgattccgatcttaatcttgcctgcatccagagaagatcgagagaccccaaaaaaacacaaaaaacagtcagcagaacccactttggtcagatttgagcacggtgcatgagggagcagcaggtagtgataattgtagagagagagagagaaacccgacgctgaatccgggagcgaggaattacccatggcgactggcgagtagaggagctaggaggatgacgggtggacgagactcgagaggcggaggcagcggatgcggatatggggtgggggtttaagcgctcgtgtccttttaaagccgactgactgttacaccagtcacgagagattactgtaattacaaaataattaaacaaaaggagaaaacgaaatccaactacagaaagcgtgattttaataataataatgaatataaaccatgggacgggcgcaaataattgtggaatgaggtgcgggggtggcctgtccgcctccgcctgcctttctccagaagaaggcgcaggcagtggtggtttcgaacagacaataaaacgccacggtggcggcacggcaggcccgtgatgtgctgccggccgcggtggaaggatgagatgagatgtggccgctcc

SEQ ID NO: 1308 - DNA, 2053 bp, Zea mays
ccgcacgcacggcttgcgtggagccaggccagctcgacgatgactacgcggccccggccccgcggcccagtcctccctcctcttcgatcctataaaagcgaggcccagtccctccatctcaaaaatttcaatgcctctctagatctttcaagctatccttgcttcctagctccctttggcgtgctgtaccggacgacaggggtaggtaggtaggtaggtgtagctagctcggcgagcgagggagcaatccggccaacagcacacgcgtcgatcgccatgccgagaagcggcggcggcggcaatggcggtggcattagtagtagtagtagggtgatgcccaacctcccggccgggttccgcttccaccccacggacgaggagctcatggtgcactacctcatgaggcaggccgcctccatgccgtgccccgtccccatcatcgccgaggtcaacatctaccagtgcaacccctgggatctccctgccaaggcattgttcggcgacaaggagtggtttttcttcagcccccgggaccgcaagtaccccaacggcgcccgccccaaccgcgccgccgggtccgggtactggaaggccaccggcaccgacaaggccatcctgtcgtcgtccacgcccacgagccacggcggcgccaacatcgtcgtcggcgtcaagaaggcgctcgtcttctacggcggcaggccgcccaagggcaccaagacggactggatcatgcacgagtaccgcctctcgggcgcggcggacgacgactgcaagggcagcaccaggcgcagagtgtcttcctcctcgtcgtcctccatgaggctggacgactgggtgctgtgcaggatccacaagaagagcaacgatttccagttgtcgtcgtcgtcggagcatgagcacgagcaggaggagccggcggcgggcggctcagcgacgactgtggaggaactagacgctctcgtcgtcgtcgacaacagcagcagcagcgacaccaccaccaccaccatcaccaccaacgacaacaactctactgaaacagctgcgactcatcacgatcctcagacgatgatgatgctgagcaagtcgtgctcgctcaccgacctcctcgacagcatcgactacgcggcgctctcctcgcagatgctcctcctcgacgcgccccacccccacgctgatgacccgccgccacacatggtctactacccaccggcggcgtcggcgacgcaccagcaagcaataatagctaataacaccaacagtaatgacgactactatgacgacgacaacttgttgccgactgctgctgctactgcggtagacgcggcggcggcggcggtgctactcagctcgtcgcctgcagacaccaacggtgtgaacaagaggaagcgagtgacggccgtggactactacggcgccgctgaaccgccgaccttcttccaccaccacctcgatgatggcggcaacagcttcttcagtacgaccaagaagctcaagccgccgccgccaagtgattcgaggcatggcggccatttcggcaccgccacagcgagcagctaccgcgacagccagcagctcgtggacagcgcgagcagcagcggcgtcttcttccatcagtatgggtacggctacagcagcagcaacccgttcttgaacttgaaccagcagcagcagctgctactcaacagccacatcgggatgcagtagagctcgagagatcgagagagagagagagagagagatgatatatcattggaaggatcagcacgcgtacgtgcagattaattgcagcgagttctatcttgtttgctttcattattatatactccgtatgtgtcgttcatgtaaaattagtttaaattgtaaattagtgtgctgaaattcatgtgcctgctctctgctcatcaatgaatggatgatgacgacccatgcacgttgcttgtgtggatgcgtagatgtgctgcatatggagactgacagagagtgacaagatggctagattaattacattccagcaggtagctggaatcggaatatacctaacctaatactctag

SEQ ID NO: 1309 - DNA, 1563 bp, Zea mays
ttttggcaatggtaatgtcatgcggggccaccgcggcggtggtccttctacagtcgggcgcggaccacgccacgccacctgaggcgcctccgccgctccaccaaccctctcctcgtcttccatatagatatagtcagagcctcagaggtgaagcatccgactaaaaagggccagggccagggccttcgcttgcttactactcctgcttaccacactctaccttgtctcttcacgtgcacacgacgcctcccccaatggctgcggtggcggaggaggaggtgatcgtcgtcggcgcggggcagtcggggctagcggtggcggcgtgcctgtccctgcgcggcgtgcgggcgctggtcctggagcgcgacgactgcgtggggtcgctgtggcggaagcgcgcctacgaccgcctccacctccacctcaccaagaagtactgcgcgctgccgcacgcgccgcacccggccgaggcccccgcgtacctgcaccgcgacgacttcgcgcggtacctggacgggtacgccgcgcggttcgccgtccgcccgcgcctccgccgcgaggtccggtcggcgcggtacgaccccgcgagcgcgcggtgggaggtggaggccgtggacctcggcacgggccaggccgagcggtacgcggcgaggttcctggtggtcgcgtccggggagaacgccgagaagttcctgccggaggtgcctgggctggaggcgttccccggccaggtgatgcacgcagtggagtaccggtcggccgaggggatgcgcgggaaggccgtgctcgtcgtggggtcgggcaactccggcatggagatcgcctacgacctcgccgccgccggcgccgtcacctccatcgtcgtccgaggcgagctccacctggtgaccaaggagatctggaacgtggcgatgacgctgtacccgtacctgcccgtgtgggtcatagacaagctggtgctgctcatgtgcgccgtggtgttcggcgacacgtcccggcacggcctccgccgccccgccatcgggcccttcaccatgaagctcaccaccccgggctaccccgtcgtggacgtcggcacctacgccaagatcaggagcggcgagatccgggtgctccccgccgccgtcaagagcgtccgcgggaacgtcgtcgagttcggggacggcagccgccaccctttcgacgccatcgtcttcgccaccggctaccggagcactgtcaggcggtggctcaagagcgaggacgggctggtcggtgacgacgggatggcggcgcggagctacccggagcactggaagggggaccacgggctgtactgcgcggggatggtgcggaggggcatctacggcagctgcgaggacgcggagctcatcgccgccgacatcagcaagctgctgcaccccaagcaggagcagggcaacggcgtctagctgcagctagcatttcgctttgttggttgcgatggaaacaagctctattgttgttgggttggttgataataatggttgcgtgaataattaaacgtgcttaattgagatggcctggccagcctattcgttcatt

SEQ ID NO: 1310 - DNA, 2742 bp, Zea mays
caatcccgataaaccccctcccgtttttactatccatccaaacgcctttccagttatccagcttttcaccccctccactttttttttaccacaaacaccctctataaacctccgaatcctcacaccccacgcaccgccaagaactcgctccagccaccctcccaccagtgcccctccgcagtccgcacgccatgtcgtcccggagctccctcctcccgctcccgctcctgctcctctgcgccgccgccgccgccgcgtcgtcgcgcaacgccgagctggacgcgctgatggagctgaaggcggcgctagacccagcggggcgcgctctggcctcgtgggcgcgcggcggcgacccctgcggccgcggcgactacttcgagggcgtcgcctgcgacgcccgtggcagggtcgccaccatctcgctccaggggaaggggctcgctggcgccgtccctcccgcgctcgccatgctcccggccctcaccggcctctacctacactacaacgccctgcgcggggagataccgcgcgagctcggcgccctccctggcctcgccgagctctacctcggtgtcaacaacctttccggccccatccccgtcgagctgggccgactcggtagcctccaagtgctgcagctcggctacaaccagctcacagggagcattccaacccagctgggccacctaaacaagctcactgttctcgcccttcagtccaaccagctcagcggcgcgatcccggcatccctcggggacttgccggcgctggcacggctagacttgagctccaaccaactcttcggctcaatcccctccaagctcgctgagatccctcgtcttgcaacgctagacctccggaacaacacactttcaggaagtgttccatctggtctgaagaagctgaacgaggggtttctgtacgagaacaatccggagctctgtggagcgcagttcgattctctgaaagcttgtcctaacgatggcaacgatgacggcagaacgccccggaaacctgaatcgacctctgtcaagccccagcagattcaaaagacggccgacctcaaccggaactgcggcgacggaggctgctcgaagccttcgacgctctctacaggggctgttgttgccggaacagtcgtcatcgtggcaggagcagcggcctgtggcctgtccgcgttctcatggcaccgccgccagaagcagaaggtcggcagcagttcggtcgagcatctggaaggccggcctagcctggaccggtcgaaggaagcataccagagaagcgccgtgtcgtcactgatgaacgtcgagtactccagtggcggctgggacacttcatccgaggggtcacagtcacagcatggggtggcgaggctgtcgtcgtcgacagagggtggttccccgagcgtgaggtcgttcaacctcgaggaggtggagtgcgccacgcagtacttctcggacgcgaacctgatcggcaagagcggtttcgccgcgacgtacaagggggtcttgcgggacgggacggctgttgcggtgaagagcatcagcaagaacagctgcaagtcggaggaggccgacttcctgaggggcctccgcacgctgacgtcgctgcggcacgagaacctcgtcggcctgaggggattctgccggtcccgggcgagcggggggtgcttcctcgtctacgagttcatggccaacggaagcctttctcggtacctcgacgccaaggaaggcgatgcggcggacgccgccgccgtcctcgactggcctacacgggtctccatcatcaaaggcgtcgccaagggtacggacgattcagaacttgcagattatttccttgccttgtcgtatcgtatcgtatcgtatacgttgttgtttggcactgattttctctgtggatctttggatttttttttttccttctctctttcaggcatcgagtacctgcacagcagcaagctggcgcaccagagcatctcggcggacaaggtcctgctcgaccacctctacgcgccgcgcctctccggcgcgggcctgcacaggctgctggccgacgacgtggtgttcgcggcgctcaaggacagcgcggccatggggtacctggctcccgagtacgcgacgacggggcggtccacggacaagcagggcgacgtgtacgcgttcggcgtggtggtgctgcaggtgctggcggggcggcgcgccgtgtcgccgccccacctccagcagggcggcggcggcggcgggcggctggacgacctcgtggacccgcgcctgcgcgggcggttctcgcgcgccgaggccgccaagctcgccggcgtcgcgctgctctgcaccgccgaggcgcccgcgcagcggcccaccatgaccgccgtgctgcagcagctcggcaccagcagccagtgatcgtcgtcggcggccggtacggtggtgggccggagtcggagctcgctggctacctggccggcgtggtgactgatttgtgttgagttagttaaccgctactgatctcggctactcgcatggtagctgcatttgctccttgtttgagctgagccccggctccttcctcgggagctcggttgatgtagttgtagtaaagtaagccggtgtgattgcattgtgacggagagtttttattagttaactaccgtctcatggcactgatgttgtatcgaattgtactgtctgtacccttaagatctatctatatgtcgaggatttgttggaaacgcggaaatgtcac

SEQ ID NO: 1311 - DNA, 3071 bp, Zea mays
gcaatccagtcattttcgccgcgaagatcctttcaaatcgtggcatctcacggaaaacgagaaacaccgcctccctttccatccacctgtcgtgcgtgcagtcgtgcactgcacccggcctttttcctcccagcgccttctccctctccgaccaacaccttccacagacccaaagcaacccgaccgttgccggtgccgcctcagccccaggaaaaaggaagcccctcgtccgtcaacatccctggtcctgtcatccacgcgcgcacgttcaccggcggcccctctctttcagttcggtcggagggccaacccgacctccgaggcctgagcggcctcgatgtcggcgcggcgggcggccaagagccagcacgcggcggcgacgccgaggaccatcaacctcaacctggcgaggaggccgggcggcgggaggcccagccggggcgcggggcgcgcgcagacccgcccggcgccgccgcagccggcgaggcaggtgcaggtcaacctcggcgcgctgttcgagatggagcgccgcgtgcgcgggctggagtccgcaccgccatcgccggcgccggcgtcgcagtcgcaggaagacgccgaggaacgggaggagaagtggcagttccaggcggagatactccgcgccgagtgcaacttcctccggatggagcgcgaggtcgcgctgcgcaagctcgaccgccaccgcggccagatggaggccgcgctcaagtccgccgtcgaaacgctcgtatcggggaggaagaaggtcgacgggaagggcgacgtcggcgttgcggcggcgctggacgaggggatcgaggacctcgaggagatgatggaggagctgcgtgtggagaaggagagcgggaggagggcgatgggcggtgcccgtgagctgcagcggagccgcggcaggaacttcgatcggcaggcgtcctcgctccgccggcgcctcgagaagatgccgcctgccaatcccgatcccctcgtcaaggacatccgcgagatcgccctgcccgtccccgcgccaccgccaccgccaccagcggctgagcaaagcggcgacgatgaacgcgtccacggcgccaacacctctgatgtggaaatgctgaggatgaagatggaggggatgtcaaagggcatgcgcgagcggatggcggagtacagccggcgcctggaagccgtcgcctccggcgacaacgctggctgccagtcaaggaaatgcggcaaccggcacagccgaaaggcgagcgcaggcagccagagaagctggagcgggggcagcaccgcgagcaacggcaacgccccgtcggccctcgacgccggcccgcacgcccgcagccgccagaacgtggcggcggagaagcgtcagcagcagcacgtgattatgtctggagagtgcaaattggtgggctccgcaagttgcagggactgcagggaaatcatgtggaagataatggagcaagtaaatgcagaatctgatcaatggactgagatgcaagatatgttggagcaggtcaggttggagatgcaagagctgcagtcttccagagatacctggcagcatcgggctatggcttctgacatcagtctccgctccttaaattctcaattactggagtggaaaaatcggggacaggcgtacgaacagcgtgcggaggagctgcacaggaagatttcagagctcgaaagcaagctacacacttccaaagcccatttaccagccccagctgttattcctaaccaaaatcagtggtcagatgcgtgcaagatggagcacccaagaggaaatcctcagcaccagccatccaaggaacccggcaaggaggagatcaagaagcacgtcctcatctgccgcgtgaagcactcgcccagcagcgtgctcccgaagcggtcgccgttccaggagataggcaacatcaggttgccgcggcatcggtgagcatgggtgggcaggtggccatgtgttatgtgagactgtgacctgtgtgagtgatgggctgctgcagcgaaactgcgaaggattcaggcgcaagagagaactctctttcggtttggcgtccacagtagcatcgatcagcttctacgtaataaataatttatttgtgacccactgatgagtaacatggcccgcctgactgtcagatcggtagtaataatcataagtagtcagtacagtgatgaataggtgagatatgtatgtaacggggtaacgctttatgtatgtgcaattttgttcctgctccatccaattttccatttttttgcccactgtgtgatttgttcatggtacattggtatatgagctcgagtcaaattctgattagcgctgaaatgaacacagaacactgatggtacattggtatatggtttcatcatgcacactgatgcaagcacaactgcacaagtaacaatggaaattgaggctttattggatttggatctaaatatactacaggtacagcatccatatgcaactaacagcaacgatcttttctaccttgaagatcagcaacggtatagatgattacagcaccaagtcagtggttaatcatagagagccaagcgcagtacgtgcacacgagcttctgagagatgtacacgtacacggcgaaggagaagctcatgagcgtgacgtccttccagtcccccttctgcttggggctcaggctctcccgcgctgccatcccggccttcaccacgtcgccgcgcagcctctcggccgtggcagcccaccacggggtcgtcttctcctcaccacctcctcccccgccgccgccgcttgccggcggcccggacgggaggtgactttggcagacgaggtaggatctcggcctagacgacacggcgtcgctacatcgtcgcctgcagccctgcggaacatgtggggtgctgctgatggtaaacatgcacagggaagccatgcatggacggtcggtcagatctagcctgtggccttgtgggctggagatgggtttgttgatcttttcagggagaagagaacggataagtagctgcagcctgcaggctatgagaggaggaggagaaaggacagcgacatgttggcctggcat

SEQ ID NO: 1312 - DNA, 1081 bp, Zea mays
agccactaagccctctcatcgccacaccagctatataaacacagctgctctcctgctccctttcccttccccccttccgttccgttccgatttgacgagttggtggctgctatagattcactccacccctctccatttctgataagtatccagctagctaccagtgtatgcaccaggcagcagcagcatggcggagtgcaaggacgacgacagcggccggcggtctccgtcgtcgtccatggacagcagcacccaccccccggcgctctccaccgcgtcctcggcctcccgccgcccgccggagaggagggaccagctcagccccgacctgcagctagggctcagcctgtcgccggcgtcctccgccctcctggtagcggagacaaacaacagcatcgtcccttctacgccaaggaaccaagcactcccggattggcccccgatcaaaccgttccttagaagcgccctgactgcctcggcacgccgacggcgaacgctgttcgtcaaggtgtacatggaaggcgtcccgatcggccggaagctggacatgctcttgctggacgggtacagcagcctcctagcgaaactttgccacatgttcaaggcatctatcacttatgctgacgctgtggagtaccatcagcgggttcctcacgagaaggccgcgcatgttctcacctatgaagaccatgatggagactggatgatggttggggatgtaccgtgggagctctttctcggaagcgtaaagaagctgaggattgcgagaaccgacaggtgctagatagcaaactttttcatgcggtggatcgactctgtttcttcttctttttttaatatatattaggttcattaggaaagattttgctgaacagagtggagtcgtgatgctgaggctatactaaccgtgtacagtgtactgaagaaacgccagccttgctaccatccctgcaaaattaaattttggtattttatgtttcctttcctgtttctttgactgccttgtaaataccatggttatttgttaaagaacaagcaatttgcatggaaaatattatagttccaaggtacacatcttcgt

SEQ ID NO: 1313 - DNA, 1581 bp, Zea mays
accatccgatccggtagtatccgaacccgataaagcgaccccccaacaacgctggcctcacctcacacaaacacacataccgaatccagccccgcacccaccgttgcgcccgccgcccgagtcgccgtggccgccgcggcagcgccctcccggccgtgagcgcggcccagcgcgcgcgccgcggccaccgccgccctcgaggcgcccagatctgggccctagcgcccccctccctcctataggcctttccccgctgcatcgccatggcgcggctactgctgtggtggacagcgctgctcctcccatccctcctcgccggcgttggtcccgccgccgccgccgccgcgtccccgccccacgatgcgtgcctggtgcctaccatcgcgcaatccgtccttaggactcccgacacgtgctcgacgctggatcgccgccttggcgacccggtcggcgtcatcgagggagatgaggtgacgttggcaagggcagttaatcttcttcacgcaaacaaggatgactacattgccgtactattctatgcctcgtggtgcccattctcacaggaatgcaaaccgaattttgagacactggcttacttattcccagctatccggcattttgcatttgaggaatctgcaattaggccaagcataatttcgagatacggcatccatggtttcccaacactctttctcttgaactcgaccatgagagtacgatatcatggaccaaggactgttaaatcacttgcagctttctacactgatgtctcaggtatcaatgcatcggtgaagtcaactgcaggggaggccatggtacatcccttggatgatattgagcataaaaaggacgctgaacaggaaaattgcccattctggtgggctcggtcaccagagaatatacttcagcaggatacttatctagcattggcgaccgtatttgtaattttgaggttgctgtatcgtatttttccaaagatagattcctttaccagatgggcatggaggaggcacaatatgtttgcaaaattgatgggagcacatgaatatttcctcacctaccttgagcaagcaagacagaagtttcataggctatacccttcaagttcaaagcgaggaaatctgcaggagggcgcaatgaacgctaccgcttgggcttccaaatcattagcatcagtttcaattggagaaccaagtgcaattggaaggacaaactctacaagtgagctaagatgaaatctgatcttttttgtccccagggattatatgtacagtacagtagagcgatcaggatatgaacacccagaaactgttgtaacggctatattactctttgtatcctccttagaataaatacgtccatgatttggctccttattttctgttgttgttacagcccaattctttggaggaataaagtttctggtgtattgagaggtgtctttctgaaatagggagcatatcagatgcacacgtgtctttcgtgtacatggtgctggtgcatatattgaatcaagcaacttaatatggtattaaaatcagggtctcaaatttgaatcctagttagcacaattcaatataa

SEQ ID NO: 1314 - DNA, 1446 bp, Zea mays
tttcattccttccttcccaaccatcgcacgccttcctgacttcctcctcccgcacgcagcgcagcacgcaacacgcaaacaaccaaggccgcgccgcgcgcgccctgccggccgtcagagagagaaacccagctctaactaaagtgccggctacatatactgaagtgccagccacatagctagctactcttctgatcctgagcgcgcacgcgccatggctcaggaggacgtgcacctggacgacgcaggcctcgcgctgggcctgtccctcggcagcggcagcggcggcggagcctccgccgcggcgcgccacggtaccagcagaagccggctgagcacggaggcgccgctgcagtcgccgcacccgctggagccgtcgctgacgctgagcatgccggacgaagcgaccgcgaccgcgaccggcgggtccggcggcagcggcggggccgcgcacagcgtgtcgtcgcggtcagtggagggcgtgaagagggagcgcgtggacgacgccgagggagagcgggcgtcgtcgacggccgccgcgccgcgggccggcgccggcgccgaggacgacgacgacgacgggagcacgcggaagaagctgaggctgaccaaggagcagtccaagctcctggaggaccgcttcaaggaccacagcaccctcaacccgaagcagaaaatcgcgttggcgaagcaactgaagctgaggccacggcaggtggaggtgtggttccaaaacaggcgagcaaggacgaagctgaagcagacggaggtggactgcgagctgctgaagcgctgctgcgagtcgctgacggaggagaaccggcggctgcagcgggagctgcaggagctccgcgcgctcaagttcgccccgcacccacaggcgccgccgccgtccgcgacgcaggccggcgcggcggcgggcgtcgttccggcgccgccgccgccgttgtacatgcagatgcagatgcagctgccggccgccgccacgttgagcctgtgcccgtcctgcgaccgcctggctgggccggccggcgccgccgccaaggccgagcctaggcccgacaggcccaagacagccacccaccacttcttcaaccccttcacccactccgccgcctgctgatgacgagggcagggcagcacgcaacgcagcggcagtaaacagagcaccgccccgtgcagataataccacgtctgtacgtgtcacaagtaattaacaaacgtatggtcctcctctctatctattttcttgatccggagggctaagttagttgttttcgtgtcgatcccaaatgcatcagctaatccatcaatcataggcttgatagaatagttgaaaaatagccgtagctttcctagaactccctccacacctccccccttcaaaatcggttacaccgaaacactatcaaatccgaactataatttcacgaaccccaaccacgt

SEQ ID NO: 1315 - DNA, 3881 bp, Zea mays
acagagcatccatccatccctgatcttcacgtggccatatcccaccaccaaccaaccctccaccaacttcatcgcatcaaggcccctggcatctcccgaaagtccaaagggcccctcccccgcgcctccgcggggaccttgttaacaaactgggccgcatccagggggcattctgcaaagcacgagcccggttcgttctcgacctttcgtctcgctctcgcccgcccgaccccgcggagccctagcctagccttgcccccgaccgcggattccccctcggccgccgcgcgcccgcacccgcacccgcgatgatgaactgcgccggaggcggagaccccgtggaggacttcctgatctccggcgccgtcgacgacgaagatctagccatcttctgcgacggaggacttgggattgagggtgtcaatggagatgcttgtggatttgagcagtctaatttgggcaaaaggggtagagatgaaccatgttcatctggtctaaaatccaaagcttgtcgtgaaaaaatgaggagggacaagctgaatgacaggttcctggaattaagttcggttatgaatcctggaaaacaagcaaagttggataaagccaatatcttgagcgacgcagcccgtatggtggcacaacttagaggtgaggcagaaaagcttaaagaatcaaatgagaagctgcgggagaatatcaaggacctgaaggaggagaagaatgagctccgcgaagagaaagtgaggctgaaggtagagaaagataggctggagcagcaagtcaaagccatgagtgtagctcctacaggatatgttccccatctccctcatccagcttcataccacccggctgcatttgctccatttgtgccgccacagcaagctgcaggcaacaaaagtgctccaatccctgcacctttccctgggatggcaatgtggcagtggctgcctccgaccatcgtggacacaactcaagacccaaagctctggccgcctaatgcttaggggcagctagctgccttggggtgttgactcgccaatcgccatgccgtttcatgcattgggcggcagatcagagtatcagttagtaggtccctggagaggaggaatcaagtttcgcaactcgcgtcatgtttatgctgtaacagttgcttccagcagtcgtcatcaacttgctttgttctattgaagggtgatgcatgtaattaatatgtggatcttaaccctctagctggcaaatgtgtcctttgctgccttgtgccctttgccccgttcgtgagtggcctgtggaggccgttcctgttcttggtgtccgagattttgccattagctttgtgagacacatacatagcaggaaaagaattcgatgaactaaatctttaaaccgtctctataacgccagcaaaaaagatgcttggtagaggggggaaaatggacccaggataagtatctcttaatttctgtctcaagtatatcattgattaggaatagtcaaataatgggggagatgtgtttctacgcctccttcacaacatcttgcacacatacagaaaaagagcaaagattggtagctgtcaacaaattctttttctcccttccctgtgttttcctccctgcaaatttaggatcaaaatgacataacaaccgaacaaaccacctctaaactgctaactaaaaagttgtatcctgttgtccgtaacggcactgaactgattctccggcgatgagcttctccagggcatccggcggaaggccgaccatctccagtgtcttctcccagaccagctgcgaggtctcaagattgtgcgcttcttcagacgcattcatcggactacagtcatagttaatgcaggcacaaactggccagtcctccgacttgagcgtctcgcagtattccgggacttggggatcggatgctgcaaacagtgcactcctagaacctgaacgggacgcaaaacagaacatttgcgtgtatcagaagatgcacaagctgttgactgactgactgacgggaggtgacagcacaagttcggtaacttgactttaccttcttgagcgtcaaatatgaagtagggaatcaaatggtacgcggctacgacaatcttaggaagatctcttgcctgcgtcatggggacaagtgtcaagctaacatttatatacacacttatacagtgagcagaggcagatagaaagaaagaacaggttgctaaattgtggtcatcaggataagtgataaatgcactttgtttagggagcggtagaatagaacttacgatacatgtgaatcaatcatccgacaatatatgcatcttttaaatttgagttttctcctctatcattgtgttacaattaatcatgagcggtaactatccaaacatctagatttcttgagatgcgaatgttgggtaggcatacattttatatataataacccacctcctgaaacagcacacaaatgaaatggaaacggaactcacaacgttcgtgtcgacaattccaggagaagcgcaaactacaccgatgccagcctctgcaggaattttcttgtgaagcatgctactgaattttacctgagagtgcaacaagaaagaggaattcagatctactagattagagacacgtacttttgttctgataggacagagaaaataaacagttcgaagatacaaaaggggtactagcatttcaaagggagcgactttttgtcagcagtctttaaccaaaaaaaaaagttacctgtgccagcttgctatttgagtatcctaaccaacttctatatttatgttttctcaagttcatatcttcagcgtcgacaaaacctacagtgtgcatctgcgattggaaatacacgcaggtcaggtcgtggtaatgtagccacaaaagaattgtagagttgcaacttcattgattctaaactgacattggagttcaaaaatatttgcatccatggtagaaaaccgtgcctgcagtaccactaatggtgaggaaagagaactcacgatcgaattaacgttaacaattctgctgggagaacctcggagaagggaaggtataagcagcatcgccagtaacgcaggtgcaagatggttcacttgcatgtgttcttcatgtccgtcctttgagaaacgctggggttctacataggattgaaaaggttgatagctctggtacagtttaaaatacatgtctaactgaaacctgagatttggtatgtcaaaatccgaacggttgggttaatgaataatcctgcagacctcctatagcgaagatgccagcgttgttgatcagcacgtgtaggggtgccatacgagcattccaagcgtcagcaaaatttgcgaccgagtcgagggagagtaggtcaagttccatcaccttaaaaaagagtaaggtgtaaacaatgtaaaatagcagacaactaaaccagatttagggttctgaagttatgacttgtaggttatctaggtgcactctccatctttacgaatcatgatatgcatacacataggtaatatatgtagttaagtacataaatattgcttaatgtcattttaaacaaatagcaggagctcagatttacgtttaagtgcatcagattggaaaacaacacagtaatatgcctgcaggcacaatccggccatgccgtacagaatttaggcgagttaaaagagcctcgttcaccatccagggccgcacagcaagtatcttaaaaaattacctcagcgtttagtggtcttcctgtttctgaattttggttctgccacctctgaatcaagtcttgtgccaccttgggccttctaacagccatcacaacgtgtgccccagcgagagcgagctgcctgatgtgtccattattaagatataaggatccagttagtaccatcc

SEQ ID NO: 1316 - DNA, 5036 bp, Zea mays
atgcctactttgttgaatggtggaggaaagggaactccagttaatatcatcgttggttctcatgtttgggtggaagacccaaatctagcttggatagatggagaagttattagcataaaaaacaatgaagtacatgtgcagacatcgaatgggaaaaaggttaccacagacaggtcaaaagtatttcccaaggatatggaagctccaccaggaggagttgatgatatgacaagactttcatacttacatgaacctggtgttctacagaatcttgctacccgctatgaactgaatgaaatatatacttacacaggcagcattttgattgctgtaaatccatttcaaagattgccacatctttatgatacccacatgatggaacagtacaagggtgcagattttggggaattgagtccccatgtctttgctatcgcggatgttgcttacagggcaatgataaatgaagggaaaagcaactctatattggtcagtggtgaaagtggtgctgggaagactgagacaacgaagatgcttatgagatatttagcacatttaggtgggcgatctggagtagaaggacgtacagtggaacaacaagttttagagtccaacccagttcttgaagcttttggtaatgctaaaactgtgcgaaataacaactcaagtcgctttggcaagtttgttgagatccaatttgacaagactggacggatctcaggagctgctatcagaacttacttgctggaaagatcacgtgtgtgccaaattaattctccagaaagaaattaccattgcttttattttctttgtgccgcaccacctgagtacactcagaggtacaagctgtctgatcctagatctttccattacctcaatcagtcgagctgtattgaggtggatggaatcaatgatgctgaagagtatttagcaacacgaagagctatggatatagttggaatcaatgaggaagagcaggaaggtatattccgggttgtagctgctgtacttcatcttggaaatataaattttgccaagggaacagaaatcgattcttctgtaatcaaggatgataaatccaggttccaccttaatatcgcagcagaacttttgaaatgtgattgccagaatttagagaaggcgctgataacacgagttatagtcacgcctgaagaagttatcactagaacacttgatcctgcttctgcagttgctagcagagacgcattagctaaaataatatactcccgattgtttgattggattgtggaaaaaattaatgtctcaattggacaggacccaaactcaaaacagttaattggagttcttgatatctatggttttgagagcttcaaagttaacagttttgaacagctatgtatcaattatacaaatgaaaagctgcaacaacattttaaccagcacgtgttcaaaatggaacaagaagagtataccagagaagagataaactggagttacatcgagtttgttgataatcaagatgtgctagacttgatagagaagaaaggtggattgattgcacttctggatgaagcatgtatgtttcctagatctacacatgagacgtttgcgcagaagctatatacaacatttaagaataacaagcggtttgccaagccaaagctttcacgcactgattttacagtagtccattatgctggcgatgtgacataccaggctgattatttcttagacaagaacaaagattatgtagtggctgaacatcaggatctgctgaatgcttcttcatgcctattcgtagctggtttattccctcctctcccacaggagacagcaaagtcttcaaaattttcatccattggatcacgttttaagcttcaacttcaatccctcatggaaactttgagctctaccgaaccccactatattagatgtgtgaagccaaataatctccttaagccagctatttttgagaatacaaatgttatacaacaactaagatgtggaggtgttctcgaagctatcaggatcagctgtgctggatatcccacaagaaaaacattttatgaatttgtcaatcgttttggtgtccttgctcctgaagttttagaagggagcaatgatgataagattgcgtgccaaaagattttggaaaaaatgggtctggagaattaccagattggaaaaacaaaggtgtttctaagagctggacagatggctgatttggatgctcgtagagctgaagtattaggaagagcagcaagaatcatacagaggcaaatacgtacatatattgcaaggaaacagtttgctgagcttaaaagatcagcaacacagctgcaatcttttgtcagaggaaccttggctcgtaagttgtatgagtgcatgaggcaggaagcagcagcagtgaaaatacaaaagaatatgcgacgccacaaagcacgggaatcttatttacaattgcaagcagctgcaatcacattgcagacaggtttaagggcaatgtctgctcgcaaagaattcaggttcagaaaggaaacaaaagctgctgtccacatccaagctcaatggcgccgccacagagactactcacattacaagaatctgcaaggagcagctcttacttaccagtgtgcctggaggcaaaggcttgccagaagggagctcaggaagctcaagatggcggcaagagaaacaggagccctaaaagaggccaaggataaacttgagaagcgtgttgaagaactcacctggcgcttaggattggagaagcgattaaggactgaccttgaggaagcaaaagcccaggaaattgctaagctgcaagagacgttgcatgatatgcagcttcaagttgaagagtcaaaggccatggtagttaaggagagggaagctgctagaaaggcaattgaagaagcacctccagtaattaaagagactcctgtgctagtcgaagacacagaaaagattaactcactgacgaccgaagttgaacaactgaaggctttgctgctaactgaaagacaagcaacagaagctgcaaaaagagaacacgctgaatctgaactgagaaatgaagaactaattaagaaatttgagagcgcagagaaaaagattgagcaacttcaggaaactgtccataggctggaggagaaagcaaccaacatggagtctgagaacaaagtgctccgtcaacaagctgttgcaatttctcctacgtcaaaatcattagctgcatatcctaagtctcctttccagctgaaaactccggagaatgggaatgctctaaatggagaagtgaagtcatcaccagatatcacccctatcttaccaaaccccaaggagcttgaggctgaagagaagccacaaaaatcacttaatgaaaagcagcaggaaaatcaagacctactgatcaagtgtgtatcacaagatctgggattctccagtggcaaacctattgcagcttgccttatctacaggtgtcttctacactggagatcattcgaagttgaaagaactggtgtttttgaccgtattattcaaacaattggctctgctattgagtcccaggacaacaatgacaagttggcatattggctctcgaattcatccacactgctgctgctgctgcaacgaacactgaaaacaactggagcagctggattcactcctcaaaggcgcaggtcatctgctgcatcttttgggagggtgttttcggggatgcgagcctcaccacaaagtgctgggcgtgcttttatgggaagtcgcttgattggaggtctaggtgaccttcgtcaagttgaagccaagtaccctgccctgcttttcaagcaacagctcacagctttccttgagaagatctatggaatgataagagacaatttgaaaaaggagatatctcctttgcttggcctttgcatccaggcaccaagaacatcccgtgcaagcctaattaaagggtcacgttcccaagcaaatgccttagctcagcaaactctgattgcacattggcagagcattgtgaaaatattgacaaattacttgaatgttttaaaagcaaattatgtcccttcagtcttaatcagcaaagtgttcactcaaatcttttcatttattaatgttcagttatttaatagtcttcttcttcgacgggagtgctgttcatttagcaacggagaatatgtgaaagctggattggcagaattagagcagtggtgcatttatgcaacagaagagtatgcaggttcttcctgggaagaattaaaacatattaggcaggctgttggattccttgtgattcatcaaaagccaaagaaaacattgaaagaaattaccaacgatctgtgccctgtccttagcatacaacagctatatcgaatcagtacaatgtactgggatgataagtacggtacccacactgtttcatcagatgtcatctcaagtatgagagtaatgatgacagaagattctaataacgcggtcagcagttcgttcctgttggatgatgattccagcattccgttttcggtggacgacatctcgaagtcgatgacagaaatcgaggtaacagatgtcgacatgccacctctgatccgggagaattctggcttcaccttcctacaccaaagaaaggactaacagggtggtccttccagctgcatgtccctttttgcacattctttttctccgctcaacctgtgcataactcatgtacatacgctcgtgccttttgctctctggtcagggcttgttagatgtattgtctttggtttgattggttggttggttctttcctcgatcctctcccaattttgttgggcgaagggtccacaatctatgtttctccatactgtagtgaaaaggggccggatgcccctggtctccccgagctgcttttggaaaagctcgtggtcattaagcagttaagcttgtggaaaaggttctccacatctaccgagtcgttcgttgtgtcgccttcttcatatggatcatcgccatattgtaaattgcaaatacgattatagttgaaaaaagagatattacagtgatagcagtgt

SEQ ID NO: 1317 - DNA, 3022 bp, Zea mays
cgtcgtttgcatcaccatcgcccgcgacagaaacacactccgccgaacggttgtgtgcatcgtcgcatctcgcggcaaagcgcacgggccggccattggtggatccggtgggggggccgccagcagccttgctccaccagccgcgatcatggcgggcctactcccagaacctcgcccagccgtggaaggtagatccgatggccaggaccccggctgacgcgggctcggggccccacgctgactcggccccgctgcatcccgaacggataagctcctgccgcgcacggagctcgccgaaccgacacccgccgcgtgtccagggagcgctcccggcgggggtcgctcgcagacgcgaggtcccggagccgcgcgcgcccccgcctataaaactgcagccattctcccctggttcccgcatcccactcgcagcacgagcgctcagcgtctcgtctcctcctccccacaaaaagccgctgaattgctccgtcggcgtcatgtgtggcatcttagccgtgctcggatgctccgactgctcccaggccaggagggctcgcatcctcgcctgctccagaaggctgaagcacaggggccccgactggtcgggcctctaccagcacgagggcaacttcctggcgcagcagcggctcgccatcgtctccccgctgtccggcgaccagccgctgttcaacgaggaccgcaccgtcgtggtggtggccaatggagagatctacaaccacaagaacgtccggaagcagttcaccggcgcgcacagcttcagcaccggcagtgactgcgaggtcatcatccccctgtacgagaagtacggcgagaacttcgtggacatgctggacggagtcttcgcgttcgtgctctacgacacgcgagacaggacctacgtggcggcacgcgacgccatcggcgtcaacccgctctacatcggctggggcagcgacggttccgtctggatgtcgtccgagatgaaggcgctgaacgaggactgcgtgcgcttcgagatcttcccgccggggcacctctactccagcgccgccggcgggttccgccggtggtacaccccgcactggttccaggagcaggtgccccggacgccgtaccagccgctcgtccttagagaggccttcgagaaggcggttatcaagaggctcatgaccgacgtcccgttcggggtcctcctctccggcggcctcgactcctccctcgtcgcctccgtcaccaagcgccacctcgtcaagaccgacgccgccggaaagttcggcacagagctccactccttcgtcgtcggcctcgagggctcccctgacctgaaggccgcacgagaggtcgctgactacctcggaaccacccatcacgagttccatttcaccgtacaggacggcatcgacgcgatcgaggaggtgatctaccacgacgagacgtacgacgtgacgacgatccgggccagcacgcccatgttcctgatggctcgcaagatcaagtcgctgggcgtgaagatggtgctgtccggggagggctccgacgagctcctgggcggctacctctacttccacttcgcccccaacagggaggagctccacagggagacctgccgcaaggtgaaggccctgcaccagtacgactgcctgcgcgccaacaaggcgacgtcggcgtggggcctggaggtccgcgtgccgttcctcgacaaggagttcgtcgacgtcgcgatgggcatggaccccgaatggaaaatgtacgacaagaacctgggtcgcatcgagaagtgggtcctgaggaaggcgttcgacgacgaggagcacccttacctgcccgagcatattctgtacaggcagaaagaacagttcagtgacggagtgggctacaactggatcgatggactcaaagccttcaccgaacagcaggtgacggatgagatgatgaacagcgccgcccagatgttcccgtacaacacgcccgtcaacaaggaggcctactactaccggatgatattcgagaggctcttccctcaggactcggcgagggagacggtgccgtggggcccgagcatcgcctgcagcacgcccgcggccatcgagtgggtggagcagtggaaggcctccaacgacccctccggccgcttcatctcctcccacgactccgccgccaccgaccgcaccggagacaagctggcggtggtcaacggcgacgggcacggcgcggcgaacggcacggtcaacggcaacgacgtcgctgtcgccatcgcggtgtaacagtaatgaactggaggatagggacgaacgaacgactggtaggtgtggcgtacctgccgcgtgcccaccggccggccatatatatcgaatcccggcccggcgcggcagcacgtgctattgttacgtgtcaccagcgtacgtgtctgtgtagtgcctcgatcgtatctgtacgtctttaggaaaaggtgtgtccgtgtgtattgtatgtgtgtgagcaagcgtgcgtgacgcgctctgcctgtgtgacaaagcagagcagtacaagctcaggcattttctgtccgagcgatgatttgaactggatctatcatctctgaattgaactcggccggacgacgacctaccgctaaaattattcccagctggatttcggtacgtgtccccgttgttcgttctcgcggctgtgactgtgaccgaacctgctgctacaagtgcgcgtagaggatctggttccacgtgtccggcacgccgggcacgcaccagtggatgcagtccgtgtacgtctgcgggtcggccctctgcgcgtcggtgagcagctcgccgccggtctcggtgtacacggagacgtgggcgtcgacgcggtgctccgtcagctgcgtgacgttgagcagcgtcacgggcacccgcatccggcccaccacgtcggacatcacctccatcatccgccggtccgcgccgctgccccagtaccccttccgcgtgacgggcaacgtctcgttgtagcaccggatgccgccctcccggccccagtcctcgctcct

SEQ ID NO: 1318 - DNA, 1110 bp, Zea mays
acaagcaagccttccaattaactcgttcccaccttcccctcctccccttctccttccttcacggattcccaaatactcgcttccaataccaattctccgatccccgttcgttcccgcaccctcgcgctccgctgatccggcggcatgcggcgccgcggcgtggcggcggctgaggcggacggtgacgtggagttgcggttccgcggggtgcggaagaggccgtggggccggtacgcagcggagatccgggacccggcgaagaaggcgcgcgtctggctcggcacattcgactccgccgaggacgccgcccgtgcctacgacgccgcagcgcggatgctgcgcgggcccaaggccaggaccaacttcccgctccccgccgcagccgccctccaccaccaccacatgcccgctgctgccgccgcagcagctccaccatacacaacatatcccaccgccacgggcgtctcgacgccgccggtcgccagaccggcttgcagcagcctcagctccaccgtggagtccttcagcggcgcgcggccgcggcccgtgctcccgccgcggttccctccgccgtcgattcctgatggcgactgccgcagcgactgtggttcctcggcctcggtcgtggacgacgactgcacggacgcggccgcctctgcgtcgtgccccttcccgctcccgttcgacctcaacctgcccccaggcagcggcggcggagccggcgtcgggttttacgccgatgaggaggatgagctcaggctcacagcgctgcggctgtgacgtcgagctcaatcgagccgctgcttagaaagaggaaaaggagaaaaatatttggttcttcccttctctcgtagccgacacgaactctccatccactacgatgttgttgtttacttgatctgattatgatatttgcctgaatcctagtcaacttacctgcatgcatgcttgcttgttttctggcgattgaggattatcgccaaacgccaaatcttgcagcagctgttgtactgtaatatatcaacattttacttacttcctcttatgaggaaaaagacagataaagtaacttatttcaatctttagctacattttgccttcttgtttttg

SEQ ID NO: 1319 - DNA, 5897 bp, Zea mays
ctccacgtgtcctatatacatttttttaagattaacgtgttgcatcgctggcctagaatcgtctggatccagcgtgccacgcgctcacgccagttcatgcacatccacacttacagagttacagttacagccaaccaaccacatcgcatatcaaagaccagaaagctcaaaccaagaccggcgtgcgcggacgaagcacagatccatcggagtgacagcgagcgagagcgagagagacagagagattgtccgcgcgtcagcgactcccggcgaagacgatggggaaggggttcgcatcctacctggcgatgaagacggggccggagggcggcgacgcggcggcggcgcagcaggctctgatcgacgcggacctgcgggagctcggcgtcgccgcgcggaagctcgccaaccacgcattcgtcctcggcggcgggctggggttcggcacctccttcctcaaatggctggccttcctcgccgcagtgtatctcttgatattggatcgcacaaattggaagaccaacatgctgacagctctcttggttccttacattttcttcaccctgcctaatgtgctgttttctctgatcagaggagaggtggggaaatggattgcgattattgctgttattctgcgtctattctttccacgacacttcccagattggttagagcttcctggttccatcatcctgctcacagtggtcgcccctagcctgttcgcggacagcttcaggggagacctcgttggtgtcttcatatgccttgtgatcggatgctacctgctccaagaacacatcaaggcgtcaggtggattcaggaacgccttcaggaagggcaatggtgtgtccaactccatcggcatcctcctgctcttcatctaccctgtctgggccggtgtgctgcaagtcctgtaggcaccattgcctcagtgtttcccctgtgcggtccagctccgttcccgttcgtgcccgtgcaaatgttccctctatggtgatccgtgatcctgtgtcacgagtaggtgatgtttttatgtgtgcttgagttgatcggttgggcatgttgccatgttggtggacagttttgtttatctcatttgttgtagttcgatgtcagcatttggttcgttcgagtacataaacgccaataaaatcagtagccgtggcttgatgtagattgagatgttggtcatattatctcgtgtaaatccctgcgtctcttctgttatagtgttatgcaagctagaggacgcatgtttatatgtcaactaattattttctatatcaacagcatcatccggtgttatttctgaatatggtgccaactagtgacaaaaccgtgaaacatcaaccggccggagttgagaacgatctgggctgcggccggtcagcttgtggatgggcgaacttttctgctccggcatccacgctgctgtcctcctacatacacctggcatcctggcggccgttggttcagcaaactttgcctgccattcactcgcacgtacccgtcggaccacgcgtggtggccggcacattcctcctcgcccggcccttatcctctgcccaactgcaacaggagagaagcgatgcgatattcctgttctgtaacagatcgaattctccagcatcttcagttgtgcggttgagctgagtggtcagataatccatccattccttttacgttgcatacatgtccaggttgagcttccacatgttctttattaacagtcacgatcagcgtggagcagcgtgtggttacgtgcaccagtttagcttagcagctgaagaaaagcaacgagacatggggaggatgagtgtgcgacgcgaggtcaaaagcagcaataaccatggcgagcagaaagaaagcatttcgcggaaaagaaagaatcaccccgtcgtccctgcagtctgcaggtgcggtagcggtgccccgtctccatccatcgcaaagcccccgggctttcgatcccgtcccctgcttttgttcccgcccgccagattccttccaacatcccggctgcactgcactgcaccacgactccacgagctgaggtgaaaagcaagcgagaaacgcgccgccccggggaggaggcgaggggtgagtcgggtcgggtgtgccgtgcgcgcgcgtatgggaatggcatgatcgtccggcggcgcgtggactccgtggatggataacggggacaggtcgggcgctggcgcgggcgccgtcggcagcgccggcagcctcggtctccgcgtcgggcaggcggtcttctcgtcggcgtcgctgctgttcatgtcggtcggtgtcgagttcttcagctacaccgccttctgcttcctggtgacgatcatggggctggtcatcccctggagctgcacgctggccatgatcgacgtgtactccgtgttcgtgggatgccctctgcgcgtgccgggcgtcatggtcatcgtcgtggtaggagactgcgccctgtcgatagtctcgttcgccgccgcctgctcgagcgccgcggtgatcgacctcctcctccagctccatggatcccacagctccccgacgttctgcgggaggtaccagctgtctgccatgatggcgttcttgtcctggctcctcatggccgcctctgccaccttcaacctctggttcgtcgcctcacggtggtaaagctgcagcaggccacttttttttttgtttcgtagatagcgcacataatttggctttggagagcgtatgtgttagctactggatgctactgggattcgagggagagaagatcagagaagagagtagcgtgtgggagagtgggagagaatgacaggaagatggcgatagatgtattcctttacccaaattcttcttgtcctgattattacagactcagtacttatactaccctgggacgcagcccatactcatttggtacactctggccatgaacacgcttgttcggacgacgcatacgactggacgcgtcttttcttctcccgcgtcttcagtatcagtagcttcactcaccggactgctaacattccctaccgcttgaaatgcggcttgcccccaagccgctgatagtgtagacaatgattgatgactctacttcagctttcagggattagcactgattaccccatagtttgggtgagtgagagacaagggcagtactgatgctggccttacaggagaaactcagcagccttgagttgttggttgggtacctttagaagctatgtctcccaatctgagaagatgacctggtgtgaaatgagcaaagattgtgtgagtaatactgaactggtgcccttttgtcaagaccgtagccaatatcatcaacagcactggccttctcgttagccaagagcaggctattgacactcgtgagccatgagttgcaaatcaagagaaggttagcaccgtcttgaccaccattttctttagatggacaaaaagaatgctccacggctaaatcactcaagtctgctcctgcaatgatattcttttcaagatcaaccagaagcatgacatccttttcttaagcacgacttgaatattgcaggatgggtccattcacggccagtgatttaatccaccacacccaagctgcataacagtaaaaagatggccatggcataggtctgacttgaacaccatcaccgaggagcaccgactgcacatgtggtggccatggttgcttgtacgacacgacatcccacccacactcggatggataccagatgttgcactgtgtaatcgtgtcctgtatcgtaaactgcataggtggcggccatggtggctttatatgcattagatccaaagcaaaaaaataataattctcagacactttcgaaacagcatgtgtggcattggttgcagaacagaaccaaacaatcgcatcatcaattgaggttgcattggtgagattagcagtgaaaaaccttggccggatatggtccacaatattctgggatacgacgatgactgagtgaaactcattgctgacagcaaagaggccatcacccaagttgtcagctaccagcacaaacccctttccaacagggtagtagccacaggcaacgttgatgtgctggaagaggatgttctctttcacctgattaaaactccaaagataaggctgcaactttgctgcaaatgtggttggaccaaccaattgcccctggtaaactttctcgactgtttcagcagccgcactgacctttaggatggcatcactagagaaacttgattcaacatcatactcagaagcgcgccattggggcaaacgtccatcagcagctgaaaatgtctttgcatatggaagcatgtgtgataaacttgatgtcagggtcctatccaggtactccgggttgtaagggaccagcatgggatggaactggccgagcgagtgcttgatggcgaggccggtggccctgttgatgagcgtgaacacgggtggccctgttgacgagcactgaacaacacctgctggagcacgaacgctcggcatgggcacccccgcgcagaggctctcttgggaggagttccagttggagtgagtgagaaacaccccaaccgcctcatgctggagcgccgcatcctgtggccaccacgtcgtcagcaacacgcgaccctctacggcggaagcgaattccagtggcagcacgacagagtcgcccttcaccaggtccggccggatgtcgaacaggtacccgctgttaagcagctgtgaggtggtggaatgttgcaattgaaggttgcccccttcgtcggtgccacggttgaggaccagcattgaacacttggtgggcacggcggcgagctcagagtaggggaagtagccgagggccatgtggtccaggaggaggcagtatcgcgagcactcggggcaggagccggtctggaggaagaggtcgacccagtcgtcgtggacgagagacagaggacttgcctcgttgtggtttggctcgtccaccagctcagctggcgtctgcggcagcgtgaagtagtacgggttgaacggcgagggcgagtcgaacctcgtggacggagacgactctccatcgaagataggttcctcaccgaaaataggccctgcatcgaggaccagctcgtcgttgtcgtactgtagcgcggcggcggcggaggtggtggtagtggtggggcccttgaacgagtcgaaggagaagttgtccatggccgtggccactgacgcgcacgcgccatcgcccagcccgacgcagccgcgcctcagatgcgccatggccgttgtgttgcgttgctcgagtgcgccgcatctgccttccagcgttgccgtcaatcgctcctccatctgacccaaagcttccagaatatgatgcatcgcggattccattccgaccacagcaatcgaacgcggatgacgatcccggattgcgctagtctgatatcagatgttagctactggatgctactgggattcgagggagagaagatcagagaagagagtagcgtgtgggagagaatgacaggaagatggcgatagatgtattcctttacccaaattcttcttgtcctgattattacagactcatagtacttatactaccctgggacggagcccacactcatttggccgactcgcctaaagctagaactcatttggcacactctggcccatgaacacgcttgttcggacgacgcctacgactggacgcgtcttttcttctcccgcgtcttcagtatcagtagcttcactcaccggactgctaatagtatgctacttcagtgttcaggtaccttgagattttggtcaaaatattagctgtccttgatgtgaatactagtcggttgcccgtgcgttgtgacggcttacaacaatacccacattcgttagtagacccaaaatataatatcgtcaacataaattttggcat

SEQ ID NO: 1320 - DNA, 1812 bp, Zea mays
tacctggttgatcctgccagtagtcatatgcttgtctcaaagattaagccatgcatgtgcaagtatgaactaattcgaactgtgaaactgcgaatggctcattaaatcagttatagtttgtttgatggtacgtgctactcggataaccgtagtaattctagagctaatacgtgcaacaaaccccgacttccgggaggggcgcatttattagataaaaggctgacgcgggctctgcccgccgatccgatgattcatgataacttgacggatcgcacggccttcgtgccggcgacgcatcattcaaatttctgccctatcaactttcgatggtaggataggggcctaccatggtggtgacgggtgacggagaattagggttcgattccggagagggagcctgagaaacggctaccacatccaaggaaggcagcaggcgcgcaaattacccaatcctgacacggggaggtagtgacaataaataacaataccgggcgcgttagtgtctggtaattggaatgagtacaatctaaatcccttaacgaggatccattggagggcaagtctggtgccagcagccgcggtaattccagctccaatagcgtatatttaagttgttgcagttaaaaagctcgtagttggaccttgggccgggccggccggtccgcctcacggcgagaaccgaccggctcgacccttctgccggcgatgcgctcctggccttaactggccgggtcgtgcctccggcgccgttactttgaagaaattagagtgctcaaagcaagccatcgctctggatacattagcatgggataacatcataggattccggtcctattgtgttggccttcgggatcggagtaatgattaatagggacagtcgggggcattcgtatttcatagtcagaggtgaaattcttggatttatgaaagacgaacaactgcgaaagcatttgccaaggatgttttcattaatcaagaacgaaagttgggggctcgaagacgatcagataccgtcctagtctcaaccataaacgatgccgaccagggatcagcgggtgttactaataggaccccgctggcaccttatgagaaatcaaagtctttgggttccggggggagtatggtcgcaaggctgaaacttaaaggaattgacggaagggcaccaccaggcgtggagcctgcggcttaatttgactcaacacggggaaacttaccaggtccagacatagcaaggattgacagactgagagctctttcttgattctatgggtggtggtgcatggccgttcttagttggtggagcgatttgtctggttaattccgttaacgaacgagacctcagcctgctaactagctatgcggagccatccctccgtagttagcttcttagagggactatggccgtttaggccacggaagtttgaggcaataacaggtctgtgatgcccttagatgttctgggccgcacgcgcgctacactgatgtatccaacgagtatatagccttggccgacagggcccgggtaatcttgggaaatttcatcgtgatggggatagatcattgcaattgttggtcttcaacgaggaatgcctagtaagcgcgagtcatcagctcgcgttgactacgtccctgccctttgtacacaccgcccgtcgctcctaccgattgaatggtccggtgaagtgttcggatcgcggcgacgggggcggttcgccgcccccgacgtcgcgagaagtccattgaaccttatcatttagaggaaggagaagtcgtaacaaggtttccgtaggtgaacctgcggaaggatcattg

SEQ ID NO: 1321 - DNA, 3388 bp, Zea mays
ccgcgaccccaggtcagtcgggactacccgctgagtttaagcatataaataagcggaggagaagaaacttacgaggattcccctagtaacggcgagcgaaccgggagcagcccagcttgagaatcgggcggcctcgcccgccccgaattgtagtctggagaggcgtcctcagcgacggaccgggcccaagttctctggaaagggacgcctgggagggtgagagccccgtccggcccggaccctgtcgcaccacgaggcgccgtcaacgagtcgggttgtttgggaatgcagcccaaatcgggcggtaaactccgtccaaggctaaatacaggcgagagaccgatagcgaacaagtaccgcgagggaaagatgaaaaggactttgaaaagagagtcaaagagtgcttgaaattgccgggagggaagcggatgggggctggcgacgcgcaccggccgtatgcggaacggctcctgctggtccgccgatcggctcggggcgtggaccgttgtcgcccgcgccggcggccaaagcccgggggccctaggcgcccccggcagccgtcgtcggcgcggacggtatccgcgcgcctctggcgcgcccctcggggcgctgcgccgcaacggcctgcgagctccccatccgacccgtcttgaaacacggaccaaggagtctgacatgcgtgcgagtcgacgggttcagaaacctgagatgcgcaaggaagctgacgagcgggaggccctcacgggccgcaccgctggccgaccctgatcttctgtgaagggttcgagttggagcacgcctgtcgggacccgaaagatggtgaactatgcctgagcggggcgaagccagaggaaactctggtggaggctcgaagcgatactgacgtgcaaatcgttcgtctgacttgggtataggggcgaaagactaatcgaaccatctagtagctggttccctccgaagtttccctcaggatagctggagcccacacgagttctatcgggtaaagccaatgattagaggcatcgggggcgcaacgccctcgacctattctcaaactttaaataggtaggacggcgcggctgcttcggtgagccgtgccacggaatcgggagctccaagtgggccatttttggtaagcagaactggcgatgcgggatgaaccggaagccgggttacggtgccaaactgcgcgctaacctagaacccacaaagggtgttggtcgattaagacagcaggacggtggtcatggaagtcgaaatccgctaaggagtgtgtaacaactcacctgccgaatcaactagccccgaaaatggatggcgctgaagcgcgcgacccacacccggccatctgggcgagcgacatgccccgatgagtaggagggcgcggcggccgccgcaaaacccggggcgcgagcccgggcggagcggccgtcggtgcagatcttggtggtagtagcaaatattcaaatgagaactttgaaggccgaagaggagaaaggttccatgtgaacggcacttgcacatgggtaagccgatcctaagggacgggggaaacccggcagatagcgcgatcacgcgcgtcacccgaaagggaatcgggttaagatttcccgagccgggacgtggcggcagacggcgacgttaggaagtccggagacgccggcgggggcctcgggaagagttatcttttctgcttaacggcccgccaaccctggaatcggttcagccggaggtagggtccagcggccggaagagcaccgcacatcgcgcggtgtccggtgcgcccccggcggcccttgaaaatccggaggaccgaataccgtccacgcccggtcgtactcataaccgcatcaggtctccaaggtgaacagcctctggccaatggaacaatgtaggcaagggaagtcggcaaaacggatccgtaacttcgggaaaaggattggctctgagggttgggctcgggggtcccggccccgaacccgtcggctgctggcggaatgctcgagctgctcgcgcggcgagagcgggccgccgcgtgccggccgggggacggaccgggaacggccccctcgggggccttccccgggcgtcgaacaaccgactcagaactggtacggacaaggggaatccgactgtttaattaaaacaaagcattgcgacggtcctcgaggatgctgacgcaatgtgatttctgcccagtgctctgaatgtcaaagtgaagaaattcaaccaagcgcgggtaaacggcgggagtaactatgactctcttaaggtagccaaatgcctcgtcatctaattagtgacgcgcatgaatggattaacgagattcccactgtccctgtctactatccagcgaaaccacagccaagggaacgggcttggcggaatcagcggggaaagaagaccctgttgagcttgactctagtccgactttgtgaaatgacttgagaggtgtaggataagtgggagcctccgggcgcaagtgaaataccactacttttaacgttattttacttattccgtgggtcggaagcggggcaccgcccctccttttggctccaaggcccggcctcgccgggccgatccgggcggaagacattgtcaggtggggagtttggctggggcggcacatctgttaaaagataacgcaggtgtcctaagatgagctcaacgagaacagaaatctcgtgtggaacaaaagggtaaaagctcgtttgattctgatttccagtacgaatacgaaccgtgaaagcgtggcctatcgatcctttagaccttcggagtttgaagctagaggtgtcagaaaagttaccacagggataactggcttgtggcagccaagcgttcatagcgacgttgctttttgatccttcgatgtcggctcttcctatcattgtgaagcagaattcaccaagtgttggattgttcacccaccaatagggaacgtgagctgggtttagaccgtcgtgagacaggttagttttaccctactgatgaccgcgccgcgatagtaattcaacctagtacgagaggaaccgttgattcacacaattggtcatcgcgcttggttgaaaagccagtggcgcgaagctaccgtgtgccggattatgactgaacgcctctaagtcagaatccaagctagcaaccggcgcctctgctcgccgcccgccccgacccacgttagggcgttcgcgccccaagggcccgtgccattggctcagcccgcccggccgacgcgccgcggcgggccgcctcgaagctcccttcccaacgggcggcgtgctgaatcctttgcagacgacttaaaacgcgacggggcattgtaagtggcagagtggccttgctgccacgatccactgagatccagccccgcgtcgcacggattcgt

SEQ ID NO: 1322 - DNA, 4420 bp, Zea mays
caagaacactgttttcacttatagagcatcacccctttacgtaatgcttggcgtcatgataatcaacaaatctcaccagtttgccgtccgcaccatagccgtccgcaccacggcgtcagactcagacccttcacattcccagttccctctgcgccccgtaaaccctagccgcgattcatggcccgcaagcgccgcgcgccttcgcctcctccgcctccgcaggaggagtcgtcctctgaggaatctggctccgaagagttggaggagcctcctcgcctccccgagctccgtagtcctccgcaggccgcggccaacaacgccgactcgtcggaggcggacacggactccgacaccgacgctcaagctttccagatgcgccaggtgccccgctccctcactaagcatacgcatccagttccccagccagaatccgatcccgaagaggaggagggcgagtcatcggagtcggagcatgagaaccctgtgcctgtggttcagaagaaggctgcggcggcggccgtgttgtccaaggcagagcaggaaaggaagagacccccctcggatcctgctcctaccgggaaggcaaaaaagatgaaggctgtggctacccctcttgccaaggcgaagaagggcaaggccgagctagagaagccggcgcctgaggccactccagcaggaaatgcaaagaagggcaaagctgagctagagaagccgacgtttgatgccattccagcaggaaaggcgaagaagggcaaggccaaggaggcagctcctgaggccacgccctcaggcaaggggaagaaggatggggacaaactagagaagtcagcagcgctagatccctcacattcagacagcaagtctgagaagcctgtgcgccccacatgggggaaagatgatgagatgaagattttggaggcccttgctgcgcatgtcaagcgtgagggtgagctgccaaagactgatttacttcttgctagtgttcgtgaccacctcgtcaggaagaactgcacctactcagatatctatgagaaggtgcgaaggctaaaggaacggtacaagaaagcagcgagcacgggcattgtgccaagtaaagaagatgggctccagatgtataatctctcagaagcaatctggggagagaaggcaatggaggctgctgctgccgttacgtctcaaaagggtggtgctgttataaagggtaagaagggccaggctaacaaagagaagatgcttgaaaatgcaaagagtgacgtgacaaaggagtctgcccctagtactgccaatcaaagtggtgattctcagaaagcaagtaagaaggggcaagccaggttgtcagaggaggctaccaccactgcctccccaagtaagagtaagaagcaggaaagtcacaatggggaattaaacaaagatgatggtaatttggctaagggaaagaaggggaaaactgacaaagggaagatggacatagatatggatcgtctgacaccaaaggaacccgtaaatgcaaatcagaatggtggcattgtgattaggagtaaggaaggagaaataaatgatgagggaacagaaggagatgctaatgtgcaaggtgtgcacagacgttttggtgagctccagaagttgtattccaaccttgctgtttatgtggaggagattgagacccatcatccgtgcggggaaactctgaaaagagtatttgagttcattgctgatgagaaggcagaagatctggaatccaagatcaagaagctaagagtagcacaggcgaaggcggaggtccgtcaagggaacataaaaaaggaggttcttaatttgatgctcagcttagtggactaacctttctgaattaatgtggtataacattcttcttacttgagttattatttttcttgatgtctagtgtactattattgttcaatttgtagaattcatagctctaaaacttggattccacatctgaactaatgatcgaaatgttatattcctctgcagtaaaatttgacatatatgcaattgaaatttgatgtaactttatcacatatctctagaagtagccgcctgaagcatgcagattgtgtgggagttcgatttcacacgtgtgaaactgcacttgtctagtgactacaggggacagcaaaagttgtcacagatggtacaagaggcacaagatcgacgtagcatctcatgaattcttcccttatttaaatatttagattcagctttagtgaaaatgtgtagttcttctctagattgcaactaatgttgtggtcagatttaacgcaggaataattagttttggagttggtgcttactatgtacatacaatatggctctggcaattatttaaaagtattaattaataactactgtatctagaattctagatgaatttgtagtgtagaatttcctaataggttctactgtatttagattcaactcaggatcaggaataatcagtttggagttggtaatagctatgtgtgtacgatgttgactaatgctttcttaaatggctctggcatttgtgtaaagtatcaactagcgtatcagtttggagttggtactagctacgtatgtacgatgttgactagtaatgctttcttaaatggctctgacatttgtttaaagtattaactagcatatcttcttgtaacattgattttcattacttagactgatgtcactggcataaacatttgaacatatatttcacattcaaagtagcttgtatcacagtagatcagttcagtgagtttatgaccgattagagatcaatttcaatggtcgtttcattaagtttacttagatgagcaacaattaatgttgttagcagttgatcactaagatattagttttgttgaagggacttgagtcctcaactgcagtggataaaaaaaaaatctctgctcagaattattgcccaaactaggaacttatacatgaataagattgaggtttagcgcagagatgtgttctgagcctcttgcaacatgatggtcttaacatataaatgatttatgagttcaatttgtttttgtgatatcattttgatttgttacatagaagataataaataccttaatttcctaatcctcttaaggactctcctcatcatttgagaccaacttgaaactacataaaaaatggatccaactcaatattacatctgaattttactcaaccacattctgctataacgggttcatgtagaactctttatgtagagatgtctatttaaattgtattttcatgcacattgcatttctgttttcttttactttttatgatattccattgtgtatgcacttatatgagtattgtttattggttataatcagatgggcggatagaagatttgatcaacaaaaggtgatgtgtgttgaatttatgggaaagatgcgagcagtgagcatattttgcaatttcatggtggtgagcattagtgatacatatttgtattttcttctaagctactgcttaagctgttgatcctgctaatccctacatctgagctagcatttagctttagcatgtatgcttaatgcggtgctaaattattggaaactcctttcattgagttttgacatgaaaaatctttgttaggtccagcactccagttaatgatgcaagtagttttgttctgttatcattcccctgtagatttttctatttttagtgtaagtttgtatctgttatcagggtaacgtggtttgtccctgaagtctgaactgagaactgaatatgcatgagttctcaaaccagtttgcttgaattgatctgtgtggttgcgattgatgtatgtcattgctatgcaaatcttgttgattgatattctactcatatattgagctgaaacttgattgggcattcgtagctaatagcgttgtctttcgtatcaaagttgtgcacgctgaaatggactgaaggagtggactgccaggaggaaaaagggcagaccgtaatttcaggaaaccaagcaaggggctactgttggggttagggagaaggtacctcacctaaggttcatcttaacataagccattgtttaaacaaactttcaagattgaagcgtatggaaagagctttgaatcaagacgaagctggtcaatgagaggtcgaagctaggaggcgtcgccgaaggagatacatctctaggacatgtgaatcttcagtaaaggggaacagaacaagaaggtcagagagagaaaatgtgtatgatatttcatgcaattgtatcccctagttctaaagatattagtaggaagggcattcttataactttatgaatagaggaacaataccgctgctatagggattaggcattttgtaatctcgtgtctacatcttcttccgatagagctacttgtctcaatagatcttccgaaggtataacgataatgaagctttattattagca

SEQ ID NO: 1323 - DNA, 1397 bp, Zea mays
cgtcaagctcatcttctcccctctgatttttccgccgccttcttccgatgcttatcagccgccggtgggatatttttcctggccgccctgatctttatctacgcgcgtcgttctcttctccaaccggccagcaatccagttcgttcggtgcctgctctgctcgacgtttctctgctccagcgtccagcctgcaagcagccaagcttcctcgcgtctcctatggtcgagcgccctccccatctccttcctcgccctcagctcggaccgtgtcctgctctcagctcccttgccgtggagttctctgtgtacgttctggttcctgctccctctcctatggtggccgcgagctcccctgccccatgatgccgtcgccctcaagctcgtgccccgctcgccatggccgccgtcaagttcctccctgaagcttccctgcgcacggatctctcctttcccctgctcatcttccccgcgcgcgcctgctctgtccatggccgcgtccagcctctccagcacccggccggatcttccatggtgcgcgccacctgctcctccctgccccagccgcgttcgaccaaacgttcctgcgccctgctcgctccctggagcttcttcctgcgcacgcgccgtgctctcagcttggaattcccccgttgttcagctcatcgcgcccggctgtttctcccctgcgcgcagctgtgccctctactcggattcctgttggccgcgccccctgttcctccgggccggtcaagttctttccggccgcgagctctctcatgtgcgcgttcagccgaggctcctgctccccacgcgcgtccctcggtatctgctcggatttcggccctgcccagctgttcctcctctctgctcgctctcctccatggtcgttgtgggctcgccggcgtggtccctgccctggccgccgtggtggcgcgcgctgctcccctgagctctcctctgcgcacccggcctccaactttcctcccatagcgccctgctctgtttactgctcgtcgctcgcttggaatccttgctggcgctcagccccgttgtgcgcagacgaggttgcgtcgtcaagctcgtcgaacctcgttcttctctgctcgatctcgtcgaaccccgaatccagatattagacaaaaataagtgaggtctctgtgtatcgcttatcaagtactcgattgaagacttcaatcgaagatcgtcgccgttccgcgcgtcatcaagaatcccaagaatcgggtgaagacgaagctagcagcgcgatattccccaagcgctcgacaattgcctggatcggaaaatcactaccgatctcgcggattcgagtcagctattgaaacggtaagctgataaattatccaaaatagttcgatcgttgcataaattgatgtgct

SEQ ID NO: 1324 - DNA, 591 bp, Zea mays
atggccgccgtcaagttcctccctgaagcttccctgcgcacggatctctcctttcccctgctcatcttccctgcgcgcgcctgctctgtccatggccgcgtccagcctctccagcacccggccggatcttccatggtgcgcgccacctgctcctccctgccccagccgcgttcgaccaaacgttcctgcgccctgctcgctccctggagcttcttcctgcgcacgcgccgtgctctcagcttggaattcccctgttgttcagctcatcgcgcccggctgtttctcccctgcgcgtagctgtgccctctactcggattcctgttggccgcgccccctgttcctccgggccggtcaagttctttccggccgcgagctctctcatgtgcgcgttcagccgaggctcctgctccccacgcgcgtccctcggtatctgctcggatttcggccctgcccagttgttcctcctctctgctcgctctcctccatggccgctgtgggctcgccggcgtggtccctgccctggccgccgtggtggcgcgcgctgctcccctgagctctcccctgcgcacccggcctccaaatttcctccca

SEQ ID NO: 1325 - DNA, 1777 bp, Zea mays
gtccgccgcctcctctctccgcacaggctcaccaaacgacgaacactctccctcgacccgtgaccgtgagcaagcgggtggcgacggcgcgcggccggccatggtgagcgagagcaaccgcggcggtgcggaccggacgacggcggcgggggaggagcgcgggcagctgctgttcgacgtgccggagatcaggttcaccaagctcttcatcaacggatccttcgtcgacgccgtctcaggccggacgttcgagacgagggacccgcgcacggggggcgtcatcgccagcgtggcagaagctgacaaagaagacgtggacttggcagtgagggcagccagggccgctttcgaccacggcgagtggccacgcatgtctggatccgaacgggggcggatcatggcgaggctggccgacctggtggaggagcgcgcggacgagctggcggccctggagagcctggacgccggcaagcacccggccgtgacccgggcggtggacgtcggcaacgccgccggcagcctgcgctacttcgccggcgcggccgacaagatccacggcgagacgctcaagatgccgggccagttccagggccacaccctgcgcgagccgctcggcgtcgccggcgtcatcatcccctggaacttcccgtccaccatgttcgccgtcaaggtggcgccggcgctggccgccggctgcgccctggtcgtcaagcccgccgagcagacgccgctcagcgccctgtacctcgcgcagctcgccaagcaggcaggggtcccagacggcgtgatcaacgtcgtgccaggcttcggcccgacggcaggagccgcgctggcgtctcacatggacgttgacatggtgagtttcaccggatccacggaggtcgggcgcctcataatgaaggcctccgcggagagcaacctgaagcccgtctacctggagctgggcggcaagtccccgctcatcgtcttcgacgacgccgacctcgacatggccgtggagctcgccgtcggcgccagcttcttcaacaagggagaggcctgcgtcgccgcgagccgcgtctacgtgcaggaacgcgtctacgacaggttcgaggagaggttggcggagaggatgaggagctgggtcgtgggcgacccgttcagcgaccctagcgccgaccagggcccgcaggtggacaaggctcagtatgagagggttctgagctacattgaccatggcaagcgagaaggggccactcttctgactggaggaaggccatgcggtccggaagggaaaggctactacattgagcccacagttttcaccaacgtcaaggaggacatgatcatagcgaaggaggagatcttcggacccgtcatgtgcctgatgaagttcaagacggtggaggaggcgatcgcgagggcgaacgacacgcggtacgggctgggggcgggggtggtgacgcgggacctggacgtggcgaaccgggtggtgaggtcggtgcgcgccggggtggtgtgggtgaactgctacttcgccatgggcagcgactgccccttcggcggccgcaagatgagcggcttcggcaaggacgagggcatgcacgcgctcgacaagtacctggccgtcaagtccgtcgtcaccccgctccgcgcctcgccctggatctgattctctttaatttctggtgtcagtcacccacccacaacacatatacagcagtggtcaaaagatatttatttattgataataaagtagctagctatattgtgcggaaatccttgtagctagtcagct

SEQ ID NO: 1326 - DNA, 1745 bp, Zea mays
cactcgcaccgcacccaagaaaaccgccggctgccttgcaaaacagccaacctcacagctcacagtcacactagcgttgtcctctcgcggaagcaaaggcctgctggggtgcgcgtgtccgtccgtgtgcgcgggcgcgccacagccatgacgaaccaggacgtggtggtcccggacatgggcattgcggcggctgcggccttgccgccccccggcctcttcgcgtgccgcggcgtcgcgggggccgtgtcgtcgctgcggggcacgtacggcagccttggcctccccggcggcgccgccgccgacggtggcgagttccgttcccccgtggcggcggcggcgaatgcgccgccgggtcggaccagctgcaccagccgggtcgtcgaggccatccgcgcgtcgtcgcccgcccgctgccccgccgtcgacgagtacgacgcgtggacgaggaagcacccgtcggcgctgggcagcttcgaccagatcgcggcggcggctaaggggaagagggtcgtcatgttcatggactacgacggcacgctctccccgatcgtcgccgaccccgacatggcgttcatgacccccgagatgagggcggcggtgcgcaacgtcgcgaagcgcttcccgacggcgatcgtgaccggccggtgcatcgagaaggtctgcagtttcgtcggcctgccggagctctactacgccggaagccacgggatggacatcaaaggcccaaactccaaggaggacaagacggtcctgctgctgcaaccagctcgcgagttcctgccggtgatcgacaaggcttacaaggctctggtggagaagacgaaggacacgacgggggccagggtggagaacaacaagttctgcctctccgtgcacttcagatgcgtcgacgaaaagagctggagctcattggctgagaaggtcaaggccgtgctccgggacttccccgagctggagctcaccgagggcaggaaagtcgtggaggtccggccgtcgatcatgtgggacaagggcaaggccgttgagttcttgctcaggtcgctcggattcgacgacgaccgcaccaacgtcctgccggtgtacatcggggacgaccggaccgacgaggatgctttcaaggtgttgagggagagaggtcaagggatagggatccttgtttcgaaatgccccaaggagactgatgccacctactctctccaagatcccactgaggtcatggagttcttggtccgtctggggcagtggaatccactgcgatcaccatcgccggcggcgcgcccaagggggcgaaagcagtaacagacgacgacaacaacagatcgctaagcgtgtttaatttaattatagttagttagttagtttattaattgttgcactactctaggagtaataaccctcctcgacgatctacatacattaccccatcgtctcagctcagctcccggccccagatgtgaactctggccggccaacctgctgattgtgttcgatcagacgttcttccatatgggttttagaggcacaggcaggcatccatgtgcaaagctgcctgccgcctttgattagcttaacccaggaaggttcatctgctgtatgagttgtgtagtgactacctagctatgaccttagcagcttaattattagcccgtctactgtaaaatgtaacatataagcaactggcagaattttaatatgcacttcctttgctctgaggacccaacctcattgcatgtgctgtgttg

SEQ ID NO: 1327 - DNA, 1652 bp, Zea mays
atgccttaacgaataacacgattcaaaatctttccccccttgttgcctgttgtgttcttccacgttctttgccaaattccggcttccttttccatgcccaagcatctcgttatccaagaccgtgacaagcaccacggcaccagtccgcgacaagtcaaccaaacgaaccaaaggcagagctgaacgcgaaagggagggagctcggatcggatgcggcggcgcgcggaggtggccgtggtgggcgcgggcgcggcggggctggtggccgcgcgcgagctgctccgcgagggccacaccgtgtccgtcttcgagaagtcaggccgcgtggggggcacctgggcgtacagtccgcgcgcggacgcggacccgctgggcagcgacccgggcgcccccggcgccgtgcacagcagcctgtatgcgtcgctgcgcaccaacctgccgcgcgagctcatgggcttctcgggcttcccgctggccgggcgggcgttcgccggcgatccgcgcacgttcccgggccaccgggaggtcctcgcctacctcgacgccttcgccgcggattccggcgtcgccccgcacgtcaggctccgagcccaagtgctgcgggtgaggccgctctgtccgggtcggggacagggggagaagtgggcggtggcgtggcgcggggaagacggcgacgtcgcggaggaggcattcgacgccgtcgtcgtctgcaatggccactgctcggtgcctctagtgcccaagatccgaggaattaacaagtggcggggaaagcaaatgcacagccacaattaccgcaccccggaaccattccaagatcagagtgttgtagtcgtaggattgggagccagcggaatcgacatcgctagagaaatctcacacgtggccaaggaggtgcacatctcagctagatactcggagggcaggctcggaaagattgaactctatcataacgcctggatgcacagcgagatagagtgcatccaagacgacggccaggtgcgctttgccgaaggctcatctgtggctgcagacaccattctttactgcacagggtaccgctaccattttccgttcctggacctggatgggttcaccgtcgacgacaaccgcgtcgggccactgtacaagcacgtcttcccacccaagcatgcacccaatctctgtttcgttgggctgccatacaaggtaggagacctaaatggatatatgcacatcgtcgaaatcgaagccatctggtctagtcgactactaattcagagagcaagatttcttgcgtgtgcttcgcagagcatcatcttccaggcactagagctggaatccaagtgggtcgccgccgtcctgtcggggcgtgccgagctgccggtggaggaggacatgacggccgacgtggaagaggagtaccagcgcatggaggacgccgggaagccgaagcgccacacccacacgctgtggcctcggtgggtggagtacctgaactgggtggcggaccaggtcggcgaggcgcacctggagcctaggaagtgcgagatgtatgagaaggcgctcaagtgcgtctggtccctggacgagggctaccgtgatcgatgggaagaagaaagcattggcagtggctgaggctcccgaattttttgtttttgagtcctttttgt

SEQ ID NO: 1328 - DNA, 3000 bp, Zea mays
gggcgcatgactgctcgctgtcctggcgacctggccacttcgcctatctgcctccctccctccctcctcgaataaaaacttgcgaggaaaatgtgaagaccccacgcgacccaacagcagacccacagggagtcagagatactgatcggaggcggtgtcttctacttctagccgcaaccgcaggccgcacgcagccccaccgctccgcccgtccatcctctccaactagtggcagcgcggtggcaaccgctcacccaccactcctcccccaaatttccccacaatcatagctctgcacgttagggagcgacgccgacgcaccaaaggaacgaggggaggccagggaacagcagatacgcaagcgccggaatgctgggctccaagacgaaatctggctccgccgaggcgaagagcaacggcaaaccggacaaggagaagaagggcggcggaggcggcacgccgccaacccccaaggacagcaagccgcgcaagccggccgtgcccaaggcgagcgccgccggccatggcacgccgcgcgctgctgacaagtcccccggctcggggtcggccgaccgcaaggcgccaacgcccaaggccgccgcctctcgcctcgctacgactccagagaaggggaagcccgcgaagccgccgcaggagcagcacgcgcagcttgccgcgatccgagaagagctcgtgaaggccaaggagcagttggtggagaacgagaaggagaagtgcaaagtttttgctgagctggagcgtgccaagaaggtggctgatgaggccaatgccaagctgcaggatgcgcttgatgtgcaaaggagggctattgaggcgcaggaggcagacaaactccctgccagagagtcggagcaggcaagcatccatggccagcaggaggctgatgacgctgtgctgcggtcgacagtggagcagctggagaaggccaggtatgagctggccgacgcaatcgatgccaagaatgaagccctcagccaggtagatgatgccgttagggcttccgaggtgaaggcccaggaagttgagcatctcactgtagaggttacgcgcctcaaagggctggttgattccaaggtggatggcaacaggaagaagactgcagagaggattcagaatcttgaagaagagaactttgcattaaagcttgagcttgagaaaaaaaaggctgctgaagaaaaggcagttcgattggagcgcatgattgatgaacttaagagtgatgttgatgatgctaggaattttggttccaagtcaaagcagttagctgacgaatggcagaagaaggcacagcttctcgaggtcagattggaagaggctgatcagtctaatattttgaagggtgaatctttgaattcagcaatggaagaattggattcaacaagtagtttgcttcgtgacagagaatctgaagttgctgctcttcgtgacaaagtcaggttcttggaggatgagctgacaaagctcaagagtgatattgttgtgtccggccaacgggcagatgcagcagagaaagagacgacggatctatggacagagattgaagggcttaggctgaagctccatacagtggaagaagagaaaatggaggccttgaacagtgataagaatactagctcagaaattgagaccttgaatgaacagaagaaccagctggctgacgagcttgaggctagcaaagatgagcttgagaaaattaagaaggcaatggagggtctggcctcagccttacaggaaatgtcagctgaatccagagaggcgcaagaaaagtaccttctgaaacaagatgagatggagcgtgctcaggcacaggtagaggagcttaacttgagtctgaagaatattaaggagaactatgagctactgcttgatgaggcaaactatgagaaggtttgccttacgaaagcagttgaaagactggaagcagaagctaagagagcgcatgaggaatggcagtccaaagagctaagttttgtcagctctattaagaattcagaagaagagatagtcgctgtcagggttcaaatggacaggaccttggaggttgttaaggagaaagaaaatgaaaacacagagttgcaggagaagctgcagcagcttgaatctcagctaatggaagcgaacagaatcagagaggaaggcaacactgaaactatccgatggaaggagaacatattagaccaagagaatgaattacagaacataaaacaggagaatgacgacctgcaggcaaaggaatcagcagcttctgagaagattaaggaactctcttcccagcttactaatgcaaaagatggcacgataaatagtaacaccaaggatggagataatgagaaggggggcactgaagaggatgatgaacctgttgtagtagttgccaaaatgtgggagaacagcaagtttgctgactatgattcagctaaggaggagaatgatggcgactcacaggttgatttggaatcaaacaagggggatgcaggtcttgacagcaatgggttgcactcaactaaggagaacagtggcagggcatcaccaactaaacagcaccagcagtataagaagaagcctttgctgaagagattcggtggtctgctaaaaaagaaaagcgaaaattagcataaaaccggctgatgatattctttgttctatcatttgacatttctttgattagatatctagttcccgagtcttcccccatattatggtaaactaagtgatggatgcttcaaagaatacaaaatgtcgactttatttacataattgcctctcttgagttagggagtgttcgcagttcagttcagctgtctggtgtgagctgtctgctgtggaaaaactgttgtgagctaaactaaaagaaagtcgtttggttggagcttcggtgaaacattagatttttttatgatttatctgtattgcttctgagattgtttatatgcaaatgaccgtaatagaacgatttttgtgttgactgatgtgtgtttg

SEQ ID NO: 1329 - DNA, 1630 bp, Zea mays
taaactaattatttatctcgcaggctgctcagcctcctgcctcctgccgacccactacaaatggttaataatacgccacgtcaggcgggaatattcaagcattaaaaagtcgggccagcaagaaagaaaaaaaaaccacaacaagagagagagagagagacagagagagagagactgccaacgaggcgaagcagccggccaatctagcatcagcgcgcggggtctgagagcagagcggcagggcgccatggcggcatcggtggcgctgagcagcgggcaccggatgccggcggtggggctgggcgtgtggcggatggagaaggcggacatccgcggcctcatccacacagcgctccgcgtcggctaccgccacctggactgcgccgctgactaccagaacgaagctgaagttggtgacgcgctcgcagaggcattccagaccggactcgtcaagcgggaggacctgttcatcacaaccaagctgtggaactcagaccatgggcatgtgcttgaagcctgcaaggacagcctgaagaagctgcagctagactatctcgacctctacctcatccatttcccagtagccactcggcacaccggagtcggcacgacttctagcgctctgggtgacgatggcgtgctggacatcgacaccactatctccctggaaacgacatggcacgcgatggaagagcttgtttccatggggctggtgcgcagcattggaatcagcaactacgacatcttcctcaccagagactgcctggcctacgccaagataaagccggcggtgaaccagatcgagacgcacccctacttccagcgcgactcacttgtcaagttctgccagaagcacgggatctgcgtgaccgcgcacaccccgctgggtggctccaccgccaacgccgagtggttcgggacggtctcgtgcctggacgaccctgtcatcaagagcttggctgataagtacggcaagacgccggcgcagctcgtcctccgctggggtctgcagcgggacacggtggtgatccccaagacctccaaggtggagaggctgcaggagaactttgacgtcttcggtttcgacatctccggcgaggacatggagaggatgaaggccatcgaccggaagtaccggactaaccagcctgccaagttctggggcatcgacctctatgcttagcttttagttcggttgcgttgcgtcgcgtactcgcgtgctgcgtctctcggcccccccagacaagacagcatcaataatgaggataccctcagacggcatcagtcaaagtcatgaggatctcagacagcatcttccatcacatgtgacggtgtgaggttgatggtagggtttggtatccccacgtgtccctctctctttcagctcagctaatcatcaccatgtagactacgcagtgtttgcctccgattatttactgtttttcttccttacaaatccgtacatatctttactggtaggttgaacaatttgctgacattttttttttgcaaccgcgcctctgcacgttttttattaagaaagaagagcaaaactgagcggtacatatataggtcattaattcataacgaatgctcacgagtcacggtcacggccgctattctatgagca

SEQ ID NO: 1330 - DNA, 2679 bp, Zea mays
acgacaactaataggaaaccggagggagtacatcataaaatgtctgcgttatatgggcaattaaaaaaaacgttgactttgagacgagacagtagtacaactaactcgaggtcccacctcttaaaaagtctgccccacttgcttacgcgagacgcgacaccaatacgccatccactgatccacctcgccttctgcttccttcagcggttccgcccatcgactcgacagatccttgttcacgacctcaccctattcagatcccaagcggccacgcccaagcccaaaccctacccacccatctcaagttctcaaccagcgatgatggcagcggagccctcgccgtcggttccctccaccgccgctgaagacatggaaaccctcgccctcgactcatcctcgtcgtccgccgccgctacggcctccgcctccgaccccctccttcggccacctacctccccgaccgccgccgcgagcgacgaccccttcgtcatcgacgacttcctcgacgaggacgacttcaccgccccgccgcccagcgtcgccggcccgccgcccgccgtgcttggcgatgcggcgtccccagtgttccccaagatcaccgtatccgatcccaagaagcacgccgagcctagcggcgggggtgctgccggtgtgatcccagggtccggcagctacttttcttacctcatcaccacacgttttgcgggcggcggtggggaagtccgcgtgcggcggcgcttccgcgacgtggtggccctcgcggacggccttgccgcagctcaccgcggcctatttgtcccggcccggcccgacaaaagcgtcctcgaggggcaggtcttgcaacgccacaacttcgtgagccagcggtgcgctgcgctccagcgttacctctgccgccttgccgcgcaccccatcgtcggccagagccctggtctccgcacgttcctcacggagcctggtgccatccccgccttccagagtgaggcaccgcggtactggacaaccacggtgaatgctgctgctccgatggttcagatgaaagctgggagggacttgtttgggatgtttaagggtctcaagcagacgatggtgaatgggatggttgcaacaaagcctccacctgtggagcaggagacagatacagagttcctggcgcacaaggccaggttcgaggacttacaacagcagcttaccacaacatcacagcaggctgaagcgctcgttaaagcccaagatggttatagagaaactacaggtcacttgggaatgacattgattaagctggcaaaatttgaaagagagcaggcaacatgtaactccctaagaagacggtctggtgaaatccataactttgcaaattctgttttgaagatgagcaggtcacagataaaattgaactctgaaattgtgaaacacctgggtagtatccatgaatatttggagatgatgatatcagttcatcatgcatttacagatcgctctaatgctttacattacgtgcaaattctgtcagcagatttgttttccttgcatatcagggcaaggagacttgaatcgtcgtcagcaagagatatggggcacgagtggtcaacatatcagaaagtagaggggttgaaagaaacaataagatcagcggaagcagccaaaagtgatgcagttagagaatatgaaagtattaaggttagttgcctgaaacaatgtaataataatgttccataaaaaactaaggagcttgaacttacctaggaaaattacgtaaacatacaccgaatggtattaggtgccgaaaaagaagtgtgcacctcttaccttctattgttgttgtgccatgattttaatctttacatcaaattagcagatatggcaaattcagcataagggcagacctagtaccggaggctccagaggcttggggtctggagaagggataaattgaggcaagccttccctcgctaatgtggagatgtttattaaacccgcgacctagctttactattcacatcaaattagcacatctagcaaaatcaatatgacattattaaatttatgtgcatagatcaatatggattagaagaaccgatgattcataattctaattgaaagaaaaacagatagtaacaaacacaccccttagggcatgtgcaaacctgagcccctacattggttttccaagtataagagacagttaaaataatgcatgatacaactgagcttttagatcataaatacagttaagagacagtatgtatagaaagtcgtgaagacgtctcttgattttttttacttatccccttagaaaccccccccccccccccccccaattaatggagttgccctaggaaaagaaaccctgaaaaaaatcttgaatccgagtatctgacagatcactactaaatccaacaaggcaaagaagacgcatctgctgagtatccgtgagctcctcaattgtttcttgatttagtgcccctcagtgtgaccagttgtttgttctctcacccctcactggtcaattctgatcaactgatttgctaaaagattggaacctgagctccctgccacagaattacatgttgagaatgagaggcatccgcgtgtgaggtctcgtgctgtggtgggagcatgggtggcttctgtgcctgcataaagtgcgcacatggagggtgaggttatggactggac

SEQ ID NO: 1331 - DNA, 2124 bp, Zea mays
gtagtagcaagcagcaagctcgcgtctggtgcgcctgcctgccactagaactctacttacctctaagcgcggcgcaataatgggaggaggagggacgctgatgctggaccagcgcttggcggcggatgacaaggtcctcttcgggttcccggcaggcgagtgcttctttggagagggtgacctcgccaacccggcgccggcgaccgaggagatgactatgagcttcctccccttggatgcggacgagatgatgatgagtgacgacgacgatgtggacggcgtcgaggagctggagcgccgcatgtggcgcgaccgcgtgcggctgaggcgcctcaaggagcagcagcagcagagcggccgcccttccggcggcaagcacgaggccagccgcagcaggcagcggcagtcgcaggagcaggcgcggcgcaagaagatgtcgcgcgcgcaggacgggatcctcaagtacatgctcaagatgatggaggtctgcaacgcgcagggcttcgtgtacggcatcatcccggagaacggcaagcccgtcaccggcgcctccgacaacctccgcgcctggtggaaggagaaggtccgcttcgaccgcaacgggcccgccgccgccgccaagtaccaggcagacaccgccgccgcgggaggcggggccgcggacgggtgcggaggcgccgacgcggaaggccagcatcactccctgcacgagctgcaggacaccacgctgggctcgctgctctccgcgctcatgcagcactgcgacccgccccagcgccggttcccgctcgagaagggcgtgccgccgccgtggtggccgctggccgccgtgcccggggacctcggcccaccgccgtacaagaagccgcacgacctcaagaaggcgtggaaggtggccgtgctcacggccgtcatcaagcacatgtcgcccgacgtcgacaaggcgcgccgcctcgtccggcagtccaagtgcctgcaggacaagatgaccgccagggagatcgtcgcgtggctcgccgtgctcaggcaggaggaggagctctacatccagctgcaccctggcgcccgcccggcgccgtcctccgccgccatgttccccttctgcgccagctccggcgagtacgatgtcgacggtgaagacgacaccggccggaaccagcagccaacctccaaccccgccgccgcagcattcctggacctttcgtcgtcgttcatggacgatgcgggccacaacaaattcgtcgtggccgagcccgcgccgccgattaagcaggaggccgccgacgccgtgttcttccagaaaagaagcgcgccggccgccgccgtggagccggagctgatgctgggcggcagcttccgccgcgcctacacatgcggcaacgtgcagtgctcgcacagcagcagcgcgcatgggttcctggaccgcaacacgcgcaacgcgcaccagtactcgtgcatgttcaacaacagcgtcggccagacggcggcgcttggcggcttggacttggatttgcccctggacggccagaggtcgctcggggagctgatggacatgtacgaggccaacgtgggcaacgtggacacggccgcccccggccccgaagtgcagctgcccggtccgttcccgacgccgtgccgatttggcgacatcatcagcaatgtgatacagcagagcgcagcggcggcggtctacgtccgtgacgacgacgcgcagttcggaggcgacatcgccgccgcgtcaccggggctgaggttcggctcaggcctggacgtggcgggaggcggcgggttgcagcagccgcacaagtccacgggatccaacggcagttggttctactgactgcgcatgcggcagaatcatggatggaatggacaatggaggttggatattagaattcacgagtagacgacgagatcgtcgtgagttttctccagtctcgtatttaagtatttgtataagcctgcaaatataatgggcaatggctgatgccgccgtccagacccagccatgaaccacaaaatcgtaatgggagcttccatcttgctcaacctattagaactaaataaaaagtctcataaaatactaacttttgcccactgattagttatcaactaacttgttct

SEQ ID NO: 1332 - DNA, 2354 bp, Zea mays
agcagcacacaaacacaactaatggcatcctctgcacacgccttgctgctaacattgctcattgccaccgccgtcctctctacagcacctgcgctctgctacgtcagtccgggctcaaacctccaccatgacaagcattctgcaccagggtatcggacccatatcgtgctcgtccggccaccgtcggatgcagaagccgccgacgaatccgcccacaggctgtggcacgagtccttcctgcccagctccctgaccgactccgtcgagccgcgcctcgtccactcctacactgaagcgttcagcggcttcgcggcaaggctgacggacgccgagctcgacgcggtgaccaagaagccggggttcgtgcgcgcgttcccggaccgcacgctgcagcccatgaccacgcacacgccggagttcctcggcctgcggcagggctccgggttttggagagacgttgccgggtacgggaagggcgtcatcgtcgggctgctcgacgtcggcatctacggagcgcacccatctttctctgaccacggcgtcgcgccgcccccggcgaagtggaagggctcgtgcgcgggctctgcctcccggtgcaacaacaagctcgtcggcgtcaggtcccttgtcggggacgacgccagggacgactttgggcacgggacgcacacctcgtccacggccgcggggaacttcgtggccggtgcctcgagaaatggcttggccgccggcaccgccgccgggatcgctcccggcgcgcacgtcgccatgtacaaggtgtgcactggcgccgggtgcaccgactcggccgtgctggccggaatggacgccgcgatcagggatggggtggacgtgatctccatctccattggtggcaacgcgacgctcccgttcgatcatgaccccgtcgccatcggcgccttcagcgcggtggccaagggcatcacggtggtgtgcgcggccggcaataacggccccaagctagcgtccgtcgtcaacgacgctccgtggctggtcactgtcgctgccagctcggttgacaggagcttcgtggcggaggtggagctgggcaacggcgtcaccgtcgccggcgaggcgattaaccaggtgaccaacgcgagcgtgaagccttcgtgtcatcctattcctatcctttactccgaggagcggcgcaactgcacctaccatggcgaggacgaacacagagtggccggcaagatcgtggtctgcgaggccgtcgacaaccttctcccctacaacacgtccgagaagtccatcctccgtgacatcaaggacgctggcgcggccggcgttgtggtgatcaacaccaaggccgacggctacaccaccgtcctctacgactacggctccgacgtggtccaggtgaccgccgccgccggggccaaaatcaccaagtacgtgacgtcgtcgtcgagcgccgcgtccgcggtcaggttcagccacaggacgttgctcggcgtccgtccatctcccaccgtggcctcgttctcgtcccgtggcccgagcaccgtcacccccggcgtgctcaagccggacgtccttgctccggggctcaacatcctcgcagcgtacccgccaaagaccccgctcggcaccggtcctttcgacgtcatgtctggcacgtccatgtcgacgccgcacgtaagcggcgtcgccgcgctcatcaagagcgtccaccccaactggtcgccggcggccatcaagtcggcaatgatgacgacgtccgacaacgtcgacaggagcggcggcccggtcttggacgagcagcgcaggaaggccaacgcgtacgccaccggcgccggccatgtgaaccccgcgagggccaccgaccccggcctggtgtacgacctcggcgccgcggagtacgccagctacatctgcgcgctcctgggcgacgccgcgctggccgtcgtcgctcgcaactcgagcctgagctgcgcggagctgcccaagacgcccgaggcggagctgaactacccgacgatcaaggtgccgctgcaggaggcgccgttcacggtgaaccggacggtgacgaacgtggggccggcggcgtcgacgtacacggcgaaggtggacgcgcccatgtccctggcggtgcgcgtctcgcccgggacgctggtgttcaccaaggccggggagaagaagacgttcagcgtgacggtgagcggccacggcgatggcgtgttggaaggcagcttgagctgggtgtctggacgtcatgtcgtgcgaagcacgatcgtggcggccggccgcagtcgttgagacggtgaaaaaaaattgtacaccccgatacaaaaaccctcttttacatcacttgaaaacagatcaaaatt

SEQ ID NO: 1333 - DNA, 4033 bp, Zea mays
cgagtgtttgtttctccagcccaacgaaacccagcagtaaacctcgaagctcctcgtctgatcgtctcgcccggcgcccgccaccaccgccagtccaccagagcagagcggagcggcagcaccccagccggcgccgtctgaccgacccccgctccacccattccaacactgcccacatccttccccgtgtccgaccgtcggctttctcctccccctcccagccgccccagtctttgcccgtggccaagcgtcgacttcctcttcctttcgtcctccagttcgattctagtgaatctgctgttgcttctccgtcgcgcgagactaagacactggagttgaaatccgaggcacgtgggaagcctctctctcaatttttttggggattcaaaagagttcccgatgcccggagctaaggtggcccaagctcctggcggccaggccaggtgttcgacgaaactcccctgagagggatctgtcatgttcttggccaaacgaccgccttggtcgtctcagattagcaggttctgcatccttcccttccacgctgttccctggatcgttttgtggacaaggcgggtgcgatacagtggcggcagcggcgataatgccactccagtggcctctgggcggctgtccaagctgttttggccggctcggatgcacgtggctgacgttattgggcgagttctggaacgggggcagtcgttggattcggtggagctggagctggagaggctccatgtcgacctggacccctttgttgtcaaccgggtgctccggagcatctcggactcggagatggcagtgcggttctactggtgggcagagtccaggcctgggtttgatcacacccagttcgcgatagcgtatgttgtcagcctgctctttgtagacagcaactttttcctgctgtcggagttcctcgagagagtgaggagtcagggggttgcattgcatcgctctctctatcggatcctcttgtcgggctatgtaagggcaggcaagttcgattctgtcatccatacatttgatgagatggttacatctggatgccgtgagtttggtgtggactacaacaggttcattggtgttctagttaagaattgctgctttgatttggtcgagaagtattatagtgtggcacttgataaaggtttttgcttgacttcattcacttattcgaggtggatatctgcactgtgccaatcagaaaggattgagctcgtagagagactccttgccgatatggataagtttggctgttttccagatatttgggcatgtaacatatatgtggactgtttgtgtaaacataacaggttgcatgatgccttgaagacgcttgagaatatgtggatcagaggaaccaatccagatgttgtcacttacacaacagttgttggatgtttatgtgataacaagcagtttgcagaagcggtcgagctttgggaagaaatggtgaggaggggcctcaaacctgatatcgttgcctgtggcgtattgatatttgggctgtgcaagagtgacaaggttgatgaggcttttgagctggcattgaggatgctgagtcttaatttagaactcaatgtctgtatttacaatgccctgataagtggcttcttgagatccggaagcattaataaagcattcaaaatcatatccgtcatgcggacaaatggttgtgagccagacgttgtcacatataatatccgtttgaaccattactgcaacacaggtatgataaaggaagctgaaaagttgatcgaggagatggaaatgagtgggattgtaaatcctgatcggtacagctataatcaaatgttaaagggattgtgcaaagctcatcaattggacagggcatttggttttgtttcagatcatatggaggttggtgggttctgtgatattgtatcttgtaacatactgattgatgcattctgtaaggcaaagaaagtaagttctgctttgaagctgttcaaagaaatgggttataagggaatacaagcagatgctgtgacatatggaactctaattaatggtctttacggtgtaggatactactacctagctgaggaaatttttgagcagatgctgaaagctcgggttgttccaaatgttaatctgtacaatattatgctccataacctgtgcaaagctggtcagtttgaacaggctcagaaaattttcttgcagatgattcagaaggaagtgtcgccagatattattacttttaacacgctcatatattggcttggtaaatgctcaagggcaattgaagctattgatctgttcagggatatgacagctagagggatagaacctgatagcttgacatttaggtatctgatcagtggcctcctagaggaggggaaagctacacaggcttatgaggtatgggaatatatgttggagaatggcataattctcgacagagatgtttctgacaggctgataagtatgtttaaatcaaacaacaagtaacaactgactgggtttcttgagagtttcagcctctaggacattttaatcatgtcactagaactcaaaggtccgagcttgtttagttgcttctaagctcatcgctgtgccggtgccgcggaacacatctttgctgattaactcgatttgatggatgcattataactggaccagacccaaaagcagacacaccagagaaacagtggacaaggtacttctgttttgaccttctgctgtatcatgctagcttttggggcagtttggtatagctcccagagcaggttccaggctgaatccaagagaagctccgccgaatagttttttaccgagaagtgattctttgctgatttcatgaagcgattctctaaaatgaactagggtgccgggagctgaataaaggtagcttctaattcacttcatgcacagaatcactatgtgcacagagtttatcctagagaatcttagggaatcaatttcagtcggagaatcatttcacacttttggtaataagctattttctataattatattgtaaccaattgttattcttgcaggtacgcatccaagattcttggttgacaaatttgatgttgctaagaaagcatgtctcaattttctcgataagtttaaggcgtcagtcgttactggtgaacaactcttaggacaaagttgtataaaggattggctgatcagatgatggatattgttgtgaatgcagtacgtttgatttctgttgtagtttttttttgtgaaaggtttctatacctgtccatttcgaagcatatttgaagtatgaaactgttataggcttataggttctgtgcatctgcaattcagatgactcagttgatctttttatgtccaacggagacctccagaagcaccaatgcgttgtggggtcctatggcgcagtagcaatgggaagagaggcaggagaaggccaaatttgatatggggagaggtagtaaaaggagacttgaaacttgaaaggatggaatatattcaaatatttagccttaaataggactataggagtgcatacaccataggaaacagttatacatgtgcctgaatcttgacttgtgatttatgttgggtttcaactctaacctacctgaactttcttgtgactaaaagacactgttgttgatggtggtggataatgcacatgtgccatttatggtgaaaataaataaaaaaagtttatgtatcaatgtgtcttttgttagtggagagtaagctctttgcatggaagcttattaatagcatgatctgtgttgttaaatcaattttactatttggggggccatgcaacctgaaatgattttacagattattgctcttcaaagggcaaagaggagaaacatggagaggtttgtgctagcatgtggtggtgagaagctggcaattcagttgatgacttgactgaagattgtctaggctgggctggtcttgtctatgagcatgttcttggagaagaagagtacacatttgtagagaatgtgaaaaaccctcactcttgtactatatcacattgtttgaagttaattcggga

SEQ ID NO: 1334 - DNA, 1471 bp, Zea mays
taatcacctcatcacaggtccccccagcctcactctcgcgccggctcaaggtacattgcgtgtcctagccaagacacgcagctcatctcagcctcacacgcacagcaagagcgaggcgtgattcgccatgggcggcctcactatggaccaggccttcgtgcaggcccccgagcaccgccccaagcccatcgtcaccgaggccaccggcatccctctcatcgacctctcgcctctggccgccagcggcggcgccgtggacgcgctggccgccgaggtgggcgcggcgagccgggactggggcttcttcgtggtcgtgggccacggcgtgcccgcagagaccgtggcgcgcgcgacggaggcgcagcgagcgttcttcgcgctgccggcagagcggaaggccgccgtgcggaggaacgaggcggagccgctcgggtactacgagtcggagcacaccaagaacgtgagggactggaaggaggtgtacgacctcgtgccgcgcgagccgccgccgccggcagccgtggccgacggcgagcttgtgttcgataacaagtggccccaggatctaccgggcttcagtttccgcagagaggcgctggaggagtacgcgaaagcgatggaagagctggcgttcaagctgctggagctgatcgcccggagcctgaagctgaggcccgaccggctgcacggcttcttcaaggaccagacgaccttcatccggctgaaccactaccctccttgcccgagccccgacctggccctcggcgtggggcggcacaaggacgccggcgccctgaccatcctgtaccaggacgacgtcggggggctcgacgtccggcggcgctccgacggcgagtgggtccgcgtcaggcccgtgcccgactcgttcatcatcaacgtcggcgacctcatccaggtgtggagcaacgacaggtacgagagcgcggagcaccgggtgtcggtgaactcggcgagggagaggttctccatgccctacttcttcaacccggcgacctacaccatggtggagccggtggaggagctggtgagcaaggacgatccgcccaggtacgacgcctacaactggggcgacttcttcagcaccaggaagaacagcaacttcaagaagctcaacgtggagaacattcagatcgcgcatttcaagaagagcctcgtcctcgcctaactactgctactgctaggatccatgccattgccatgtcgtcttcagattcagagcacgccatgtcgtcgctagcttcgtggtagaacaaataatgatgtgcgtgctgtgtgtaagcatggatatggatgtgaatatgtaatatgatgagcactcctactttggtatgtttgggaataacagacttgtgttggtctggttcattatttgtaagaaaatcaaaaagagttagtagggcaggaggctaaccacagtcatgctgcaccacatccctggtggaaagctggc

SEQ ID NO: 1335 - DNA, 2458 bp, Zea mays
attaagagcacacgcaggcaggttagccttgatttcggcagtccaacgacactttccctccctcccagttcgttgaggatccgagagttctgggtccgagcggctgactctgcgagctgcgatgcatcgacgagtggccatgcgacccgaccggcccttctcccacccacgcaccctaaaacctggacacctcctcctctctctcctctagaacgcgcgcaagaacacacgtaggagaaactggaccggcgcgcaccaaccccgaaccacataactaggacgaggcgaaggattgtcatccaagccgcgtgatctttaattcgccgccgcacgcccttgtcatggaaggtggcggctgggctgtcggaggccacgcacttggcgccgcccaagaaccgcgggggcagcagcagcatcgggaggaggagaaggcagccggagctgccgccgagaggaagggcgctggcgccggcggcggcggcggcatgaagttccgcgtgcgcgcgcgggcgccgcacggtgtcggggcgctgctgctcatcggcggagcggccgtcgtcggggccgccgtcctcgcgtggcgccgctcacgccacggcaacaagggtggctccgtggaccagcctgatcgccggctgccagcgtacatctcgcatctgttcagagccgctttgaaattcgttaacttttataagaatgaatataagatgggctgtattgtttcctgggcgttggagctgaaaagaacggcttgtttggggtcaattctttgcaggaaagtagagggtttggatggcggaattgtcgaggatgggaaggttcagggtggctcattggtgcagaagcttagtcagtctaatgagatcttgagcgtgggcaacacagatattggatccggtagattggatggcaacgcgtcagaggaaagccatcagattcacaaggatggtgaaatcactgcagatcaatcggagagcaagcatgacgggaaaattgatgagaattcaggtatcaatcctgccgaggtccaaatgcacgatcaggagagcaagcatgaagagaaaaacgatgagaattcaggcagcaatcctgtcgaggttcacaaacacgatctggacaaagaacatgtcgaagaagttgaccagaagtcaagcagcaaccatgttgagatcagtgcgcatgatatgtgtgaggacaatgaacatgttgagaaaattgatcacgttgaaagaatcgatcagaattcgagcagggaccctgtcaaagccatcatgcaggaaatgatcaaagtttgtttggtcagtggaagcgtggagaaggtggaggaagaggactcaagcaagaaggacttggagaaagagatagccccaaaagataataaagatatggaggcctctgatggaagcaagctcggcgtcaacggtccaggtatcatcctcagcaagcataatgatgagtgtggtggtggtgcccaagaggctgaatcgatggagaacacgccgacggcacagctgatgatgcatcaagaccaactcttagatgacatggttactgatactgttacagaaactggaggtgctgttgcagacactgaagaagatgatactgttgcagagacagaagatgttgttacagacactgaagatactgttacagacaccgaagatgctcttgcagaaacagaagcagagaaaggtgaaagagcaatcgcggacaagggtgagctcgagcaggacgaaaagaaagatctggtagcactccctgaacttgccagctcaccagcactgtcatcgttggttaagccaacagtagtgaagaaagagctggactttccgagacccaacgaaacggggatgaagacagagcaagattacactaacggtgagctgagggagcacaatgacctggtcagcaaagtgcagggagaaggtggcgtcgcgacgaccatggagtccaggagctctgctctgatgatcattctcgctctgatattcgcgctggccacgggaataacgatcgtcgtgcgcctctactccccttcccgagcaacgaaactccagatggatctgccataagcctgcaatcggtcatcaagtacgatttctgaggctgcaaagttccattgggatttttcgtggcctcgtacgcgcgcgcgcatgaacggcgaagttaggagctgctggagtgtgtgcaagtacaagataggaagagaagtctaccatggtcatgaacgaattcatatggccattgtgcagcacgatctgtctgtgctggagaagttacacgtgtggtgccagctaccaaaagaaagaaccgaggtccgagagcagtagagtaggtttcttccggctgaggagcgcttgtttttcttttttcttcttttaaaagaaatatatattattttgcaagccatgttagtgctgatagtctatggaaatgcctaaaccatgttgaagtt

SEQ ID NO: 1336 - DNA, 1977 bp, Zea mays
aattatttgcaggtttttatatcggcttcgctgtgcgttcggtccaataaccgagtcccacgtagcacgcacacccctctatttaatcgcccactcgcctgtctgcgaggccgcacatcccattccccacatctcaagtgaagagaagtagaactagtggagagaggagaacaggagattagatcagctcgcacgcaagccaaaggaaaaggcaagatgcggagcccaaggggtggaggcggcctggagcacgtggatctgattcccggcatccccgacgacgtcgccgtggactgcctggcccgcgtcccgcacgcctcccaccgcgcgatgcgccgggtctgccgcggctggcgtagcgccgccgcggcgccggccttcgcgtcggcgcgcgccgcggcgggcgccaacgaggacctggtgtacctgatgcagttcgggaacccgtccgccgacgacgggcccaaggacggcgacgaggggccgggcaacgccccggcgtacggcgtggcggtgtacaacgtgacgacgggcgagtggcggcgggagcttggcgcgccgcccgtggtgccggtgttcgcgcagtgcgcggcggtggggacccggctggccgtgctgggcggctgggacccgctgaccttcgagcccgtggcggacgtgcacgtgctggacgcggcgacggggcggtggcggcgcggcgcgcccatgcggtcggcgcgctccttcttcgcgtgcgccgaggccggcggcaggatctacgtggcggggggccacgacaagcacaagaacgcgctcaagacggccgaggcctacgacgcggaggccgacgcctgggacccgctcccggacatgtcggaggagcgcgacgagtgcgacggcatggccaccgtggccggcgaccggttcctggccgtcagcgggtaccgcacggcgcggcagggcgggttcgagcgcgacgccgagtggttcgacccggcggcgcgggcctggcgcaggctggagcgcgtgcgcgcgccgccctccgccgcgcacgtcgtcgtccgcggccgcgtctggtgcatcgagggcaacgccgtcatggagtggatgggcacccgccgcgggtggcgcgaggtggggccctacccgccggggctcaaggccggcacggcgcgcgccgtctgcgtcggcggcggcgagaaggtggtcgtcaccggcgcgctcgacggtgtgggcggctgcggcggccggcacgccctctgggtgttcgatgtgacgagcaagagctggaccgtggtgcccccgccgccggagttcgccggcttcgtgttctccgttgcgtccgtccggatctgagaaaacctagatcttcttcgtcctgtccgtccctccgcgatcgatcaagagacgtaaaggctactgctagtgctagtgctagtacggtagtacctgctgtatgtccgtgcgccattgctggatctgatgaacactgctagttcgagatctgcgctcccgtgtaccatggatctgggcatctgcttggtacccgtacgccctgccatcgattcgtccaaggaagtgtaaggtaaggtggtgacccgacgccagccagatgagatgagatccattgaagccgacagccgagggttgggtgtaaaatatgggtgtggtgtttttgtcccgaggtgaaggacacagactgttgttcgttgctcttgtcctacagccatgcttttggtactgcgatccgagtgcgtgtgatctggatggagcttggagatgacggaattgcgacggatcctcatgtgccagcggctccgcctgcgctgaaccgctgtcatgcctaccatcgttgaacaaaggcagtttgtgttctgccgagcgtccatctcgagaacataatgtaatctccacttggctatcaatcatttctctgtatattattgcaatccaagctggcgatttgtccgctaattgaacggaagttgacattgccac

SEQ ID NO: 1337 - DNA, 2233 bp, Zea mays
gcaccacgcaaaccgagctcgagaacaccaccacgaacaagaaagaaacacggccgcggcggggcggggcggggcttcttctccttttccaactcgctgcccgttgcgtgattccgccgcgtcgcgtcgcgtgtgcatttgcgcgcgcgcgcaggagccgccgctccgatcgccctgaaaaaggtgccaattgttactgattccagatataggtgttcctgcgctggaactaactgcgccgcgaccttcctcagcaatcttatgctcatgtctcactctcaacagatggcgaatagtaggaagcctcctggcctcaggttactcggaggcgccggctcactgacaacgtaccagacactagtcctggtcctcacgttcttggcatacacatgcttccacatgactcggaagatcccaagcatagtcaagagcgctctggacccgcagacgaaggtggggttctcgcactggggacggttgcacgccagcagaaacgctctcaccaccggctggctgccgttcaacaccgccgacggctccgcgctgctcggcgagatagacgtcgcgttcctcgccgcgtactccgccgggatgttcttcgccggccacatcggcgaccgcatggatctgagggtcttcctgacggtcggcatggccggcaccgccgtgttcacgacgctcttcggcgctggatactggctgaacgtccacagcttctactatttcttggttattcagatggtttctggcctgtttcagtcagttggctggccttcggttgttgcggttgtcggcaactggttcgggaagagtaagagaggattgatcatggggatatggaacgcacacacctctgtcgggaatatagcaggctcgctgctcgccgcgttcctcctgaagttcgggtggggctggtcgtttgccgtccccagccttatcatggcgctcgttgggttgatggtgtatgttttcctgccggttagtcctgaggccatggagattgacagtgacggcggtgagcttaactgcgagaaggacgctgtgaaggagcctctcttggaaccaggccaagaagtgaaacatagtgcagtggggttcttagaggcatggaggattcctggggtcgcgccgtttgctctgtgcctcttcttctccaaactggtcgcgtataccttcctgtactggctgccgttctacatcagccatacacgcattggtggcgagtacctctccgacgccacggcaggaagcctatcgacgatcttcgacgtcggcggcgtgctgggaggggtcctggcgggccacatctccgaccgcctgaacgcgcgcgcgatcacggccgcgagcttcacttactgcgcgatccccgcgctcttcctgtaccgcacgtacgggagcatgtcgatggcgtggaacgtctcgctcatgttcgtcacggggatgttcgtgaacgggccctacgcgctgatcacgacggcggtgtcggccgacctcggcacgcacagctcgctcaacggcaactcccgggcgctggccaccgtgacggcgatcatcgacgggacggggtctgtcggagccgccatcgggccgctggtgacggggtacgtctcgtcgaggagctggagcgccgtgttcaccatgctgatggcggcggctctcctcgctgggctcctcttgagcaagctcgtgtgcgccgagctgcaagggaaaacgcattccagcgtgagcaaggacgcaggcggtgaacatggtgcctactcagatgaagtgtaagtctgaagccctggttagtaagcccacgttcccgacctgaagatgaaaaggcagagatttagctgctgagtgacttgctcaaatggcaattcagatgattttcttttgttttgtgtggtagaagatgtaagtgtgtgcttagattggtttttcaggtttactagactctagagcccaaatacaggcacattttaggcgcctttgtaaataaggtcgggctcatactagttaccattgctagttgctcaattgtatgtgatgtttagggtatatgtcaaatggagggcgaaccaccttttgtacactggaatggccaactctgcatttactttgaatgttggccttctttttgtacgtgtaaaccgtgtgaaggttcagagaattttgaattgaagcatctaggctgaccgctagtgtttggttgcgccgggattgccttgctcaaaggagctgtttggtt

SEQ ID NO: 1338 - DNA, 2039 bp, Zea mays
cgcaaaccgtagctagctacagcgtctctcccggtctcccccatggtaattatttcttgtccgagtccaacctcaacaagggattgctggcggccccgcaagcgaagagaactttcaaaccaaacgagcagtcgtgtccaattcaatcccccgggtaatccggtgagcgcgcgcgtgtatatatattatatacacagggctgccgccgccagcagccgtcgcgcctaccgccacctgactccctctgccttctcgtcgctctgctcctccgttgccgtgaccctaagggaggaggacgaggaggaggaggaggaggggaaggaacggagggatggcggaggagacggtgcaggagctgcgcgcgagcttcgcgtcggggcggacgcgccgggccgagtggcgggcggagcagctcaaggggctcatccggatgatcgacgagaaggaggccgagatcagcgccgcgctccatgaggacctggccaagccgcacatggagtcctacctccacgagatatcgattacaaggtcctcgtgcaagtttgccctcgacgggctcaagagctggatgaagcccgagaagatacctgcggccttaaccacgttcccgtcctctgctcaaatcgtgccggagcccctcggtgtggtgctcatcatctcagcctggaactaccctttcatactctcgatcgacccagtcattggagcaatcgcagctggaaatgctgttgttctgaagccgtcagaaatagcgccagctacctcgtcattgctagcgaagctgctgcccgagtacgttgataactcctgtattaaagtcgtggagggaggcgttgcagaaacaacctcactcctggaacagagatgggataagatcttctacacaggtaatggaaccgtaggacgcatcgtgatggcagcagccgcaaagcatctaactccggtggctctggagcttggtgggaaatcccctgttgttgtggactcaaatgttgaccttcatgttgccgtcaagaggatcgttgttggcaaatggggatgcaacaacggccaagcatgcattgccccagactacatcataacgacaaaatcatttgcgccagagctggtggcctccttgaaaagggttttggaaaggttttacggggaggatcctctgcagtcagcggacctgtctcgtatcgtgaattcgaagcacttcaggagactgacggaattgatagaagagaaaagcgttgctgacaagatcgtgtacggcggcgaggttgatgagaagcagctaaaaattgctcctacactgttgctcgacgtcccccaggattcagcaatcatgaccggggaaatatttgggcccttgcttcctatcgtgacggtggaaaagatcgaggagagcttcgacttgatcaacgccaggcctaagccgcttgccgcctaccttttcaccaagaacaagaagctgcaggaggagtttgtggcggacgtgcctgcaggagggatgcttgtgaacgacaccgtgctacatctcgccaacccgtacatgcccttcggcggcgtcggcgacagcgggatggggtgctaccacggcaagttcgggttcgactgcttcagccacaagaagggggtcctggtccgcggctttggcggcgaggcgaacgccaggtacccgccctacacgacggagaagcagaagatcctgagggggctcatcaacggcagcttcatcgcgctcatccttgccctcctgggcttcccgagggagaagcgttagatgggccttctaactgggcccagtacaagcgttttgttcgtgttcgatggatggcacagtatatacactgccatgtgctgccaaatagatgcaaaccgtgcttgtgttacacggctgtgtaatgcattatattgttgcattgacatgtgggttaccgaattgtacgtaagggagttgcattaataagtgtggtctgcctgtcaattatcaagtgttcacaatggatacttcgacggatgcatcatgcattcatgcatggatgtggcatatc

SEQ ID NO: 1339 - DNA, 1583 bp, Zea mays
cgtcaactcgcagatggaaggcttcgatacatcgaactgcaaccgcgcgacgtggggtagaatataatctggtgcgctccccccggcccccgcgaacaacttcctgcttgcacgcaagccactccgaggccaagtctagggtttgggaatctgtaggaggggagaggggagcgcgctcagggtcagggaggcgaagatgatcgaggtggtgctgaacgaccgcctggggaagaaggtgcgggtgaagtgcaacgaggacgacaccatcggcgacctcaagaagctggtggcggcgcagacggggacgcgccccgagaagatccgcatccagaagtggtacaacatctacaaggaccacatcacgctcaaggactacgagatccacgacgggatggggctcgagctctactacaactaggcgccctgaccccaaccgtgccctgatgtaaggtaatttcctccctcccaagttcggcgctgttgctggggcgactggcttggtttccattaaccacggttgttgagtgatggctaggagcggataatttagttttgtgtgcggcaggggcggatctagattttttggctaatgatgtcacaatgcaaatagtgtgtaaaaaggttccaaattcaattcaaagtgtaataccatagaatgtaatactacttctgttctcgaatatttgttgcatgcttgttcattttttgaactaaaacacggtaaataaaaaagaacggagggagtattaaaaaataacatcatttcaattatttgggaagatccttcgccactagttgctggagctgattttctctttgagaatcgttccatcatattcatacttcttataaaatttgtcaagttaaattactaattgtctacacatgtacacactaagcatgtaaatgcacctgcagtgatgaactcaaccagcagagaccaaaataaatactcaaatataaactaccagctttgatcgtcgtttagttaatttatgaacttgcttgtacctacgatcaccatggacagatgtgtcctatcaaaaatcactcagaatattcgtgcacttgccagccaaaaccaatcaatacaggacaacatgactgtagaaggatgcttggaacagatgggctagtcaggactcaagagacaaactaatgccgcatgcaggcctagacttatcacttatgagaggactgatgttaatccgaattctgaagtcatgggtgcgcttccagtcacagcgtctttagctaacaagctcgcatacatataggcaacttgagtgagctatgtagtacggatatggttgtgtggcaaactgccaatgactattgacatccttgcatatattgacatgtgacaaggatcaacctgcaaaactggtgccctgctactcgcagaccttattatcttaaataacacaggtggtgtgtttttcaattatgtgaaaaccttggccttgtttggataatttatggtgtgattggattggttgtagttgtaggacaaccggggacagcctcttcagcgtctcgtttcgtccgtccaattctgatctactgctagggacgacaccgag

SEQ ID NO: 1340 - DNA, 1743 bp, Zea mays
atggccactgtctcgctcaccccgcaggctgtcttctccacggagtccggtggcgccctggcctctgctaccatcctccgctttccgccaaactttgtccgccagcttagcaccaaggcacgccgcaactgcagcaacatcggcgtcgcgcagatcgtcgccgccgcgtggtccgactgccccgccgctcgcccccacttaggcggcggcggcggaggggagaggctgggaagaaggatcgccacggatgcgatcaccacaccggtagtgaacacgtcggcctactggttcaacaactcgcaagagctaatcgactttaaggaggggaggcatgctagcttcgagtatgggaggtatgggaacccgaccacggaggcattagagaagaagatgagcgcactggagaaagcagagtccacagtgttcgtggcatcggggatgtatgcagctgtggctatgctcagtgcacttgttccggctggtgggcacattgtgaccaccacggattgctaccggaaaacaaggatttacatggaaactgagctccccaagaggggaatttcgatgactgtcattaggcctgctgacatggatgctctacaaaatgcgttggacaacaataatgtatctcttttcttcacggagactcccacaaatccatttctcagatgcattgatattgaacatgtatcaaatatgtgccatagcaagggagcgttgctttgtatcgacagtacttttgcctcccctatcaatcagaaggcactgactttaggcgctgacctagttattcattctgcaacaaagtacattgctggacacaacgatgttattggaggatgcgtcagtggcagagatgagttggtttccaaagtccgtatttatcaccatgtggttggtggtgttctaaacccgaatgctgcgtaccttatccttcgaggcatgaaaacacttcatctccgtgtgcaatgtcagaataacactgctcttcggatggcccagtttttagaggaacatctaaagattgcccgtgtctactatcctggcttgcctagccaccctgaacatcacattgccaagagtcaaatgactggctttggtggtgtggttagttttgaggttgctggagactttgatgccacaaggaaattcatcgattctgttaagataccctatcatgccccttctttcggaggctgtgagagcataattgatcagcctgctatcatgtcctactgggattcaaaggagcagagggacatctatgggatcaaggacaacctgatcaggttcagcattggagtggaggattttgaggaccttaagaatgatcttgttcaggccctcgagaagatataagctccaatccatttgcattaataaagttatgaggtgatggttgtctggatcttgtagagatttgtgatgatacatgagctgttgactgcgattaagttctcttgtgcttattttattctttgaattcaataagctgtggttgctgcatcttgcatgtagtgttggacttaattttacttgtcaaattacaatagtttggtcccatgtacttgtgtccgcgcctccgcggttgtgcccctagtgtttttgtgtcatttgctgtgtagtgtgagattaaggcacgatgtccttaatcaccataataaatccatgccttaaatgtaaggatctggttggaatgataaagtgcggttgaagaaagaactatatataatttttctcagt

SEQ ID NO: 1341 - DNA, 3386 bp, Zea mays
ccgcgaccccaggtcagtcgggactacccgctgagtttaagcatataaataagcggaggagaagaaacttacgaggattcccctagtaacggcgagcgaaccgggagcagcccagcttgagaatcgggcggcctcgccgcccgaattgtagtctggagaggcgtcctcagcgacggaccgggcccaagttctctggaaagggacgcctgggagggtgagagccccgtccggcccggaccctgtcgcaccacgaggcgccgtcaacgagtcgggttgtttgggaatgcagcccaaatcgggcggtaaactccgtccaaggctaaatacaggcgagagaccgatagcgaacaagtaccgcgagggaaagatgaaaaggactttgaaaagagagtcaaagagtgcttgaaattgccgggagggaagcggatgggggctggcgacgcgcaccggccgtatgcggaacggctcctgctggtccgccgatcggctcggggcgtggaccgttgtcgcccgcgccggcggccaaagcccgggggccctaggcgcccccggcagccgtcgtcggcgcggacggtatccgcgcgcctctggcgcgcccctcggggcgctgcgccgcaacggcctgcgagctccccatccgacccgtcttgaaacacggaccaaggagtctgacatgcgtgcgagtcgacgggttcagaaacctgagatgcgcaaggaagctgacgagcgggaggccctcacgggccgcaccgctggccgaccctgatcttctgtgaagggttcgagttggagcacgcctgtcgggacccgaaagatggtgaactatgcctgagcggggcgaagccagaggaaactctggtggaggctcgaagcgatactgacgtgcaaatcgttcgtctgacttgggtataggggcgaaagactaatcgaaccatctagtagctggttccctccgaagtttccctcaggatagctggagcccacacgagttctatcgggtaaagccaatgattagaggcatcgggggcgcaacgccctcgacctattctcaaactttaaataggtaggacggcgcggctgcttcggtgagccgtgccacggaatcgggagctccaagtgggccatttttggtaagcagaactggcgatgcgggatgaaccggaagccgggttacggtgccaaactgcgcgctaacctagaacccacaaagggtgttggtcgattaagacagcaggacggtggtcatggaagtcgaaatccgctaaggagtgtgtaacaactcacctgccgaatcaactagccccgaaaatggatggcgctgaagcgcgcgacccacacccggccatctgggcgagcgacatgccccgatgagtaggagggcgcggcggccgccgcaaaacccggggcgcgagcccgggcggagcggccgtcggtgcagatcttggtggtagtagcaaatattcaaatgagaactttgaaggccgaagaggagaaaggttccatgtgaacggcacttgcacatgggtaagccgatcctaagggacgggggaaacccggcagatagcgcgatcacgcgcgtcacccgaaagggaatcgggttaagatttcccgagccgggacgtggcggcagacggcgacgttaggaagtccggagacgccggcgggggcctcgggaagagttatcttttctgcttaacggcccgccaaccctggaatcggttcagccggaggtagggtccagcggccggaagagcaccgcacatcgcgcggtgtccggtgcgcccccggcggcccttgaaaatccggaggaccgaattccgtccacgcccggtcgtactcataaccgcatcaggtctccaaggtgaacagcctctggccaatggaacaatgtaggcaagggaagtcggcaaaacggatccgtaacttcgggaaaaggattggctctgagggttgggctcgggggtcccggccccgaacccgtcggctgctggcggaatgctcgagctgctcgcgcggcgagagcgggccgccgcgtgccggccgggggacggaccgggaacggccccctcgggggccttccccgggcgtcgaacaaccgactcagaactggtacggacaaggggaatccgactgtttaattaaaacaaagcattgcgacggtcctcgaggatgctgacgcaatgtgatttctgcccagtgctctgaatgtcaaagtgaagaaattcaaccaagcgcgggtaaacggcgggagtaactatgactctcttaaggtagccaaatgcctcgtcatctaattagtgacgcgcatgaatggattaacgagattcccactgtccctgtctactatccagcgaaaccacagccaagggaacgggcttggcggaatcagcggggaaagaagaccctgttgagcttgactctagtccgactttgtgaaatgacttgagaggtgtaggataagtgggagcctccgggcgcaagtgaaataccactacttttaacgttattttacttattccgtgggtcggaagcggggcaccgcccctccttttggctccaaggcccggcctcgccgggccgatccgggcggaagacattgtcaggtggggagtttggctggggcggcacatctgttaaaagataacgcaggtgtcctaagatgagctcaacgagaacagaaatctcgtgtggaacaaaagggtaaaagctcgtttgattctgatttccagtacgaatacgaaccgtgaaagcgtggcctatcgatcctttagaccttcggagtttgaagctagaggtgtcagaaaagttaccacagggataactggcttgtggcagccaagcgttcatagcgacgttgctttttgatccttcgatgtcggctcttcctatcattgtgaagcagaattcaccaagtgttggattgttcacccaccaatagggaacgtgagctgggtttagaccgtcgtgagacaggttagttttaccctactgatgaccgcgccgcgatagtaattcaacctagtacgagaggaaccgttgattcacacaattggtcatcgcgcttggttgaaaagccagtggcgcgaagctaccgtgtgccggattatgactgaacgcctctaagtcagaatccaagctagcaaccggcgcctctgctcgccgcccgccccgacccacgttagggcgttcgcgccccaagggcccgtgccattggctcagcccgcccggccgacgcgccgcggcgggccgcctcgaagctcccttcccaacgggcggcgtgctgaatcctttgcagacgacttaaaacgcgacggggcattgtaagtggcagagtggccttgctgccacgatccactgagatccagccccgcgtcgcacggattcgt

SEQ ID NO: 1342 - DNA, 1811 bp, Zea mays
tacctggttgatcctgccagtagtcatatgcttgtctcaaagattaagccatgcatgtgcaagtatgaactaattcgaactgtgaaactgcgaatggctcattaaatcagttatagtttgtttgatggtacgtgctactcggataaccgtagtaattctagagctaatacgtgcaacaaaccccgacttccgggaggggcgcatttattagataaaaggctgacgcgggctctgcccgccgatccgatgattcatgataacttgacggatcgcacggccttcgtgccggcgacgcatcattcaaatttctgccctatcaactttcgatggtaggataggggcctaccatggtggtgacgggtgacggagaattagggttcgattccggagagggagcctgagaaacggctaccacatccaaggaaggcagcaggcgcgcaaattacccaatcctgacacggggaggtagtgacaataaataacaataccgggcgcgttagtgtctggtaattggaatgagtacaatctaaatcccttaacgaggatccattggagggcaagtctggtgccagcagccgcggtaattccagctccaatagcgtatatttaagttgttgcagttaaaaagctcgtagttggaccttgggccgggccggccggtccgcctcacggcgagaaccgaccggctcgacccttctgccggcgatgcgctcctggccttaactggccgggtcgtgcctccggcgccgttactttgaagaaattagagtgctcaaagcaagccatcgctctggatacattagcatgggataacatcataggattccggtcctattgtgttggccttcgggatcggagtaatgattaatagggacagtcgggggcattcgtatttcatagtcagaggtgaaattcttggatttatgaaagacgaacaactgcgaaagcatttgccaaggatgttttcattaatcaagaacgaaagttgggggctcgaagacgatcagataccgtcctagtctcaaccataaacgatgccgaccagggatcagcgggtgttactaataggaccccgctggcaccttatgagaaatcaaagtctttgggttccggggggagtatggtcgcaaggctgaaacttaaaggaattgacggaagggcaccaccaggcgtggagcctgcggcttaatttgactcaacacggggaaacttaccaggtccagacatagcaaggattgacagactgagagctctttcttgattctatgggtggtggtgcatggccgttcttagttggtggagcgatttgtctggttaattccgttaacgaacgagacctcagcctgctaactagctatgcggagccatccctccgtagttagcttcttagagggactatggccgtttaggccacggaagtttgaggcaataacaggtctgtgatgcccttagatgttctgggccgcacgcgcgctacactgatgtatccaacgagtatatagccttggccgacaggcccgggtaatcttgggaaatttcatcgtgatggggatagatcattgcaattgttggtcttcaacgaggaatgcctagtaagcgcgagtcatcagctcgcgttgactacgtccctgccctttgtacacaccgcccgtcgctcctaccgattgaatggtccggtgaagtgttcggatcgcggcgacgggggcggttcgccgcccccgacgtcgcgagaagtccattgaaccttatcatttagaggaaggagaagtcgtaacaaggtttccgtaggtgaacctgcggaaggatcattg

SEQ ID NO: 1343 - DNA, 1103 bp, Zea mays
aatgactcctcttttagcggcgagagactgagagcttggctcaacgcgtcctcggcttctgtggaaggccattccatgcgctccgtgtagccagccattcggtacaaccaactaccctagaagtaacttttcttttcttttttgctctcgagatggatccggttggccccttcctcgtcgcctctataagaagcatccccacacgttctctccacccatcactgcagctcaaacacaaagcagcatcacactgactccactgctctgcctccataataagcacagaagcgccccaataatcagcagcgcaggagcgagcgatcgctatggctcagggaagaggcagtgcgacgcgggggcttgccctcggcagcctactcgccgccgctttcctcctcctcctcggcgtcgccgacgcggccacccacagggtcgactggtccttcaacgcggacagctggtccaagggcaagagcttccgtgccggcgacgtcctcgagttcaactacgacccctccgtgcacaacgtggtggccgtggacgccggcggctacaacggctgccggccctccggcacgtcgtacggctccgggagcgaccgcatcacgctcggccccggcaccagctacttcatctgcagcctcaacgggcactgcgggatggggatgaagatggtcgtcaacgccagctgagcacgacgcttatatgttagtactgcaaaaatatatgggctagtggtggtccgatagatcgtgcaagaactcaatcgtgtggcatactcgtaccgtgtgttcgatggacacggttcatgtgttgtgtatgcatgcgactgctggtaggtcaggcatgatgtacgtgtggctgatggcgtgttagtaaagcgtcctgcagctttgttgttactttgttcgatcgaagcagcggcttcttttgtttgttcatcaataacatctttcattaaattttttttattgttgctctccgaatgtgacagttagacttatatgcaatgcacatctttactactattaagacggtaaggagtaggctgtcattcctggttctgccattctcattcctgtttctgtcgatctcattcccat

SEQ ID NO: 1344 - DNA, 1776 bp, Zea mays
ctctagctcaatagctctgccgcagagacttgctttgcttgacgttcactaggtgcaccaagaagccaaagccaatggcgactctacctctgctcctgcacctgctatgggaggcctctccgtgggcccgtgcaggcgcggcgacggccgccgtggtgctggtgtggctagcggcctggacgcttgagtgggcgtggtggacgccacggcggctagacagagccctacgggcccagggcctcaagggcaccaggtaccgcctcctcaccggcgacgtgagggagaacgctcggctcaaccgagaagcccgcacgaagccactgccgcttgggagtcacgacatcatcccacgcgtgctacccatgttccacaacgcggtgaaggagaatgggacaaattcattcacttggtttggcccgattccgagggtgataattccagacccggaattaatgagagaggttttgtctaacaagtttggccactttggcaaaccactgtttagccgtgttggcaagttactagccaatgggctcgctaatcatgaaggcgagaaatgggcaaaacacaggagaattctcaaccctgcattccaccatgagaaaataaagcggatgctgcctgtatttgctacctgttgtgccgatatgattaacagatgggaaaattcaatgtcttccaaggaaccttctgagatggacgtctggcctgagttccaaaatcttactggagatgttatctcaagaactgcttttggtagcaactatcaggagggcaggaacatcttccagctacaaggagagcaggctgaacgccttatacaatcttttcaaacaatatttatcccaggctactggctcttgcccaccaaaaataacagaaggatgaaagaaattgatcgggagatccgtaaaattctgcatggaataatcaggaaaagagagagggcttttatagatagtgaaggaactaatgatgacttgttaggcttattggttgagtcaaacatgagggaatcaaatgggaatgcaaaactcggaatgactaccgaagatataatcgaggaatgcaagttattttactttgcaggtatggagacaacatcagtcctgcttacatggacgttaattctgctaagcatgcaccctgaatggcaagagcaggcaagagaagaagttttaaaccactttggaatgggtacaccagactttgataacttgaaccgcctgaagattgtaaccatgattttatatgaggtccttaggttgtacccaccagtagttttcctatccagaagaacctacaaggaaatggagctcggtggcatcaaatatccttcaggcgtgagccttctactgcccatcatcttcattcaccatgatcccaacatctggggaaaagacgcaagcgagttcaatccacagaggttcgaggatggcatttccaatgcgaccaagcatcaggccgccttctttccatttggatggggtcccaggatctgcataggccagaacttcgcgttgctggaagcaaagatggcactgagtaccatcctccaacgcttctcctttgagctctcatcatcctacactcatgcgccatacaccgtgataactttgcatcctcagcatggtgctcaaatcaggtttaaatttagctttgatatgaataatgagaaccaagtgtgtatgaatggagtaggggtgtaatcggatcggatacgaacggatattgcttgtaccatatttgtttcatattttctgtttggattcagat

SEQ ID NO: 1345 - DNA, 929 bp, Zea mays
agcaggagcacaaagtgcagaagcagagccagtcctaactgcttagccaggaaaggtacgtgtactcatcgttttgtagagacctttgggtagacatggttaaaaaaaatggccactacatatacaagttaagtctaacttgaatttcgtgaaaataatctgtgtagcagaagcagagcgtgcttagccatgtactcatccagctgccatgtgatgtccgagaagccaaacggttccaaggcggtgacgctgctgctcaggctgtccacgctggttctgtcgctcatctcggcggtcgtcatggccaccgccaccagcgactgcaccatctacggccacggcggcgccgccaaggtcactatcatgttcaagaactaccggcccttcgttttcctggtagttttgaacatcgcggcggcggtgctggaggcagcagccatctacctacaggtcgtgaagggcgacgacggcgacgaggcgcccaagcttccccggatcatcctggttgtcctcgacgtcgtggtgctcgcgctggtcaacgcggcgacgggcgcggtggtcgcggcggtcatcgcctacggccccgagatcgacgcgtgcaccgtcgcaggtggtggccgattccgcgagcaggtgcgcaggtccgagctcctgtcgatcgccgcgagcatctccgctgtgtccgccgccgtcgctaaggacgtgccgctgcccttctccgtgtggcccctctcgtcggaatcaggcgactactactgatcttggttattatttgtcaggtgatgttgagtactgtgagtgtgaaggctttctgccagcgaaattccaatttatgtcaactgaatgccactacgataagctatccttcgaaaaaatttcagcacaaatcatatatttgatttccatctggctgctccagttcaattttt

SEQ ID NO: 1346 - DNA, 530 bp, Zea mays
ctgtttgattccccaggaaaacccagatttgtggaaatggttgactagtcaggagcagccaccagaggatctgatttctaatccggtgttttctgccatcaaatcaaaggtcacagataacctgatcaagcatgcttctcccgagacccgatcaacacctggccaaccttgggttagaggatgggatgacataaagaaaggcaaagatggacctaactatggaaatcagtgacatgttccttgaaatggggatgacagctttacatcctaaataatccccccccccccccccatgttttgtgttcgtgtagattaaggtgaactgtgaccggcatgtgagaagtttgttaaatcgatattggagaatcagcttgtaactacagatggcactcctgatgtgtccctggcagtttgtctgcaactggaaagatggtatacatagcattgtgttacttatggcaatccttgaagcatttggactgaaacttaaatattgaaaatgtggacgacaaacatcatcagaaagaagt

SEQ ID NO: 1347 - DNA, 2608 bp, Zea mays
ggaaatttggatccataccattaaaagatcaccactttggatccataccattactatctcacttacatgtgggtccacatgagtcaatgacatgtggggtccatgatatatatctaaagtttggattttttaatggtatagatccaattgttaaaaaaaaagagaagtggatggagtaaaataaaagaaagaaagagaagagcgactactagtagaaataatctcccgaggccgaggcgagccgagaggggaaggtggagagagaaaaaacgcggtggcgcgaacgggagggaagccttgctatcctatccggctatccccgccccgtcgcacgcacacatcacccaccccgtcgcagtcgcacctgcactgcatcctgcgcctgcccgatacccaattattctccctctctatggatcaccaccgcacgccgatggagaactcggcgtcctcgaagccgccgacgccggcgtccacgcccaactcgcgcctcgcatcggcgccgtcaccccgccactccgccacgccgccgcacgcgtccgcgccggcgtccgccccggcgccggcctcgcgcaccgtctacagcgaccgcttcatccccagccgcgccggatccaacctcgcgctcttcgacctcggcccctcgccctcgcccgccgccgccgccgcctcctcgtcctcctcccacgaggccggccccgcggcctcgtccggatctgcgcccgccgcggcgtcgccctactgcgcgctcctccgcgccgcgctcttcgggcccgacacgcccgaccgggtcgcgtcctcggccgccgcgtgctcgtcctcctcctcctccccggggctctcgcctgtgggcacccccgccaccgggaacatcttcagattcaagacggaggtgcgccggaacgccaagagggcgcttttttccggaggggaggaggaggaggacgccctgttccccggcattttcaccaccaggggcgcgggaccaaggaaggtcccgaggtcgccctacaaggtgctggatgcgcctgcgttgcaggacgacttctacctcaacctcgtcgattggtcttcacataacgtcctcgctgttgggttgggcaattgcgtttacctgtggaatgcatgcagcagcaaggtcaccaagctttgcgatttgggggtggatgacaacgtttgttctgtggggtgggcgcagcgcggcactcaccttgcagtaggaacaaatcaaggaaaagttcagatctgggatgcaactcgctgtaaaagaataaggacaatggaaagccatcgcatgcgtgtaggtgctcttgcatggagttcttcgttgctttcttctggaagccgtgacaagagcatcctccaccatgatatccgtgctcaagaagatcatgttagcaagcttaccgggcataaatctgaggtttgtggactcaagtggtcttatgacaatcgtcagcttgcatcgggtggcaatgacaacagactttttgtttggaatccacattcagtacagccagtactgaagtatactgagcacacagcagctgtcaaagctattgcctggtcacctcatctccatgggctgcttgcatctggtggaggaactgcagatagatgcatacgattttggaatacgaccacaaatgcacacttgagctgtgtggacactggcagccaggtctgcaatctcgcgtggtcaaagaatgtaaatgagcttgttagcacccacggctactctcagaaccaaataattgtttggagatatccaacaatgtcgaagcttgccactttgacagggcatacatacagagtattgtacttagctatttcccctgatggccagaccatagttactggtgctggtgatgaaacgctccggttttggaacgtgttcccctctccaaagtcccagagttctgatagtttaagttgtgtcggaggaacatctttcgttagaagctacatccggtgacaccgagttgtagttttgctgagctcataggactgttgcagcacatgttgatgaccatcaacatcactccatttgcatcaaccatcaaaggtagcccactttttgagatggcgcgatacagtttggtgaaccggcttgcgaatccaggcatggctctttttgctaggagtgtacatatttatcagagcaacggctttataggagtggacatagaggaggggggcttcaagcatcagcattgtcccaactgataagaatacgcccttttgtttgtttgctcaatacgtcggcttgagctgtttgtgtagtgcgcgagcagctaacctattcgaaacatttaccggactgtgaacacgcccacttcatccatgttggcaccatggtgtaaaatgagaacactcgtggctccaggtttattttatagtgtcttggaaggaggggctgattttgccctcacctggcttgtttcacatagagacaaccaagaaacgtgtgttcattgtttattgagatatggataccaaagcaatgctgaacttttagcatatttttttttatcatgcgactatctttgttgtaaagtgatatctcagcattgctaatgcttgcgtctttcgttgtcacttctttgca

SEQ ID NO: 1348 - DNA, 2603 bp, Zea mays
gtgcgccgtcagcaagatggcaactactccggcgctgtcacgcgaccctgcttcccgtcccgagctcgacgctggcctgatatatagcattggagtttgttggacctttggtggctagtcccgtccaaaagaatcgcaactcgcaaggcagcagagagcgaaggaggccaaggccatcgctctcctagcctcggagacttgcctttgcatacacatccccccggagggcggtgtgagggcatggctgcaaccgtgaggagggctgcttcctccgtcctctctcgcttcctcctcacaaagccttcgccttcgcctgcttctgccgccggcaataagtccgctctcctcggagcaggggctgctgctcttcacaggttcagcaccgcaccggcatccgcggccgcggccgcagaggagccgatccagcccgcggtggaggtgaagcacacccagctcctcatcaatggcaacttcgtcgacgctgcttctgggaagacgttcccgacgctggacccgcgcaccggcgaggtcatcgcgcgcgtcgccgagggcgacagcgaggacatcgaccgcgccgtggccgccgcccgcagggccttcgacgagggcccgtggccgaggatgaccgcctacgagcggtgccgcgtgctgctgcgcttcgcggacctgatcgagcggcacgcggaggaggtcgcggcgctggagacgtgggacaacggcaagacgctggcgcaggcggcgggggccgaggtgcccatggtggcgcggtgcgtccggtactacgccgggtgggcggacaagatccacggcctggtggcgccggccgacggcgcgcaccacgtgcaggtgctgcacgagccggtcggcgtggccggccagatcatcccctggaacttcccgctgctcatgttcgcctggaaggtcggcccggcgctcgcctgcggcaacaccgtcgtcctcaagaccgccgagcagacgccgctctccgcgctctacgtggccaacctcctccacgaggctgggctccccgagggcgttctgaacgtggtgtccggcttcggcccgacggccggcgcagcgctctgcagccacatgggtgtcgacaagcttgcgttcacgggatcgacgggcacggggcagatcgtgctcgagctggcggcgaggagcaaccttaagccggtgacgctggagctcggtggcaagtcccctttcatcgtcatggacgacgccgacgtcgaccaggccgtcgagctcgcgcaccaggcggtcttcttcaaccagggccaatgctgctgcgccgggtcgcggacgttcgtgcacgagcgcgtgtacgacgagttcgtggagaagtccaaggcccgcgccctgaagcgcgtcgtcggcgaccccttcagggacggggtcgaacaggggcctcaggtacgtatacgtactcttatttctcagcgtcgcccggcgcatccgcttcggtttcagccgtccccggccctgagatcttctccttgcgccgcgttgtcagatcgacggcgagcaattcaacaagatcttgcggtacgtccagtccggcgtcgacagcggtgccaccctcgtcgccggcggcgacagggtaggcgacaggggcttctacatacagccgacggtgtttgccgacgccaaggacgaaatgaagatcgctcgggaggagatattcgggccggtgcaaaccattctcaagttcagcggcgtggaggaggtgatccggcgcgcgaacgcgacgccctacgggctggcggcgggggtgttcacgcggagcctggacgcggccaacaccctgtcgcgggcgctgcgggcgggcaccgtgtgggtgaactgctacgacgtgttcgacgccaccatcccgttcggcggctacaagatgagcggcgtcgggcgggagaagggcatctacgccctccgcaactacctccagacaaaggccgtcgtcacacccatcaagaaccccgcatggctgtaaatcacatcctccgtccttgcccgcacggcgctgcgccggttctcggagaacgtgacgaataaaacaaacggtttggttaaaaagacaaggacgacggaaaatgggtcatttttatctcccttagagcatctccaacaatgcctcaaactaatgcctcaaatcgaaatatagggctctacacaggaaaaaccactccaacagtgcctcaattcaacaaattttgtcaaaaaactatagggcaccctctcaagtgcctcaaatatactacaccgtagtgggctgccctataatctagatttggggctttactgttggagcggggtgttttgttggtgccctaaattctataaaatttacttattttaaaattataaggcatttttataggtcacgttgttggagatgctcttaacaagcaccaccctagtcacgttttcatcgaactttaaaagcacgcgaattgctcagctctcaaaaccatttaaattacccattaggagaggttttcatggtgattttagcttttttttaattaatgtttggttgcaatgacaggacaggatgagatgagacgatctcttgtatctcttaaacaagtttgtttggttga

SEQ ID NO: 1349 - DNA, 4292 bp, Zea mays
ggcgtccactatcgcgcggtgcacgttctgccgctccgctcacgcccgcggccgaacgctcccccgcaccttccatcctccgcgcagccacagctgcgattccctgctccccgcaccttccatcctctgcgcagccacagccgcgattcccgccgccccgccgcgctcaccttccctcccgcggcagagtgctccctcgacggggccgccccaaccatcgccctcctcatccgccatcgcgatccactcctcgacgcaatccatctaccccacagaactgctgccggcgtggcagatctcctcctcggcacctagatctcctcggcgcgatcaacggctgagcccgctgcccccaccacacaaccgatatgctctccatggaaggtcagggacctgctcgcccatgatctccatggaaggtggtctactgtcgacggcctctccctcgtgctccttcgtcaaccccgtccgccgcgccgccgagccccgagatcgcgccgatccgccattctcgcgccctcgccccgacacgcgctcaccaccggccctcaccaacctccactcgcgttccccacaccaccctccaccccatccgcgtccgccccatccgtagcacgcgggctgcagccgccccatccctaaaatgtgggcgctggcgctaccacggctccgcaccatgcctccgcgctgccagacagcgccgggcgataccatgcccccaccccggcttcttcctgccagtgtaatcggccactacttctccactgctgctcgccgtctcctcaaccaccgctgcgccacacaatcctcccgcgacgtgtctgattcaagccaggatgtctcacaggaggagcagcggaagcccgaaccgaatccaaccgagtcatctcaacgactccgccagtttccaatcgccccttttttaggcgttcaagttccttcgagatgatgacaagcagaggagagcgtctccttcaatccctctggcgacaccaacaacgcatccccgtggccatcctcgattctccttgccaaggaggcgacagccaagtcgtcgcggtcacggccggcgatccactcgagggtgttcctggtgagtagcaccactgcggtggggatcggggatgggggaggcggcaatggcgatggcggggtgcagctcgccgacaaccttaagatcttcaaggctgacaacttcgatctcgacgtctagattccttccaaggctctgtgcagctgttcatccatttctcccttcgatgtcggtgtttgtccctgctatgtgtgttggatcaccattgacatatatgtggaactgcctaaggaccacttcaaatgtgtatgtagcagcttcagcacagcaaccagcaatggccccatagagagaatgcagataagccatcttcagtatgccatacactccatagaatacaacgccagaggatgccatactgataagagaaggcaccaatcccttatacagcgagaagaatccttcagtttggatcatgtggcgggcaacaccaatgaccccacctaaagcttcaccaccaggagcatccatctttgtcctgatctgaaaccaacagctcaaatcaggggtcctggaatctgaatgcacaaatgtggagaccttatagaaaagggcacaagcacacatgcatcttgctgatcttgatttggcggaggcagacatcaagaaagctctagataaactacagatccagacatgttaatcatatgtactactgaagttggcttaatgaaatcttttgagaataacttgcctatttaacttgtgtcctttttgatggtggcgttgtttgttagctacaaaatcatcaatcaaagattgtaattatatcatatcactgttttctattaatttttaagctgccgtagcaaggcacgggcatcctactagttcccgtatatggtacaaaatgcaacattcgtctcaggatttatgtttctcgactatggtgacaggcctgttttcatccttctttcttcgttgtcttgtattctttttgtcaagttgggcatccaagtatctgccaatgtatacaaaagaaatgaagtgttataaagggtttgtatcctgcttgcctgaatttgggaaatctatcaattgcatcagctggtaaaacaagaattgactcgaaatttggatactggttgaaagaaccaaatggtctaaaagggttgagttggactaaaaacgttcaaaccaaaaaaaccgtggcaacgcatatacctaatatacacagatttcttcatcatatctgcctgcgtccctatccctccgtggccgatcggcggccgccgaactactgcactacagcagcggaaggggctcgtaccgtcgcatgtatacggcagccgaccaaccaaccaactccccggcagccgcaaatccttccgtcccaccgggaaacatccctctccctctgacgctgctgctactcaccctctcggatccctttccaccccacctcccagatgcggctggcgacgacagcgccggcgcctccgcctccggatccgttgatctagttgctgctgcttgattggggttaggaggaggtggaagaggagggaataggagatgttgttctggaaggacggcggcggtactggtggcggcaacggacgggaccttagcggcgggccgccctgcggccaggttcgtgtactcgtcgttggcgactcaggtgttggcaaatcttcattggtgcatctcttactgaaagattctgcagtggctcgaccagcccaaacaattgggtgtgcagttggtgttaaacatattacttacagtagcccagggagttcatctaatagcgtcaagggtgatgctgaaaggaacttctttgttgagctttgggatgtttctggacatgagcgctacaaagagtgccgttcacttttttattcacaaattaatggtgtcatatttgtttatgacctctcccagaggaaaacaaagacaaatttgaacaagtgggcagtggaggtttctgaatctgggaccttttcagctcctcttgggtctggtggtcccggtggccttccagttccttacctagttattgccaacaaagtggatattgctccaagagatggtagaagagtgagcagtggtaatcttgttgatgttgctcgtcaatgggttgaaaaacaaggtctgcttccatccagtgaagtgcttccacttgcagataactttcctggcaattctggtttgctcacggctgccaaagaggcaagatatgataaagaagctctaatcaagttcttccgcatgttgataaggagaaggtatttttcgaatgagcttcctgcccctagcccatggtcactcactcccagggaagataccattcttcccgtagaaactgtgaacgatgatgacatgttccaaagaaaaagctacggcggacagagctacaaatacaatggggttaccccactgcctgcacagcggaacctaactccgccccccacactctatccacagcagccaatgtcctcttcatcagaaaactacagataccacagattttcctcttcgtcaatacctgattcaagtggtggttcaaaaagccgagcgaaccttaatatatgatgggatatgtaagtccttatccattatcacctggagtgtgggaaaaaaacatgacacctgggttttttggttctcaggtttttgatctttttgagttgttcatctgtctttgatttgattgtaatatgtgcatgttgacagggcgccagagcattatgtttgtgggatcactagtgataattctttggttcttctctgtatatctcctaattttgtgtatgaattcaatatagttatttaggaaaacacattacatggtcagatggtctacactgtgcaacggcaatctgaatcaatcttttttcctgagtcccttcaagtcacctgggagaaatcaagtctcgtggtgttatggggcacagcaactttatataaatcagcattcagtctgatgggttttcactctatctggttccttatagacagattaaaggcatgtttggttcattacctcaattgccacattttgcctaacttttctacctaaggttagttattcaattcgaacgattaaccttaggcaaagtgtggcacatttagccacaaaccaaacatgccctatgattgtcaagcacatattttgttggcttgagaaatgtgtttggtataggcgaaccctactggcagggattttcgacaaatttgaattttagtttgaaaaaag

SEQ ID NO: 1350 - DNA, 2086 bp, Zea mays
cggcccgccaccagtagctcgctcggctccagatcccgcgccacaccacatagcatggcagaagatacagcgtagcaaggtccggacgttcaccagagggcagtggggatggggatggggccggcccgcgtgcgctctccgtgcgggaggcctcggcggcggtgccgctcccgcacccatcggcggcggctgcgctcgaccttaggcggcggggcggccaggctggcgctgtgacctgaaacggtggcgggatggggaggaggaaggagcacctagagagagtccgagtggaggcgtactgctgggacgtgttcaagccagtggagatggtggagatcgacagcatggagaagcttgacgacgcgttcaggatggcaagttggtgtcagaaatgcatctacctaatgcccagaatggagaagatagcaggacaatatcctgggttactcagaccttactcctgcccctctctcctgtttattctattatctggctccatttgtgcagcacaaaacttagcactttgtttcattttggaatattcttgcttttagtttctgatttaattgtagcttcttgctaagtgattgacattatctggttcttattcatttcaagttgttctttcaaaaaaattggaataaaagtcattttggaatcgtgtggttctattgctgctagcttagtaaggtaaaatagcctgacctcgtcaacaattagttctttttaggagaaaaagatgcaacaaatgaggattgatgcttcccgcaagagtacatgatgtacaatatatatctttagatggtttcattgttgtagctgatactaagaatgtagcttttttctttattcaaggtggtcgcagcgatctgtgattgtttatgcccaaagcgtagggttacccgtcttgttagcgctaccttagtgccgcttttttgaaccctagacatctcagaagaggggaagcactcggagatgaagctgaagcagagcaaacgtgagacgcaccgtgggcattctctatccaaggggaaggttgctcttttcttatattatttccctatgtgtcgtgctacattataaatatcaagtaattttaatggtacttcttttctgtaagtatacacattaatccttgcaaaagttaaatctacatgtgcatttatttatatatctatatacgcagtgaactttatgtactcaatctaaagatcgttctatattcaatatatctagaatccaatgtggcattttattagcttttagataccaaaccttgctattgactgttcatacatatgtttctaatcactggtagacttcataacttttagacatttttgacctttgtaaattcatattacatattgtattcagtttcttatctcaaatattatagaactatattattataggttgctggaacatgatctggattcaaaatggttggctattgttgatgtaagaatatactttatgtaccctcaagatcattctgcattcaatatatctagaacctaatgaggctcattctgcattcaatatatctagaacctaatgaggcatttccttggcttttagataccaaaccttgctactgtttgttcatatatatatatatatatatatatatatatatatatatatatatatatatatatatatatatatatatatatatatattcatgttaagacatcttattgtatccaatttcttatctcagatatcttgttctccccacaattttatgttctacatgagtggagagatcatatagctcatgagaaagatgagggtactggttagtggttgtatactgccaaataaagcttgaatcgagataggtgttgttgtttttttctttatatcctgttataatggtgcaaaattggatctacaactttgctagctcccccccccccccccccaaaaaaataaagcagatacctacagatgttggacattgtaaaagaattgtaaaatcaaaatatccatatgttgagaacaatgttgtcgtaatcgcttaccttacactgttcgtactgcaattgattattcttatgcctttaaagaagtagctgaa

SEQ ID NO: 1351 - DNA, 1295 bp, Zea mays
cctactcgtgctaaaacgcaagacaccaaagcaaccagtactactctctctctctctctctctctctctctctcacgatctcaccacaaaaaccaacacgctcggctcgatcgatctcgaaagtcaaatcagcgcaaggaatctaagtcgagcagccgcaaggaactgatcgagatggcgatggagccgaacatggcgaggcggctgtggcgcgtggtgcgcgccgtgctgttcatgctccgcaagggcatgccgaagcggaagctggccatggacctgcacctcctcatccaccgcggcaagatcgccggcaaggccctcggcaacctcatgaccgcccacgggcacaacagcgacaaggccgccgcggctgaggcggcgccgcctccgcagcacttctcgtgcggccgccgcggccacgacccgtcgctcgccgtctacgacccgcggggcacgcgcgaggtggagttcagctgcagcaacaccccgtcctacccgtccctccacctcgtccccacgggcaagcgcaggcgccgcaacaacaacaacaacaacagcagccgccgccgcggcacgcaccgcggcgcgaacggcgccgagcccggctggtacaactacgacgcgtccgacattgccagggccttcgagatcctcaacaacaacgagcagctgctcagcggcggcgacggcaacagctcggaccagccgtctcccctcgcgcttgtggccacgccgtccccggcgctgtgggcgagcttcggccgcacgcccgcgcacgccaggcagctgaggatcaccgactcgccgttcccgctcggggacgacgacggggactgtggccaggtggacctggacgccgaggatttcatcaagaagttctacgaccagctgcgcacgcagcaggcccttgccaccgccacgccggactactgcggcgggtatgcgcgaccggtctctggcatcgcctagaattcaacccacgcatccacacgcgtatgcatatgtaatatatatgtacgtgtccatagagtatttgtttgaacatgcatgatgcatgcatggataaagcatgttcgtttgagagctagctactggtggtagagctagtctagagcttggtctttgtgatatgagggagagattttgtacaacatcatcatatcatgtttgcaagctagatccatgcatgtatagtactcctatatatgtgtacgctgtatgtgtatattttgttgtagtgacatgtatcaattttactgcaagtaaggtacatgttgcaaagacattagcatata

SEQ ID NO: 1352 - DNA, 1603 bp, Zea mays
cccgtgctcgccacctcctcttccgtaataattccattccagaagcacctcctcgagtcactcatcagtgtcctgccaatgccatccagaaaaaaaatgctgtaaaataaaaataacagtgtccgtgtcttccttagttccttgctccactcagtcactctccagtctcctcacgacctggctgctcccaagctccgtcctctgctctgcctttatataatccccgagccacaccacctccctcacagtcgcagacacacaccgctgcttcaagaaaccaccgagagcccaaccgcacaggcaggagagagagcagggagccagggacagtagcgtggggccggggagcaaagatggaggggaaggaggaggacgtgcgcctgggcgccaacaagttctcggagcggcagcccatcggcacggcggcgcagggcgccggggccggggacgacgacaaggactacaaggagcccccgccggcgccgctgttcgagcccggggagctcaagtcctggtccttctaccgcgcgggcatcgccgagttcgtcgccaccttcctcttcctctacatcaccgtcctcaccgtcatgggcgtctccaagtccacctccaagtgcgccaccgtcggcatccagggcatcgcctggtccttcggagggatgatcttcgcgctcgtctactgcaccgccggcatctccggaggacacatcaacccagctgtgaccttcgggctgttcttggccaggaagctgtccctgactagggccatcttctacattatcatgcaatgcctgggtgccatctgtggagctggagtggtgaagggcttccagcaggggctttacatgggcaacggcggtggcgccaatgttgtcgcccctggatacaccaagggggacggccttggcgcagagatcgttggcaccttcatcctagtctacaccgtcttctcggccaccgatgccaagaggaacgccagggactcccatgtccccatccttgccccactgccaattgggttcgcggtgttcctggtccaccttgccaccatccccatcaccggcaccggcatcaacccggctaggagccttggcgccgccatcatctacaaccgggatcatgcgtggagcgaccattggatcttctgggtcggccccttcatcggcgccgccctggctgccatctaccaccaggtgatcatcagggccatcccgttcaagagcaggtcttaagctgccgcgggtgtgctgagacatgtggggaatgtattgtctgcccacgcctagtttctctgctgaatcttccatctctcttcccttcaagactgctcactgctgcactgctctgttatctgaacccagaacttcgtgtactcctgtaccgagctgtgtgtatgtttttttttcttccatcgtgtttgttgcaagggttcccgtctccttttatgcgttgggatcgtggcaagaaagggcagatatcatgtggaaacgtgggtttataactatcagctggatttttcatccaagtggaatcgattcagaattttcttttgttcttgttttcaacagaattttccaaccagccatccaatgcatcgtgaacc

SEQ ID NO: 1353 - DNA, 1168 bp, Zea mays
caagcctcgcacacggacacggccgcgcgcataaaacgcccgcacgagcatcgccaatttctatctgagaactcagtctggagacgacccaacgtcccagctgctggccaactttcgcctttcttcgccatcatcgcctcctctcccattcattccttccttccttccacacgagagcctgcctttttcccgatccgcatcgtcatcaaatgggccatcttttcctcctcctggtagccctcctcctactcacctccacgcgtgccgccgccgccgtccacgccaaagcttcggtcattgaggaggcgagtttcgctggcatcagaggcgtgatcggatccaggccgccgacctgcgaggggaggtgcaggtcctgtggccattgcgaggcagtgcaggtgcccgtatctccgcagcagcttcagaggaggaagaaggagggtctcggccttggcagcagcagagctgctgctgctgctgccggtggaagagcaagagcaatgccggcctcctactacgaccactccaactacaagcccctgagctggcgatgcaagtgtgggcggcacatcctggacccttgaaagatgaaacgccagcgctggtcgatcggaaccagtcttctgctgcgcttgtggatataatgtactaatagtacaggatcacttttgggtttggtgattgttttcatctttcctcttatattatgatcaagaaggtgctgctgtcccttttggccgtggtgatcaccggagaaacgtatatggtgacaagcgtatatatgctcctcttgctttacatggacgcttgccgtcagttaactcgacgctgctgctggataatagcattcagtgccagactattatggcatccaagctaggtaattttgttcaagcttggttcgatctatctaagccatcctttattttggcttcacttttgtcagagagcacatccagctaccatctttttggatcagcatcttcagactttctgttcaggctctttgcagccgcctcgcacgcctccacactagaaacacatgaacagacagttccatggcaatgagaagccgcaggaaaggatgttcatctttcttcgtgttaaaacaacgctagaagctagccaggaactaggaaggaactgcccccatctaaaaaaatagaaa

SEQ ID NO: 1354 - DNA, 2627 bp, Zea mays
aacagcaccagaaccgcgcgcgcgcgcgggggcgggcgccgggatggacctcacgtcgttcatcacgtccgtgctcacgtcgttcgtcatcttcgtggcgctggtgctgctgttcacgtggctgtcgcgccgcccggggaacgcgccggtctactaccccaacctcctcctgcgcgggctcgacccgtgggcgggccgcggccgcggcacgcgcagccccgtgggctggctccgcgacgccatctccgcctcggagccggacgtcgtcgccgccggcggggtcgacgccgccgtctacctcgtcttcctctcctctgtgctgtccatcttggtgtactctgggatcgtgctgcttccggtcctcctcccagttgctgcaacgggtggtgccctaagtaccatccctatccctaccaacaaatcagcccaatcggctcagaacttctcgtcaatagaaaggctcggaatgggcaatgttcctgagaaaagtatgaggctgtgggcatttctgttgtcagtctattgggtttccttcgtcacctatttcgtcctatggaaatcctacaagcacgtgtcgaatttgagagctactgcaagatcagcaccagatgttaaaccagaggagtttgcggtgttggtgagagatatccctagaccgtctccagatgaaactataaaggactctgtagactcatattttcgagcccttcacccaaatactttctacagatcaatggttgtgacagatcacacaaaggctgataagatataccaagagatcgaaggtcacaagcagaaaattgctcgcgccgaagtcgtatatgcaaactcgaacacaaggcctactcataggactggattccttggtcttattggtacaaaggttgacaccattgaatactgtagtgagcagattaaggaattactgcccaaactggaggctgaacagaagactacccttcatgagaaacagcagcgggctgccattgtcgtcttcaatagtaggtctgccgcagctttcgcatctcagactctccatgctcaagtgtatgataaatggacagttatggaagctcctgaaccacgccagataatatggtccaaccttccaaggaaactatatgataggcaaatcagacaatgtgtggtttatggcattgtctttctcatagttgtgttctatatagttcctctcactgctatcgctgctgttacaaccctggaaaacctggaggcgaagctgcccttcctgaagccagtggtggagcaaccagcaatcaagacggtcttggaggcctaccttccccagattgcactcattgtgttcctcgcattgctacctactcttcttatgtttctctcgaaacaagaggggatcccttcgcagggccatgcagtcagggcggcatcgggaaaatatttctatttcatcgttttcaacgtcttcctttgctatacgcttggaagcacattgttcaaatctttgacgaccattatcaatcaccctgctgagattgtgaatatgcttgccaagagcctgcctggaagcgcaacgttcttcctcacgtttgtcgcgctgaagttcttggttggctatggccttgagctctctcgcctggttcctctcatcattttccacctgaaaaggaagtacctatgcaagacggaggaagaagtgagagcggcatgggctccagtggatctgggatataacaccaggataccaaatgacatgctcatcgcaacagttgttctgtgctactcagtcattgcgcctttgattattccgttcggtgtcgcatactttgccctcggatggcttatagcaagaaatcagatcctgagagtttacgttcctagctacgaaagctacggacgaatgtggccacacatgcacacgaggatcatcgcggctctgatggtttaccagaccaccatgatcggcttcatctccctgaagaagttcgcctacgcgtccgttctcgtgcccctgcttccagccagcataatcttcgcctacgtctgccacatgcgcttctacccggcgttcgccaagactcccctggaggtggtggtgcggcacgacctgaaggagactccgaacatggaggccatctacaccgcgtacataccgccgtgcttgaagcctgataagctcgaagatctggacgctttcgaggacgcccagtcgcgcgccacctccagagtcccgtctatttagctgtgcacatcgttgacttccgcggaagacttgaagaaattctgttcacttgtcattacattcgtgtgggatttctgatggatttcaatgcttccacgttgaaccctctggacttgtttcaggataggaatctgatgtgaagaatgtacatatgctcgatctgtgtgtctgctgagcgtgtgtggatgtggactgctgtaggtaggtagatgctgtggatattggagggttctaagttgtcttcatttccatccaaaaaaaaaaaaaaaaaaaaaaaaaaaaacaaaaaaaaaaaaaaagttgtcggacggtcgttccagagccaacccttaaagtcaatcgaaataaatatagtctgatttgaaaaattaatgacccaaaaaaaaaaaaaaaaaaaaaaaaaaaa

SEQ ID NO: 1355 - DNA, 1992 bp, Zea mays
cacaccctcctcctccggttctcctcgcaccttctcccacctctgctctgctctgctctgctctcccaggccaggccctgcagctgcaagcaccgaggacagacagagtcgctcgcttcgccaccactagctgttgcttgcctgccacccaaggatttccttccatcgagatcaagtagcgtagcggcttgcctgaccaagaggcagagctctcgatgacgaagcagggcatggtggtgccggtgcctgaagcggccgtggcggtaccgcccaactcggcgccgctgttccagtacccgccgccgcgggccgcgccgggcgtcgccgtgcgcaagaagtgcctgcagatgggcgccggcgccgggcgcatcggcggctgggtggagtccatgcgcgcgtcctcgcccacccacgccaaggcggccgccgcgctcgccgcgggcgtcgaagaggagcggtacgccgcgtggatggtgaaacacccgtcggcgctggccatgttcgaccagctggtagcggcgtccaaggggaagcagatcgtcgtgttcctcgactacgacggcacgctgtcccccatcgtcgacgaccccgacgccgcctacatgtccgacacgatgcggcgggcggtgcggagcgtcgccaagcacttcccgacggcgatcgtgagcgggcggtgccgcgacaaggtgttcgaattcgtgaagctggcagagctgtactacgccggcagccacggcatggacatcaagggccccgccaaagggtcccggcacaccaaggccaaaggaggcggcgttctctttcagccggccagccagttcctgcccatgatagagcaggtgcacgattctctggtggaaaagaccaagtgcatacctggagccaaggtggagaacaacaagttctgtgtgtctgtccacttcagatgcgtcgatgagaagagctggatcacgttggcggatatggtgaagtcggtgctcaaggactacccgaagctgaagctgacgcagggcaggatggtgttcgaggtccgccccaccatcaagtgggacaagggcaaggccctggagttcctcctcgagtccctcgggtacgccgactgcaccgacgtgctgcccgtgtacatcggcgacgaccgcaccgacgaggacgccttcaaggtgctccgcaagcgcgggcagggcgtgggcatcctcgtgtccaagcaccccaaggacacctgcgcctcctactcgctgcaggagcccgccgaggcaagtataccccgtgtccccgtctcgactccgccgccgccacccctgcgcctcctacgacgctgacatcttcttcttggtgacgtgtgcaggtgatggagttcctgctgcggcttgtcgagtgggagcgcctctccaaggcccgccccaagtggtgatccaatccacgacgacagatgacgatcgagctgggattaattatacactatatatgctcaatatataagttagttatactaagggtgatggattaattagagggatcgggggagccgggagcgagggagtaattaagaccgtacgcacccactccctacttgagctgagctgagctgagctgagacgagagctcgctgcgctgtgcacggcacagtcatgtgcgtccagtccacggcgcctccctatgtttttacgggagccatgtggcggctgctgcgcggcaagggtgaagaatgtacgtgcggctagctgtaacactccagtaattacttcctactctactccagccatgaaccttggctctggatcctgaattctgattgtgtacaagtacaagagagcaactgctgtcgatgcctatgtatgaaatcatctctataaattaagtagccagctttcctctgtacaattctatttttctgctcgttcgttctcagcgcatacaggaacctcactggtttcatttggtacagtacattaagttccagtggaacgaaacgaatgtctacaaggactgtac

SEQ ID NO: 1356 - DNA, 1893 bp, Zea mays
tcaattttttggtcctcgactaccctaggttcaaatcctaggtccgccattgcacctgaagcgtagctctaggaacaagacgtgtctagttgtgtgcgttgggactgggggaggaataagggattgatggccaacagcgagtatgagtacgtgaagagggagttcgagtttgatcgctgcctcccgccctctaactggatcgttgtccgtatcgacggttgccacttccacaggttctcaaaggtccacgcctttgagaaaccaaatgatgagaacgctctaagattaatgaacgcttgtgccactgctgtgctcgagaaatttcctgacatagcctttgcttatggtgttagtgatgagtacagtttcattttcagagaggaaacagagttctatcaccggcgagaaagcaaaattctctctttatgtgtttcctacttcacttctgtgtacgtaatgaagtggaaagacttctttcctaacaaagagctgaaggagccaccatattttgatgctcgagctgtatgttacccgaatttgaagactattcgtgattatttggcttggagacaagtggactgtcatataaataatcagtacaatacctgcttctggatgttggtgaaatctggaaaaagtgaacaagaggcccagctagctttgaagggaacatttgcaaaggacaagaatgagctgcttgctaaacaattccaaataaactatgatgatgaactggctatgttccgcaaaggatctagtgtttaccgagagaaggtagaaacaactgtgaagattgatgactatggggagcccataaaaagaccaagattgaaagttacagtggcacatgttgataccatagggactgcgttttgggaaaaccatccacacattcttcgagaaggaaaatttatgcacgggtttgtaaagaaatttggcatcaatcacatattttcaccttgtaattggatcattgttcgcatcattgcttgccaatttgaccaattctcaacaattcattcatttgacaagccaaatgatgagactgcactaaggctgatgaatgaatctgcatctttgatgatggagcaataccctgacattgtctttggctatggttttagcaatgagtatagttttgtgttccatgagaagagtgaactataccagagacgggaaagcctaatcctttcatcatgttcttcatatttcacttctctttacatgacgaaatggaaagagttcttcccctacacagaattaatgcagacaccacactttgaggcagatgctctatgttatccaaaactaaagatcatatgtgaatacttatcatggaggcaagcagagtgtcatgctggcaaccaatacaacacatgcttttggatgctagtgaaatctggaaaaagcgaaaaagaagcccatgagatattgaagggaacgttgtctaaagataaaaacgagttgctttttcagcaattccaaatgaactacaacaatgaacctgctatgttccgaaagggttcatgtgtctatcggcgaaaggtggaagaacttgcgggggctgaggacggcggcaatggcacatcaagagagcggtggcatgtgaaggtggaccacgttgacctagggcccggtttctggcgaaagcacccgtggttaatgactaattgcactcagtagtcccgactgatacatggtttttgtactggtttatcagtgtatgtaactcttgctgacacaggtctagaaacgaaagacggttgtttgttcacacatcgaggcttctcttcaccctctattatgttctgatggttttctgagtcgtctgcctgaagccttgctagcgttgttttccttctgagctgtgaaaaccttttttcccattttttt

SEQ ID NO: 1357 - DNA, 2529 bp, Zea mays
gtgacaggggtcatcaccaaggggtgtgtcccttggggatgtgttcgtcgagccccttggattgatcaccatatcacatataactttgtaatatgttattttgtaacatagacgaagctctcgtgaaccagtgcagcgctgcaggccagcgtggaaactggaaaagctgcctccgccaaatccaaaccaaacgggacggtcgccggaggaagcatacccgaaactcccctcccctctccttacaataccgcgaggcggcggctgacgtcgcttagccgctttcccacaccttcgccgccgcctatactcctgcagaaatagccccagggagggcggttgctgctgcttcgtgtgcggtgttccttcccccgccgcacgcgggatccatttgacggacggaccgaccgagcgacccacccgtccaccgagagccatggggcagaggcagagccacagcaagcgggacgggagcagccacgggcggcggtcgcgctcctttcagcagcagccgtcggcgcagtggggcgccggaggaggagggtactaccagcaggacccaagcaccggctactacggcgcgccggtgccacaacagggaggagggtactaccaacaggacccaggcaccggctactacggcgcgccggtgccacagcagggaggagggtacgccgcgccgtaccgggacaagcccgccgccgccgccgccgttgctgctccggcgccgcaggctgcgaagccgcggcagctggatcgccggtactcgcggatcgccgacgagtatcactcggtggaccaggttactgatgctctagctcaagcaggacttgaatcatcaaatcttattgttggcattgatttcacaaagagcaacgagtggacaggcaaattctcgttccatggacgcagtctacatcacattagcaacacaccaaatccgtatgaacaagccatctcgattattgggcgaacactatcgaaattcgatgaagataatctgattccatgtttcggatttggagatgcatcaacacacgatcaagatgtcttctgtttctctcctgacgagaaaccttgtaatggatttgaagaagctctcgatcgatatagggaacttgtaccacatttgcgcttagctggaccaacatcctttgcaccaattattgagatggctatgaccattgtggagcaaagtggcgggcaataccacgtcctattgataattgcagatgggcaggttacgaggagtgtagatactgcatctggacagctgagttcgcaagagcaaaaaactgttgatgccattgtgaaggccagtgaattgcctttgtccattgtgttagtaggagttggtgatggcccctgggacatgatgaaggaatttgatgacaacattcctgctcgagcttttgacaatttccaatttgtaaatttttcagagataatgtccaaaaacatggcacaatcaaggaaagaggctgcatttgctctttcagcattgatggagataccaccacagtataaagcaaccgtggaattagggattttgggtcgtcgctctttcaagtctcctgacagggttcctctgcctcccccttccggaagtcatggcgcttattcctactattcatctaaaggatttagcaaaccgagcacctaccctcagagttcttcatcctcatcaccctatcctcactatgaaactccacatacagccaccccagctgcgccttcagccacttatgacaaccaggtctgtcctatctgcctcgtgaaccccaaggacatggcgtttggttgtggacaccagacctgctgtgactgcggacagatcctggagtcgtgcccaatctgtcgcactcccatcaccacaaggataaagctatactagcaagtagtggtttggatcattgtcaatgggtggtatactggaggagccacccagcgtcacactggaggatcgtgtcagcatgcccatagatcgattgcaatcggaaagctggagcggcactccatagatcgatcgattggatctaaggattgcagggacaaagcatggatcaattggagcgaggattgcagggccgttgattcatcgctcagggttgtcccagtattcatatccaccaggaatgatccgaatctcatatcgcaataaataataaaaaataataaacgagcagaaagatgagaaacacacacaaaaaaagtggtggcgtggaggatcagacgattgcgtgtagggtcatcacacgcaactcagcttggttactactctaatctgcaactttagttgtacatacccaactttaggatcagaggattccttatttgtgcgtgtgcccgtgtttttttgtttgtttcgtgatttcgtccgagatatgttgatttgttctttgctagcaattgtgtaaaaatccaatccgcattttttggcgccatcgaaataaatgctatgttgtaaatttggccatcattagttcattgctctatgatgctggcgcgcctgtcagctggcgtgaattgctt

SEQ ID NO: 1358 - DNA, 3249 bp, Zea mays
cctagagccgccgcgtcccgcgtgcgtcgtgcggcgctctcccgatcccgagtgcatgctacctcacctgcgtgtgcgccgcgtttcaactcgagaaagaagacacaccgtcgcggcgcacgcggcctctggtttctgatttcctggttaccctttccctccctgcatttgcctttcagatcaggcggcagcaccttcctctcctccccttcccttccgtctcatcttcgttcccttccggggtcatcccttccgtcctcctcctaccaagtcccaaggccgcgagacagacagacagacagacagaaagagagagcagagcagacaatggcgacgctcgaggacctgggcgtctccgccttcatcaacatcctgggcgccttcgtcttcctgctcctcttcgccgtcctccgcatccagcccgtcaacgaccgcgtctacttccccaagctctacctcgcgcacaagcgccaccagcacgaccacgccgcccgctccgccttccgccgcttcgtcaacctcaacctctgcacctacgtcaccttcctcagctgggtgcccggcgcgctccgcatgtccgagccggacctcgtcgcccacgccgggctcgactccgccgtctaccttagaatctacacgctcggcctcaagatatttctgcccattacgactctcgcccttctggttcttatcccagtcaacgtatctggcggcacattacttgatctaagaaaggaagttgttttcagtgatatcgataagctttccatatcaaatgttagccctggatccaacagattctttatccatctcttgatggcatatgtgttcacattctgggtgtgctttatgctgtacaaagaatacagcaatgtagcatttatgaggttgcatttcctggcttcccagaagcgctgtgccgatcatttcacagtgattgttagaaacattcctcgtgtctcaagtcattcaacttctgaaacagtggatgagttcttccgaagaaatcacccagaccactatcttggtcatcagcctgtttacaatgcaaatcggtatgctaaacttgtgaagcaaaaggagaggctccaaaactggttggattactacgaactgaagttcgaaaggcatcctgagagaagaccaacaagacggacaggatgccttggtttctgtggcagggaagtggatcaaatagactactaccgggctagaatcagcgagcttgagaggaggatgacatcagaacgacagaaaattctcaatgacccaaaagctgttatgccagtttcttttgtgacatttgactcgagatggggtgcggctgtgtgtgcacagacacaacagtcaaagaacccaacccaatggttgactgattgggctcctgaaccgcgggatgtttattggcaaaatcttgccatcccatttttctctctcagtatccgcaggtttctgatgtctgtcgctgtctttgctctagtgtttttctacatgatccccatcgcgtttgttcaatcgcttgccaatctcgagggtcttgaaaaagttgctccttttctgaagccagtaatagaagcacatgtggtaaaatctttccttcagggatttcttcctggtctggctctgaagatttttctctatattctccctactgtcctgctaatcatgtcaaaggttgaaggctatgtctctttatcctcgctggaaaggaggactgcttcgaaatattactacttcatgctggtgaacgtatttcttggaagcataatcgctggcacagcatttgaacagctatattcgtttctccaccagcctcctacacaaataccaaggaccattggggtagctataccaatgaaagccacatttttcatgacatacgtaatggtagatggctgggctggtattgctaacgagatccttcgagtgaaggctctggtgatataccatctgaagaacatgttcatcgtgaagacggagagggacagggatcgggcgatggatcccggcagcataggactcggagaaaacctcccgtcccttcagctgtatttcctcctcggcctcgtgtacgccgtcgttaccccgcttctcctgccgtttataatcgtcttcttcgcctttgctttcctcgtctacagacaccagatcatcaacgtgtacaatcaggagtacgagagtgctgctgcgttctggcctcaggtgcactcccggataatagctagcctactcatctctcatgtaactctgtttgggttgatgagcacaaaggaagctgcgtactccacccctctgctcatcttcctgcctctgctgacgatctggttccacaaatactgcaagagccggttcgaaccagctttcagaaagtatcctcttgaggaagcaatggcgaaggacaccatggagcacgcatcggagcctaacctgaacctggaatccttcctggctaacgcttacctgcaccccatcttccgccttttcgaggaagccgggaaagaggaggagacggtggaggtgaggatcgacaaagccgagaagcagcagcatcgccatgaggaggacgaggctcacgcgaggagctcgtcgcagtaccgggaggaggagactcacttcaggagcacgcacgagacgcattaccaccacgaggagagccacgtcagcaggagcacccagtatcatgagggcatccacgtgaggagcgacacggactcgccgtcgccgccacacttcgtctaccactacgacatccagcagtgatgatgtcgtctctaactttgttttcctgggtgtcttgtgaatgcttctcttggctaacctgtccagccccccccccccccccccccaagaggtttgctaaagtcgctgatgattgatgaattgttgcgtgtacatgcagggtagggtctagtgttgtagtgactgtaaaagttctggtgtgccatgggacctgaacattgattccatgcaggaaaaaaaagaagtggatgaatcaagttgagtattgcgtggtatacatgagaatgtcttcataattcatttgaaaacatggagattaaaaaaaataacaggctctgtatgcaagcactgcatagagcagcagatatgagcgtcggagacatgctcctggtcctggagactcatgtcatcatggttaaacatgcagcgacaatggtcaagctttgatcgatgttcggcaagtgccccagccacagccagcctgggaaggaaatctggaaatgatagcat

SEQ ID NO: 1359 - DNA, 1272 bp, Zea mays
cataagtgctcttggagatgagaaaaaaagaaaagaaggtgctcacgttccttatcgggacagcaagctcacccgtcttttgcaggactccctaggtggaaatagtaagactgtcatgatagcttgcataagtccagcagatattaatgctgaagagacattaaacactttgaaatatgctaaccgggcacgtaatagccgaaacaagctctgcctgcaagtattcaatctgctggcgcattcttttcatctcatcagcgataggatttctattgacaatcggcttgttttgggcacgagatactattgactccaagtacagaccagtccagtactgttgtacggcctggttccgtggaacagagatgggcaagcaaaagattgtgctcaagttgcccctggatgacgagaggaagaggaggaaggccttcaaggcagctgtgggaatgaacggtgtgacgtccgccacgatggagggcgacaagatcaccgtcgtcggcgatggagtcgaccccatcacgctcacaaccatccttcggcgcagcctcggctacgcggagctgctcagcgtcagctccggcgacgacaagaagaagggcgacgggtacggctacgggagcgccggtggcatgatgtacggtggcggcggatacggtggtggcaaagagggcaaggagagcaaagagagcagcggcggcaagagcagtggcggcggtgggggctacggcggccattaccaggcgatgccgtcggtctcgtaccctgccgcctaccagcagtacaacgccatgccgccctaccccgccgcctactcctatcctgcagcatacccgcagcaagaacaggaccctggatgcagcatcatgtgaaaaaacatcctacaagttaatctgaggagttggttgaaggtggccgaacacatggagatcagattaacatggttgggttcgtccggacaagatgatccatgctgccttgagctgtgcaacagaggatgatgatccaggatgtgatgggcattatcatccgtgtaattatgtacagggttggccagcaaagttgacggattgatctgttggagttggaggtgttggtggaatgggaggcagagctgttccgcaagattatgattcaagtgcagactaagtagcagcaccgatgtttccttttcgtttctttcgtttttggtaaagttgtagtgtttgttgaagaaaaggattgcaataaaattagtgtttatacaaaaaaaaaaaaaaaaaaaaaaaaaaaaaa

SEQ ID NO: 1360 - DNA, 2126 bp, Zea mays
cctcgcttcacgccttctcaagggcgggaaactctcaaaatcatcttctccgcaccaattccgcaaaccctagaaaaatctcgctccgcaaaaccatgagcgcccctatggagatctccttctctgcgcccccaccccctccggacgcagcgtctaccgccgccgcttccccgctgctggaacctgccgccgcgcagatgctgccccctgtcgccgcggtctcctcctcgcagccgatgcagcagacagctgcggctgcggccgtggttgctccttccccggccgacgataaggtcctcgtgtcagttgaggtactgttgcacgccacgagcgtagctcgccacgaggacgtccaggtggcggtcgagaggatgctcgaagctcgaagcttaagctatgttgatgggcctgtgccaattcctgccgataattcttttcttcttgaaaatgtcaaaaggatacgaataagtgatactgatgagtgggttgagaatcacaaagttctcttattttggcaagtcaagcctgtcgtgcatgtgttccagctgagtgaagatggtccaggtgaggaaccaagcgaggatgatacactctctagctttaatgagtgggccttacctgccaaagaatttgatggtctgtgggaaagtttactatatgaagttggtctcaagcagaggttgctgagatatgctgccagtgctttgctttttactgaaagaggtgtggacacatgtctggtttcatggaaccggattgtacttttgcatggtccacctggaacaggaaagacttccttgtgtaaagcactagcacagaaactttctattcggttcaaatcaaggtcgatgctgaatgagatatgtttctttaccagatgtgttattcttcagtcttcactgacacttgtatatactaggtattctatgtgtcaattgattgaagtcaatgctcattcattgttcagcaagtggttttctgaaagtggaaaactggttgccaaacttttccagaagatccaggagatggtggaggaagaaagcaacctagtatttgtattaatagatgaagttgaaagccttgctgctgccagacaagctgccatatctggctctgaaccttcagactccattagagttgtgaatgcactgctaacacaaatggacaaactgaagtcttggccaaatgttatcattttgacaacatcgaatattactacagcaatagatattgcatttgttgacagggcagacattaaggcatatgtcggaccccctacgcttcaagcacgatacgagatcttgaggtcatgcatacaggaactcttaagagttggtattcttacatatcctcagggtagtagtgtgccatgtattctgaactattcgaccctgaatgagaagaaacactgtcctgaggctgcagaaccccatggtgcgcttcatctatccaatctactctatgaagcctcaaaactgtgtgagggacttagtggccggtcattgaggaaactccctttcctggcacatgcctctgttaccaatccgtcatgctgcgatgcttctactttcttgcatacattgatacagactgcacggagagaagtcttggagtcacgtggttagttcaaccttgaaaccttggcgtcttttggaagagcaaaaggctaacagttcattccaaacaccatgtcctggagtcccctgatgtgatcaattgccgggtcgttaaaaccgtaagtaagtccatccgatcgctagagttaggttagtgtttaaatgtagagagacgagaacaaagaatgaatgaattggcttaattccattgattgatcggtatgtatatacatggcgttccttagggttgtcacacggttaatagtaagcctagtcacaaatctgtttgaagatagatccgttggatgatatcattggcttgtgattgattgatcaggttcttaacaagtttagaaagatgcaatcggtgcatatctgattgtggcttcagcacatttgatctctgtaatctttgcatggtatgataatacgtaccgtcagggatgcctcgctgttgttccttgtcagtcagattctccctctcgccctttaacaagtcaaacaattttg

SEQ ID NO: 1361 - DNA, 2066 bp, Zea mays
atacccggataaaaaaatactgccccgggacgtttcaaaactcccacggcttcgcgcaagaccgtgccgcggtgcgcgctcaccgctcggcgcttcgtccccaaggcaccgcggacgccgagcaacccgcataaatcccctgctccgaagtccgaactagttgctccaccgaatcctcgaatcgaatcgcgaccaaatcctcgccccagccccgcacgcgctcccccatcacccccacccggcgcttacgcaccaaaccccacttcgtttctcactgcaatccgccggccaaccgataccaccccacctcttcggcgcaatgacggccgtcgcgacgccgacgccgccaccgccgcggcagctgagcctggaggaccttaaggcaatatccgtgctcgggcgcggcgccaagggcgtcgtgttccacgtcgtgcacgcccatggagaaccggacggcgagggcgagggcggcgccgcggccgcggccatggcgctcaaggcggtctcgcgggaggccgcgcggcacaagaaggcgggcagcggggacggggacggacaccgccggatctggttcgagcgcgacgtgctcctgtcgctgcgccacccgctgctcccctccctgcgcggcatcctcgccaccgaggccgtcgtcggcttcgccatcgaccgctgcggcggcggggacctcaactcactgcggcggcggcagaccgagaagatgttctccgactccgtcatacggttcttcgccgcggagctggtgctggcgctcgagtacctgcacagcctcggcatcgtgtaccgggacctcaagccggagaacgtcctcatccaggacagcggccacatcatgctcgtcgatttcgacctctccacgcggctcccggcgccgccgcaggagcctgacgcgccggtgaccagtcccaatgccaagccggcgcttccggtcgccgcgccgtcgccgagccgcggcagtgcaaggaagccagcgggcgccgcactgtgcttcccattccgcaccgccatcgccacaaagcctgccgcccggccacggactcgaggtcgccgctgtccacctcgcgcacggcctcctcctcctcgtcgtcgtcgtcctcgacggcgaccacggcctcctccgcggcatccgccggcgggcggactcccgcgaagtcgaactcgttcgtggggacggaggactacgtggcgccggagatcatcgccgggcgcggccacgacttcacggtggactggtggggcctgggcgtggtgctctacgagatgctctacggccgcacgccgttccgggggcagagccgcaaggagaccttctaccgcgtcctcaccaagcagccggagctcgtcggcgagcagacgccgctgcgcgacctcatcgcccgcctcctcgagaaggaccccgagaagcgcatcggcgcgcgcggcgtcagggcccaccctttcttccgcggcgtcgactgggaccgcatcctgcaggtggcgcgcccgccgttcatcccgacgccgccgccgcaggacgagggcgaggacggcgacggcgacgaggcgcttgacgtcgagaaggtcgtccgcgaggtgttcgcgtccaacgacgcggagggcgggaaggcttggcctgtggcggacggaggccgtgtcggcggcgacggcgattgcgacgggaggggagatcaatctaaagatggcgatttctccgtgttcttctgagctatttattttcttttgatttgttttttcttttcttgtttttaaaaacaatagctactagtggtagtagatgtatatgctgtgtatggagtattatttgttctcctcaaggatgatgtgatttagcagctgatattagggagtgagtacggcgcaatgatggccggtggagtacatacataaattataaagagattctcctgttcgatggggtatatagccattagagtttgtaattttttatctcttttatgttttggtttgttcgtactttgttcggtacataatgaataatgagagcgcaattgtctgttcaaatgtaaatacttttctctattgcttgc

SEQ ID NO: 1362 - DNA, 1995 bp, Zea mays
tacctaccagccaaaccaagcaagcagggaatccccacaaggcagcagatggaagcgaaaggtggcggtggcgcggcgtggcgcgggcgcgggcgcggctagctaggccggctcgtgtgcgtgcgcgaggagacagccacagccatacagggatgctgcctgcttcgtgaccgtgctggtggtggtgggctgcagcctgcagctcgtatcacacgcccacagtgcaggaaggagggagtggaagaagagagaggaagttgtttttaaaggcaacagcgagtcccgctgctgtccctctccttcgccacctccctccctcactctcttccctccctctcggaggaggagagagaagagagggagccagtccagctccagccagccggacgcccggaccaacaccaccccgcctccccctccccccgccccaccggcccgccctctcgcgctgccgtacccacggccccacgcacgttcacaagtctcgtcgccgccgcaatggagtccggcggtggcggggacgaccagctgcacggcctcaagttcggcaagaagatctacttcgaggacgccgccggctccagcagcggcagcagcagcggcggtggcagcgcgcccgcgcctccagcgacgcagcagccgtcgccgccggccgcttcgcctagggccccggccggcggcggcaggaggggcagggccgcggccggcggcgcgggcccctcgacggcgcccgcgcccgcgcgctgccaggtcgacggctgcaacgttgacctcaccgacgtcaagcccgcctactactgccgccacaaggtgtgcaaaatgcactccaaggagccccgcgtcctcgtcaacggcctcgagcagcgcttctgccagcagtgcagcaggttccaccagctgcctgaattcgaccagctaaagaagagctgccgcaaacgcctcgcaggccacaacgagcgccggaggaggccgccgcctggaccccttgcgtcacgatacggccgtcacgctgcgtcgctcggcgaagagcccggcaggctcagaagcttcatgctggatttctcgtacccgagggtctcaagcgccatgaggggtgggtttccggcggtgaggcccggtggtgaaagggtgcctggcggtatccagtggcaagcgggcttggatcctcgtcaccaccaaggcgcggtcgcgggatacggcgcccactatgggagcgagggtggtagctcgtcgtcggcgaggccgccggtgttccctggcccggagctgcccccaggtggatgccttgcaggagtccccgcggactccagctgtgctctctctcttctgtcaactcagccatgggatgctgcccacagccacagccacagccacgctgcgccaacagcgggtttcgacggcggcagccctgtggcgccctccctcatggcggcgagtagctacatcgcgccgagcccctggaccgagaccgactcctggggccacgaaggcgggcggagcgtgcctcagctgccacctgacgacgtccccctcggcgaggtgcactccggctcgagcagccaccacggccagttctcaggtgagctcgagctcgccctgcagggaaacaggccagcgccagggtcggcggcaccgccagcgccgcgcaataatcagggctccgcgggcacgttcgaccaggctggcaacacgatggactggtcgctctaggccgggggccgaaataaagcgcagcagatcctagccgcgcagggagatggaggaggctgaaagtctgatgctgcacgctgcttgcttagcttagagcatccagcatgataagagtgatgaactgatgcggtgtcaggagactagtttattctgtgcttcaccatgaactcgtctgtcgcggcgtctatgtagacagacggcacacgtccgtggttcgaagttaccagtatgcttgtcggggactttgctcgcgatgcattaatctcattgttcaccatccagaaa

SEQ ID NO: 1363 - DNA, 1372 bp, Zea mays
ggcaaagcttcgggcaacaacagcttgctcgactcagcgcccatctatctctcttctcccccgcctgtctagccagcggcgaccaccaccaccgttcagttattatagcaagcatgacgaagcacggcgtggtgatcggcccggaggacgtcgcggcggcgcggcatttctcgttcccgccgccgaggacggcggcgggcggcgagtcgtgcaggaagctggcggcgcaggtggacctcggccccgccgtcgtggggtcctggctcgactccatgaaggcctcgtcgcccaggcacaggctcatggcgcccgtgcccggcgccgccgacgcggagcacgacgactggatggagcggcacccgtcggcattggaccgcttcgacgcgctggcggcggcggccaaggggaagcaggtcgcggtgttcctggactacgacggcacgctgtccccgatcgtggaggaccccgaccgcgccgtcatgacggacgagatgagggacgcggtgcgcggcgtggcggcgcgcttcccgacagcgatcgtcagcgggaggtgcagagacaaggtgttcaacttcgtgaagctagcggagctctactacgccgggagccacggcatggacatcaagggccccacagcacagtccaagcacaccaaggcaaaggtcagcagctaccaggccggagccgttctatgccaacctgcgagggcgttcctgccggtcattgaggaggtgtaccgcgcgctgacggcgagcacggcgccgatccccggcgcgacggtggagaacaacaagttctgcctctccgtccacttccgctgcgtccaggaggagaaatggcgcgctctggaggagcaggtccggtcggtgctcaaggagtacccggacctccgcctcaccaagggcaggaaggtcctcgagatccggccgtccatcaagtgggacaagggcaacgccatgcagttcttgctcgagtctctcggttttgctgacagtaacaatgtcttcccgatatatatcggagacgatagcaccgacgaggacgcgttcaaggtcctgcgcaacatggggcaagggatcggaatcctcgtgagcaagattccaaaggagaccagcgcatcctactccctgcgtgaaccttccgaggtgaaggagttcctgcacaagttggtcaggtccaagcagcggcgggactagtcatggtccaggcagcaggtggtgaaaagctagaagcaaccgaggtcggtcgaggtagtccaagcacatgcatgtccatggtcgacaagcgaagctgtttttgcccatggtctctgtgaatatatcagctgactgtatctgactggatccggattttaactgttgcgctaggaagg

SEQ ID NO: 1364 - DNA, 3602 bp, Zea mays
cgctacgcaatgcttccagacccctccggacttcggccgctagcgccctcttcgttgcgcgatggagctccgaggctccaccccccaccaatgatgcgtccagacgcctagatgagcaccatccccttcccctccacccatcctcagaagatgtcatgctgacggcttcgacgtggtctccagtagatccgagcggagcgccttcccgtctacccctcaaacattgtcgcagtgcctgggccgtcgcgaggagcccccaaacacaatctcctccttagacgtcgccggtctcctcgctccctcctcaaacgtcgtcgtgctaccgacactgtctgtggcggctccaaccggagcaccatcccacctcctccgtcaaacgacgctgcggtgtttgggccaccgtcgggagtctgaatctgccccctcagacatcgccacctcgaaacgcacaggttggcgcggtagggggcactggtggttcggcgcggtcacctggcgaacgacgacgaagaggaggaggtggccgagtctatcatgaagagacgctgtgaagagcagtcgccatggccgatggatcagttgccggttgcattcatcgaagatttggccctctccaccaccatgtcgctaccccatacccgtcttccctgcatatctgaatgatgcaccttcaatccaccgctgcccaaagagcgaatggggaaggaccgacctgagcattctgtccggtagctgggtagcaagaagcaccagcccttccccctcccaagatatagatcttatacgggtaatgggttgtacggcccagccgatgatccgcctcacccagcccaatcaggcaaccactcattcgtttccatcgcgccgaccccgtgccccgctggccgctgatccgcctcgcttccctccgccatctcggcgaccccgcggcgcggtccacgcacagcccgtcccaaaacccagaccaactgccactagcggtagagcctagcgcgcagcgcacacgcagtatacaactcttcaatccttcgctgcctgcctgcctgcctgccagtttccctgccctccccatccactccaatcccaccaccaccaccccgggccgcagcccgcagcaagcacgcagtctcccacctggtcaaaccgctcccctcccccaccaccaccgccgcgccccaatccgcgtgcatccgtccgccatgcctcctcctcgcctcctgcccccgatcatcgtcctcctcctcctggcccctcccgcggcgccgcagcccgcgcccggatcggaggcggcgccgcagcaggacggcctgcgctgcctccggggcgtcaagcacgacctcgccgaccccaacgggcgcctcgccgactgggacttcaagaacacttcggggggcgccgtctgcagttacagcggcatcggctgctggaacctgcaggagtcccgcgtgctgtcgctctcgctctccggcttcggcctcgtcggctccatcccctcctcgctccagtactgcagcgccgccaccacgctggacctctctagcaacgcgctcgtcggcacgatcctgccggccctctgcgactggctccccttcctcgtcaccctcgacctctcctccaaccagctcaccggcgcgatccccgcggagctcgccaactgccgcttcctcaactcgctcacgctctccgggaaccagctctccggccagatccccgcctccctcgcgcggctcgaccggctcaagtcgctcgacctctcggggaaccagctctccggccagatcccgccccagctcggcgaccgcttccccagggactccttctccgggaactcgggcctctgcggccgccccgtgtcctcgcgctgcggccgcgggctggggagcgccggcctcgggatcgtcatcgccgcgggagtcttgggagccgccgcgtcgttgctcctcgcctacttcttctggcggtgcagcgggaagggcaagggaggacgccgccgccacaggcgcggcggcagcgagtcgggcggcggggaggacgggagctggtggaccgagaggctgcgtgcggcgcacaaccgcctggccccggtgtcgctgttccagaagcccatcgtgaaggtgaagctcgccgacctgatggccgccacgcaggacttcagcagcagccacatcgtggtcgccgggagctcgcgggcggggacggcctaccgcgccgtgctacgggacgggtccgcgctgacggtcaagcgcctgcactcgtgcccgctctcggagaaggcgttcagggcggagatgtgtcggatcgggcagctgcggcatcccaacatcgtgccgctgctgggcttctgcgtcgtggaggacgagaggctgctggtgtataagcatatggagagcggggctctttcgtcggtgatgaagaagaagccaggggaggaggcgccgctgctggactgggcgacacggctgaggatcgccgtgggggcagcgagggggcttgcgtggctgcaccatgggttccaggttccgcagattcaccagaacctgagctcgagcgcagtgcttcttgacgaggactacgaggcccggatcacagacgttggcctcacgaggctggtccggatggcgcccggcgagggcggcgatactagccctttcctcaagggagacttgggggagttcggctacgttgctccagagtgcgcgagcaatccggtcggcacgacgaaaggcgacgcgtacgcgtttggggtggtactgttcgagctcgttagcgggcaggaggctgctgccgctgcggtgggcaccgtcgacgtgatgggcgaagggttcaagggcacactggtggactgggtttatcagcttaaggcctctggccggatcggtgacgctgtcgacaaatctttgcgcgggaagggccacgaggcagagatcgaggagttcttgaaggtagcctttgcctgcacccagcctcgcgtgagggagaggcactccatgtaccgggtctaccacgccctgaagagcatcggagaaggccgcgacgccacggagcagttcgacgagttcccgctggcctataacaaggacgattcggacactatgtagctagctgacgctgatcaccgattggattgtggaaatgttttttttgtcaggctcgtcgatgatttatatatatatattatatgtgtagccttgctatggacggaccagaggcacaatattgaggcgccaaagctcgcgtcgggtgctgggtggccaattctatcgtcgcatcaacagggatgcgatgaccatgcatgtaagctgtaagatcagtttacgattctgtatgtctctctctctctctctcttttttgttcagttactgctagtgcttgtagtatctgtaattcttgatgtgtctatctaaatcctgatatcaccttccaactcgtggtttcgttacctttcttgaaaacgtagcgggttaacgttagcagcgtgtcctgggtagttaaaaaaaatgttatactgtctcttaagcttgcttgtactgttcataaggtgcatattgatgggtattgtctgggtctgttgctaggaatgtggtgtttaaatggttaagct

SEQ ID NO: 1365 - DNA, 249 bp, Zea mays
agagtgaagctgcaacatgatctggtgaagcgccaccgatcgagcacttgggaggccggcggcgtttgagcagccagatcatgctggcagcttcaagctctcacaccagcgaagtgttctttcttccccacccggatttgggactcccagacgagcagaagaggagtgaggagagcatatgtgcagctaaagttttggcgtgtgcgaaggcaaggggacggcgggaggacgagacgaaatcagagcacg

SEQ ID NO: 1366 - DNA, 809 bp, Zea mays
gatgccatcaattaacaagatctctgttcattgcttcttgggcatttgaaggaactttgtggactaaaagggagcaaattgaggtttgattgttctgcatttttttcttgtaacatttattaaatcatcagggtgtttactgttaaaatacttgcatacattcccatctgtttgctacatgaatatcattatggtataatgggttgtaaaagtttagggtgggaagcggtgtttgggtggctactctcttgtttattctttcggttatttggatgagaaatagattttgttgtcccattaacttatgtaacatctgaatctcactactaagaatgctagggaaaccgtgaaggactttggctctgcgtttggtgtgccacataaccacacgggcgcaagggaaggaagcttgagaaggcaagggggaggaggaaaacctctgcttccacctcggaagagaagcaacgaaacaacgaagagatgaaagagaatagcatcaaagaggggtgactgggctgtggcaccgaggtaacacggctcggcgtcatagatcttggcgttgaggtgcgtccttcgctggcaacaacagactgacgtggcgtcgacgtggccgagctcaagtcatgattcatggcactgaggtccagtcaaaatcggcacctgggcatgcatgttacgacgttacgtatgtagcgagcatgcatttggacttttggagcctcgtcgttttcgtactctagccatgcacctactaatgttgtctttgttgcttcaaccccaaccggtatggatgatggatcgcttcctca

SEQ ID NO: 1367 - DNA, 11939 bp, Zea mays
gccaacagttggactcccttaatccctttccatcctggtgggctgggccaaagtttccgtagcttttcttcgccggcctttcctcttctgagctgtcaattctcaacgatcacaaataaccggcctcggccttccaatgcaggagcggcgccgcagccgccgcctaagctcgacgcgccgcggcggtggatgcgacgccacacccccggccttctcgccgccaatctcctccgcgcctcgtcgctcctcagacccccgtccgtcctcgccgcccgcgcggccttgctccaccatgcgccggacgacgcccaccgcctgctcgacgaaacgccgcgcgggagggcggccgccatcgtacgtgccctcacgtccgcaccgtcttcctcctccggtgacacggcctgcatcgcgtgcctccactgcgcggccctcaagtcaggcgccgtgctggacccgccagtgcgcacgtccctgctcgcggcgtacgccagggccggccgcggcgcgggagcgggagccggagcaggcgccgccctggcgctcttccgcgaggccgttgcgcccgacgtgatcctgtggaacgcggccgtcggcgccctgacgacgagctgccggtacgacgacgccgcggctctgttccggcggatggcgcgcgagctcggggagtttgactccaccaccgtggtcgtcatgctgtcgggggcgtcccgcgcgggtaaccttcggcgtggaatggagctccatggcatggcggccaagagttgtctcggcgctcattgtctcggcgcgtggaacgctctcgttgacatgtatgcaaagtgtggtgagtttaggtccgcagaggttgtgtttcatagcatgccgtgcagggacaccacctcatggaactctgtcataagtgggagcatttttaacgggctcgctgaggtgtcagcgtgctacttcagggaaatgagttgctccatcttccagccagatgaggtgagcctctcttctgtcctctcagcctgctctcgtctggatgatctcttctcctttggggagtctgtgcatagctgtgcagtcaaactcggttatgaggacaccgcgtcttgctcagtagcgaattctctcgtgacgttctactctgagtttggaatgccagaggctgcgaagaaggtcttcgccagcaatttgaacaggaatttggtatcatggaatgctatgatcaagggtctagtccagaatgaaagagtaaccgaggcccttgctgttttgaggcaaatgagattggagaaccagccagatgtcgccactttggtgaccatagtttcaggctgtgctgatcaaggcctactttctgaaggggaaacactccatggatacgtaatcagaaaaggacttcttcgtgaggagccttccatgggaaatagcttactcgatctgtatttgaaatgtgacgaaccatctaatgcaggcctgttgtttatgacaatgccaagaagggacttgatatcgtggaacacaatgatttctggttactcaagatatggcccactgagagaagaggctcagttaatgttcaaaggattactttctgaaggttcatcgtgcagcttggccactatgctagctgtcataccatcatgctccattccggaagaacttagctttgggaaagcacttcactctttcagcctgaagtgtggatttacatctagtggggtttcggctgttaatgctttgatacacatgtatatgagctgtggtgatccactggccgccttttcgcttattgaaagaataataccggtatcagatatcatttcctggaatacggtcatagttgggtgtctgcaaaatgaactccataaagatgcattggaaatctttcggttcatgtattgttctttggccataaaccctgacagtattacaatagttagtgtcttatcagcatgtggagatcttaatctactagcacttgggaaatccatccactgcatgatcctgaagcacttgtttgcttccaatttgagggtgaaaaattcattattgaccatgtattttcgctttggagatactagaagtgctgagttagtcttttatagcatgggagacacaaatttgtgctcctggaactgtatgatctctggctttgcacagaataacaaaggctggagagcattgcagttctatcagaagatggaggatttcgaacctaatgaaatatctgttgtcggtatcatctgtgcttgcacacagcttggtggttatagacaaggaaagagcatacacgggcatgtgttcaggtctgttctgcacaataatgtttttatttcagcatcacttgttgatatgtattgcaagtgtgggagactggacattgctgtcagagtatttgaagcttctgccgaaaaatcgattgccgggtggaactccttgatatcagcttttggattccatggccatgggatgaaatctatagatcttttctggaagatgcatgattctggaatgaaagccacgaaaagcacatttattgctctactgtcagcttgcagtcactctggacttgttgatgaagggtggaagtattattgccttatgtcagaaaagtttgggatcacaccagccccagagcaccatgtctgcattgtagacatgcttgggcgggctggtcggctgcaggaagcgcacaagtttgtggagagcttgccgtctcaacaaacacacggaatttggggcgcactgttaaatgcttgcagtagcaggagtgaactcaagatgggcgaatccatcgcaaaacatttgctacatttggagcctggaaatagcggttattatgtaactgcagcaaacctttatgcatacaaagacatgtggagtggtgtggcccaagttaggagcgttttgcaagataaagggctggtgaagccccatggtcgtagcactgttggttaagcggtgggtcataaaccatggaagccatacaatatgacgaatcgccatgaatgtttgtcaacttcccaagttcttctcacaagccgtctcaattatgagctgcaagttgcacgctggtatagtggtatcttattcgtaagtacgctgtctactctttgtaccctgtgttcataaggtttagctagaccatgatccaaatcctacatggcataacttttctacttctcctttttcttcaaatgcaaattatgcaatactagtacttaaattccactgctgtttctgaccagtttttttttaactaactgtgcaagcatacaactgcggaggaaaaactccaggtcgtgtatgtttcacttcactaattgaaaattactgccagaacatggtaattttataaagggtgccttcctccaacatggtgtgctgggcagctggatggtgtttgggcgaagaagatgaagggcagagaggaacggagacggcctttgggcggcggctgcagataatataggaactgctggcagccgatactgcttgcgagttacccccgccaaagctgctggccgctcaagcgccggttgtcattcctggtgcctccatgggccacgagggcaccacacagccacaactgcatgcatgccttctcatgatccaaggaaaggaagaagacaggctgagatgtgtgaggagaagaaaaggaagggcggtgggcccaccaagaaacaggagcatacgtgcaaatatgcgaaaccggagagcagaagcaagcagttgtcaattgtcatcgggaggaggaggaggaggaggagaagaagatagggcctgcctgcaatagaatccctctggaatctggatgatggatggctgtcttttgaacacaccgccacccaatcactatcgtagtatctcgtcccactctgcaccactcaaacccgctgctcccctctgcatttcacccgtcctccacctcctcccagacaccacaccagcgctccctttctggctgcagcttccccggacagctagctgcctgcctctcactcgagagtcacagagaccacccctagctagggatggccgcagtgatgaaggctcttgctgtcgcctcgccggtgtcggcacgggcagcacagcatccccgtcggtaccacgtcgcaggtgtccctagccagcagcatcaacagcagaacttgagcctgcacctgcagtcgttgttccacggcgtatcgtcggttcagtgccctgggcgatggcggcgggcgcaggtggtggcgatggcgggccggcctgcgatccagttcatccagggcacggacgagcagacggtcccggacgtgcggctgaccaagtcccgcgacggcaccaacggcgtggccgtcttcgcgttcgagcgtccgtcggtgttcgactcgtcggcggagctgggcgacatcacgggcttttacatggtggacgacgagggcgtgctgcagtccgtggacgtgagcgccaagttcgtgaacggcaagccggcgcggatcgaggccaagtacgtgatgcgcacgcctcaggagtgggaccgcttcatgcgcttcatggagcggtactcccgggccaacggcctccagttcgtcaggaactgaatgaaagcaactcatgagcccgacgagcctgcctgcctgcctgctttgagctctctctctctcgctgcctgtctgtctctttctcctctgcgcccctgtgtgagttggaatgcttttggattaacggccggattggaagaggactaatcgtacagtctgacaagtattgtgcatcctctgattgctcgcacacaggctggccacatgcaacccctcctccctgttcattgtccgtggcagttgtaccgtcccgttagagccttggccttggcatgacacaaagcatgtggcgtgcgctgtgtcactgtgtctgtgtgaaggaacaaggaagggtatcgaaattcgaacaccctaaatcgatctatcgatgaatttgggccgttttgtgttatttctcactacaactgtcccaaggtatcgaggatgagcaagtaccaatccatcaatcgtacggatctgctataccagctactagcttctgataaagaccgaagcatcatgagagaagaagctttgcattactgcatgccgcgaaccgtctgccatactgtctattaattacacgaccaatggcatcatcgaaaagcagatcaagcaaagccatccagggtctaaatccccgacctttttctagctggccccgcagcgccctccatatcctcctatgttcgttatatatatcccgcctgtctcgatcccccctctcctttttcatcaaatgactatatattcaagcgaacgaggataaatctagacacatatgtaaaatacatccctcaagtctttgatgaattcaccgttgacttaaaacgaaatttattttgatacggatggagtattagattaaaataaaatatatttttacagaaagcctattgataagatgtagatattatagactttaagaaagtttattagctggctgggcatcgagcatccacatcttctttctttgtatgtaaccatgtgatgaaggcaaggcaacggcacccacggtcccacgcctgttctggtctggtctgatgatgtccctctctgggtccagtctcctccaggtccagctcgctggatggagttggagcttggaggggcagacatgccatctctgtcgtgggaggatggacagcgagggttctgtctcgtctcttgctcttgttgcctcaccctttcctctcatctccgcatgcggtcttgtccgcccttccccttcattccttgccttgggtccagtgcctccctttgttaccatctgccagaccgcggtggaacccaggttcttgtttgccattgccacctactgctgttgtaactaataataataagaacaaacaaagctgtgttattaacctgcaaagaatacacacatctgtgtgactgtgtttaataaaacacacatttttttcttcttttctgacgacgaatatatcaatcatgaagggggcaaaaaaaccatgcatgttgcagctagctaatactgagtaggaaggaaagacactgacacaccattggcaagggagagaagagaaaagtgagctgggaaggaggctcaaggagtcaagtcatcattgcagcaagtagggtggaggctggaggggaggggaggggagtgtccagtccaactgcaggcatgcatatccactaggcaattattattagttaaactgctccgcttccgacgccttcaactccatcgcctcttccaccacaacctaaacccaaaaaaacaattggcagcgcaaccgcccacagctcgtgacgaggcgacccaacccccccgtagcggcggcggcggcggcggcgagcaatcctccggtccggccggcggaaacactagcggcgggaggcagagcgtccaatggcggaggacgggggcaaggccgcggcggcgtctgcggccgcggcggaggcaggaggcggaggagccaaggagggcggcgaggagaggaccgtcaagctcttcgtgggccaggtgcccaagcacatggccgaggccgacctgctcgccttgttccgcgaggtagccgccgtcgacgaggtcaccgtcatcaaggacaaggccaccaaggtctcccgaggtgcgcggatctgcctggccccccggatctggcctcgccgcccctctccccttccccgccgctcgcttcgccgcaatgccgcgccgtgagctccaccgctcgggtttgcgagcatgcaatgccgcccgccggtcggagaaatctgagctttctgggctagaaattttcgtagcgttttttttttgcttgcttggatcccccccccccccccccccccccgcctgtgtgggatcgattttgctgcaatgctgcggggagatctcgcgtcgagtcctctggttgcttgggtttcagcatggattcgagtttttgttttgcttggcctgaattgcgttaccttcctagtgtacgtatttgctccattgcgcgttttgaatctcttccatttccgtgtctgttttttttaaaaccgtattctgtccgctccctctatattttcattttgtaacctattttttttaaaaaataaatctatttaaagatataaatttttattaatattttctataaatctaggtaagttcgataaagtttcacaggcacgagcttcaatgcgtctcggctgtggcttcagcttgttttcgatttcgagcaatgcaggcttaaacgtgccataatggcatacagtctgtgtgctatattttgctgcttggtttgcgttggcgtttctgcataactagaattagaaaagcctttcccataaaaaaagaattagaaaagctaccatgtttcgcctgaaacctatttttttgttacttcgcacattggcatgctatagtttcccacttctaggctatctccttggcttgttctgctcttaacctgaccgtttttccgtcattttgcccatctgcttctctatttcacctcagttttacatgctctggaacataatgcagggtgctgcttcgtcatatgcccctcaagggaggaagctgacaaggcggtgaatgcctaccacaacaagcaaacgctctctggggtatgcgagcatactactaaccttgttctggtagcaggttccttcttgccaacagcctaggtggaattatcagtaactgaaccaactgtagcacctttagctcctttctgggtcgctaattatgaaagtatcccataatctggttggcaggggccacattgtcagctaatgtttgcttttagctgtccggtgggattaggtgagtctttggtgggccactacagagaaactgaatttagtgactgcgactttggtggttggttcaaattttggaattagatttatttaaaaattttgggctccaagttctaaccactaatggtttgtcaaggtgtgcgcgcaaatgattgcaaggtgcgaagccattctcagttcttgtcccattgtttcagtgcttgacttctatggggagtgtttcatttctgatctcaaggatacatcctagcagtgtcaagcccagtggcaatcgtttcttttttcttcttctttcttttgtactccaaaaagaggaatatgcactttaacttattttgaatgagttcttgctgaatgaagttgctcggaatctgttttctaatgcagatacgtagtagtgcttttaagaacaagctaagtagacaaagtatatgcaaacgtaatacaacagcccttcatcagtagcctttaggttggctaaatcttttctctgttacttagattagaataaactggaggaccattacagacatggattatgaatgcgatgtaaaatacatcatattattgtgtttatcaaagctagtcagtttagcttcatttgtacaaacatataatgtctacggtttccaacactgtaacttgtaagctgcagaatgagttggtcttatgtaggataggagaaactatagagatttcagttcatggtcctgccaaatgtggaaatatttatataacatgttgaagtagcttatacctacatggggctattaatattttagctgcaatttttgtgccaattaatagaaatgattcaagtggaagttcttttctcagtcctctgcagtataatcctatgtagcatctatcgacagaaactagtcaaaacatcggtgtttggttcccggggctaaattttagtccctatcacatcggatgcatggatgctagttagaagtattaaatatagtctaattacaaaactaattatacaggcgaggactaaacgataagacgaacctattaaacccaattagttcatgattctcaatcatgctaagacgcgttttttgttcagatatgaagtaacactgcatcgtttcaatgtgactagcactaacagaggcaaaagtacattcaccaaatgaggatggtgatacaaagcatgctgtcaagtcttggtagttagagacgtatatatcctgatcttggacaaagtttgaaatgcttgtagtaggcaaacatggactttttgagccattgagagtccgagacacttgctcattactaatactaattagatgtacgtgcattgctacggtttatatatcacatagttagaccttgtttcgcccggttcgagcacggcccgtcccgttgtccactcggcccatgacagcctggctcgatcatcgtgttgtgtctgggccttaggtgcgacatggcaggctaggcccagtacagactggttttattattttttcctatagaatataaaacaaaaatacgttttttctgttggctaggtgtgggtgttaatgtggagccaacaaccatggtttaaaccccatatttatgcataattttgccttatttttgccaaaggcgggaaggaagggggtgacacacgaatggagaaacagacatacacgcttcgcgcgtgacgcacgacgacggtggaccagtggaaactggtttatagtagagatttttttagtcatataaccagttagctacactttgatgccttgtttggatatggtgatatgggtgacacttttctatgacactcatcaaatacagatcttgtacaattgtctctgctttgacagtctgattacactcttgtatgtttctctttaactcaggcatcaagtcctttgcaagtaaaatatgctgatggggagttggagaggcttggtatgattattgtttaagtagaactttctctttgccagcaattttgtatggggatatttgctcaggacattgttacctgttttttactgatatccaaacactgcactcatttatacttgtcatgactttcagaacataagcttttcattggaatgcttccgaaaaatgttacagacactgagttgactgatttgttttccaaatatgggaatgtcacggatttgcaaattttgagaggttcacaacaaacaaacaaagctggctgtgccttcattaaatatcaaacaaaagatcaagcattggcagctattgaagctctaaacgggaagcacaaaatagagggttctagcgtgccattggttgtcaaatgggctgatacagaaaaggaaaggcaggctcggaaagcacaaaaagctcagtcacagctatctcatatacccaatgcaagtccaatgcagcagcactcttcagtatttggtgctttacagatgggatatatgcctcaatacaatggatttggttatcaggtgtcttatgctgttcttttagccttctttacattttacagccatatcatagaaaatgctcaatagttataccaagggcagcagtcttcctatgctattctactttcaagttttttcttcataaattctccccaccaatgcttgttcagaacttatgatttgttaacttctgttcttctcacttataacatatcatctgcagtatttgaattgcttcctgcttggtcttttggtaaacatatgctgcaaacataaaaagatatatcccattcaaaattttgaaactcttagctttactcctttttcattatattgattcttaaatagtacaggttatatgtggaaactccaaaagctgaaacctccgctgtaaatgatgacaaatataatgcagtttgttttatttcctgtgcagccaccagggacatacggacttatgcagtaccctctatctcctatgcaaaatcaaggccccttccagaatatggttcaacctcttaaccaagggaactcgataagaggagtcaatcctgaagtgtctcccagttcagttcaaaggtcatttaatgcaatgcagctaggcagcccttatcctgctatgcctggtatgcagtatcctggatcatatcccggtggtcccatgggcaaccgtcatttgggaaattctcacaatccgattaaagctccaaattcgaatgccaattccactgtttcttctagtcccagcagcaatgctggtgggcaggttgaaggttagccacatctgatgctctatgtatgtctattctgtgtatgccctcccttatcatatacaggctgtgctatgaaaatgcataaggaccataacccatcatgtgatcagctaatccgcttcagttttttttatagctgatactgcattgtgttttaaaacccataacctaaaattatggtgttacaggtcctcctggagccaacctatttatttatcatatcccacaagaatacggtgaccaggagctttccagcgccttccagagtttcggaagagtagtaagcgctaaggtgttcgtagataaagcaacgggcgtgagcaaatgcttcggtaagatcttctcttatctttcaagctcgcacagcatggtagcttttttttttcctaatcgcgattcatatggcctggccctggctgcaggttttgtgagctacgactctcctgcctccgcgcaggcagccatcaacaggatgaacggctaccagttaggcggtaaaaagctcaaggtacaactgaagagagaaaacaacaccaagcacagtagtaaaccgttttgacagacaaggcagcagccgtccggtacccggtacatattaattgaccatcaacacattgcagcagcagcctcagggcctggggagggaagagacccgtgtacccctctttgttcacttcaacattcttggagattcgtcagtcagctcagctcgtgtaattcattgcagcagacataggccgtagcagcagtttgtaccatgatcagatcacttgtacacatgattcattcaattgttactgacagccggctttcatcctagaataattcgctgtgacaaccttatcatttgctgacgaatgaagtcaggtagacttgttcatctatggaatgatggcaactttcgagcgagtgcgcggtgc

SEQ ID NO: 1368 - DNA, 1484 bp, Zea mays
catatcctagaatattcgaatctatatttgaattcagattacaaggtagtgaattgtgacatgtattcgttcctatccgatccgtcgtttttgagcactaggtgcggtcactgtgacgcgtggacttggcttcgcccactgccatcgtggacccacgtcatcagcaagtgtccatatccaccacccgacccgacgaccgcttgccgtccgatccgtgtgctcccgagggcaaggatggcatttcgccacgcgagatatttttcggtggcctgcacaggccggcagtgcagcggccaaaacgaggtcaggtcagtcacgctgggccccgcctcacgctcccgtcctgctccgggtcccaacaaagccgtccccgggaggtgctcgtgtgctcgtagcgcggtggcgaccccgatgccccgcatattccactgggcgtccgcgccgtcggatgggatcaggacggccgcggcggccccgcgctcggctataaagacgctgcgggggacgcattccctctccgtgctttcttagaggtgggttggcttctcctccccctccggttcgggttcgggttcgtgaggttctccggggttcgggttcgtgggtgagcggatcgagatggcggcgtcggatgttgagtaccgctgcttcgtcggcggcctcgcctgggccacggacgaccactccctccacaacgccttcagcacctacggcgaggtcctcgagtccaagatcatcctcgatcgggagacgcagaggtcccgcggcttcggcttcgtcaccttctccacggaggaggcgatgcggaacgccatcgagggcatgaacggcaaggagctggacggccgcaacatcaccgtcaacgaggcccagtcccgcggcggccgtggaggcggcggcggtgggtacggtggtggccgtggaggcggcggctacggcggtggcgggcgccgtgatggcggtggcggctacggcggtggcggcggctacggtggcggcggcggctacggtggtggtggcggcggctacggcggtggcaaccgtggcggcggctacggcaactccgacgggaactggaggaactgagcggtggggcccgcgcggccaagttatcctgttcgctaccgtgatgtttaccctagtccagagggtttatcttcgttcgtgtcgtgtttgttgttgcccatctgtgtttttgattgcaaggtcgctctgtgtcagttgttagtgctgtgttcatcctcggtttcagcagacccatgcatcaaacagcatggactgcggatcgatggatgctgttacccccgtcaggctttattctaagttaatcttaaggaaaaaatggtgcttcttggtgctgcaaaatggttgtgctcatctgaaaagctacttactctcgctttgagtgcgaatcaaggcaaaggttgccagtttttcaaacaatgaatgattctttgctttggaatgaaaaaagtagccgccaa

SEQ ID NO: 1369 - DNA, 2261 bp, Zea mays
ttgaccacctcctccctcgctcggctcggctcccaccttcctccgttgcctcctcttccgcggccccgtcgctgggcttggctttaccagtggcgggttcccacacgggggctagacgccgccaccgctgaccccgtctacaccgaatccccgcgcgatttaacccctcgcctcgctcgccgcctccgcttccatacaaccgcgcactccaaacgcgcacgcgctgttcgttcctcggccgctctgtccacccccgtccttctccgcccccaacagatctccgccggccgtgcggttccttaattcgccttctccgggactgtcggatctccgcggcggctggggatgggcaactgctgcgtgacgccgaaagcagccgacgacgccggcggcggcaagaagcccaaggagccgaagcagaagaagggtaagaagccgaaccccttctcgatcgagtacaaccgctcggggcaggcgagcgcgccaaagctggtggtgctgcgggatcccacggggcgggacatcgcggcgcggtacgagctcggcgcggagctcgggcgcggcgagttcggggttacctacctctgcacagaccgtgcctcaggggaggcgctggcctgcaagtctatctccaagaagaagctccgcaccgccgtcgacctcgaggacgtgcgccgggaggtggagatcatgcgccacctccccaagcaccccaacgtcgtcacgctcagggacacgtacgaggacgacaatgccgtgcacctcgtcatggagctctgcgagggcggtgagctcttcgaccgcatcgtggcgcggggacactacactgagcgtgctgccgccttggtcttacgcactatcgttgaggtcgtgcagatgtgccataagcatggagtgatgcacagggatctcaaaccagaaaattttttgtttgcaaacaagaaagaatcagcggcacttaaggccattgattttggcctgtctgtatttttcactccaggcgaacggttttctgagattgttggaagtccttattacatggctccagaggtgctaaagagaaactatggcccagaggttgatgtttggagtgcaggagtgattctgtacattcttctttgtggtgtccccccattctgggcagaaacggaacagggtgttgctcaggcaatcattcgatctgtcattgatttcaaaagagatccatggccaagggtgtctgataacgccaaagaccttgtcagaggaatgctgaatccggacccaaaacgacgattgacagctcaccaagtgcttggtcacccatggttgcagaacattaagaaggctccaaatgtcaatttgggtgaaactgttaaggccagactccaacaattctctgtgatgaacaagttcaagaagcatgcacttagggttatagctgagcatctttcggtagaagaggctgctgacataaaggatatgtttgagaagatggatcttaacaaggatcaaatgcttagtttcgaggagctgaagcttggtctgcataagtttggtcaccaaatgcctgatgcagatgttcaaacactaatggaagcggcggatgctgatggaaatgggtccttgaattatggagaatttgttacattatttgttcatctaagaaagattggaaacgatgagcatctgcataaggcattcgcatacttcgaccggaaccagagtggttatattgaaattgatgaactccgtgagtcattagctgatgaccttggacaaaaccgtgaagagattatcaatgccatcatccgtgatgtagacaccgataaggatggcaagataagctacgatgagtttgcgacgatgatgaaggccggaacagactggaggaaagcatccagacagtactcgagagagcgattcacaagcctgagccttaagctgcaaaaggatggatcgctgcagatgacgagtacacggtagcccgataacaccacataggcaagttgtgaattacagatggaaaccatgtgtagatttttctggttgtttgttgacagctcttctgcttgtcctgatgttccattgctttgtattcttcgcttgcggcctgtttgaaggattaggggggattgtttatgctatgattgtatttagactgcatgatccatgcctcgctcgtttccaaagtgtactgtacaaaagaaagaggagaaagggattatgaggctctgctcatttcttaacttctgtggattcatttgtttgtgtgttgttct

SEQ ID NO: 1370 - DNA, 2512 bp, Zea mays
gttcggccagcgaatgcgcgcgagccaaccataaagaagtgccgtcgcgcacacctacctctctcccaagtttaggcattcccctcccctcccctccccacctccccgtcgtcgtagtcccctgttcatccatcgcaagaactccctcggatcgcgctcggttcgccgcttgcatgcatgcacgcacaagcccgcgagcccggccggggtgccagcatattcgttcgctagctcgtgggctcttctccgtctccgatccgttccgtccgcgctgaagaacacgcgcgcgcgccgggctgtttagatccgatccgatccaggccttcttccgttgcaacctgcgccttgaggcctcctggtgatcgatcttctgcattaattgctggctcaatggtcgccacagccacaggcgtagagtgctgcaagatctttggttttgttgctctataaacactgcatgtgttccgtattgtgaggccattttaaggaatgcagaaagatgtgtttgagtgaaaaagatttctgctctgaagaggagcacatttctccaataaatttcaaatcgctaataattcttgatgagcgaggatttcaagcacacattagacgcatagtagaaaatagctgtgatgcaactgatgtcagaagaaatatcgcaatgctatgtcatataatttctgaagacggctgaagttctctctttaccgacttgtcgtcctacgagttcctacaatcagttggtagcaggtgtctatatatataatatgatggaagcagagaagaatggaaacattcttatgcaaaagtatgaggttggaaaattattggggcaaggaacatttgccaaggtataccatgctaggaacatagagacctctcaaagtgttgctatcaaggttattgacaaggacaaaatttttaaggttgggctaatggagcagatcaaacgagagatatcggtgatgaaactggtgaggcacccaaacatcgtgcaactttatgaggtcatggctactaaatcaaagatatactttgtgcttgaatatgtcaagggtggtgaattgtttaacaaaattgctaaaggaaagttaagagaagatgcttccaggaaatacttccagcaattggttagtgcggttgatttttgtcatagtaggggtgtgtatcatcgtgatttgaagccagaaaacctacttgttgatgagaatgggaatctaaaaatttcagattttggattgagtgctcttgctgaatcaagacgccaagatggtcttctacacacaacttgtggtactccagcatatgtggcgccagaggttattagccgaaaaggatatgatggcgcaaaggttgacacatggtcctgtggtgtgatcctatttgttcttatggctggatatcttcctttccaagattcaaatttgatggagatgtacagaaagattggaaaagcagatttcaaatgcccaccatggtttccatctgatgtacgcaagttagtgtcaagaattcttgatccaaatccaaggactagaatgccaattacaaaaatagtggaatgcttttggttcaaaaagggcattgacaacaagctaatccgaaagaatatcgagatgaaagggaaagtttcagctctcactgatgttaatgtagttttctcatccacgggtattggtagcaacaataacaaattggttgatgtggaacaagatgtagcgaagattaccaacctgaatgcttttgacattatttccctttcagaaggctttaatctttcaggcttatttgaagagtccgagaaaagaaaagaggcacggttcacatctagtcaatcagcttcaactattatctcaaaactagaagatgctgccacctgttcaaagatgacaataaagaaaaaagaaggtggtgtgctaaaaatggaaggtgcaaatgaaggaaggaaaggtgtactatctattgatgctgagatctttgaagttactcctgctttccatcttgtagagattaagaaaaataatggggatacactagaatatgaaaatttgtttaagcaggacatgaaaccagcgcttaaagacattgtttgggcatggcaaggtgagagtaaggaccaacaggccaaggatcacaatcaatcataaattactcaaccagtttgtttccatagtaagaaataatgtttgttagtgttcaaaagttgtatctacttcaaactttctcgtatttgacataaacatgtgatttgattcataatttgttaagaaacatagtattgttatgttacatctatcattaattgttttactatattgataatctatcactagattggtgaatgtatagttgttacatcaaatcggtttagatagtacgctagatgcttattttacatggtaatgggtcatttctagacattccttttttgttaaaaaactctaaccaaaccttatgtacgtattaaaaagggcaacataaaactttctgtgtgaatctacttgacatatttaat

SEQ ID NO: 1371 - DNA, 4326 bp, Zea mays
aaaccatgttaggaaacaggccctcagctcagcttctttgtactagtcggcccaaatagcatgccaaggggcaagcgcccaagctcacccgcgacgtcaagcctgccctaacctcgtgtttcccttgctcggcttcaccccatcgccgccgtcgcaacgtgcccgcctgtttcccttgctcgacttcaccccatcgccgccgccgccgtcgcaagcgacgatgctcgacatcaacttgttccgcaccgacaagggcggcaacccggagcttattcgtgagtcccagcgcagccggttcgcctccgtcgagctcgtcgacgaggtcatcgccctcgacaaggcatggcgcgaaaggcagttcgagctggacaagatccggcaggagctcaacgctaccagcaagaagattggcaagctcaaagccagcaagcaagaagaggaagcgaagaagctcatggagagcacagacgaaattaagaaaaggttggcagccaaagaagttgaggtgcaggaggccaagagcaccctcgacgccaagctcacgacgattgggaacatcgtgcatgagtccgtgccagtcagcgaagacgaggcaaacaataaaattgtacggacatttggagagaagagagtagaggaaaatttgaagaatcacgtggacctttgcaggatgcttgacattgtcgcattggagaagggtgctgatgtggctggtggtaggggtttctatttaaaggatgaaggtgtcctccttaacctggcattgataaattttgggctagcctttctgagaaaacggggatttaaaccaatgcaaactccctttttcatgagaaaggaaactatggcaaaatgtgcccagttggcccagtttgatgaggagctttacaaagttacaggtgatggtgaagacaaatatctcatagctacatcagagcagcctttatgtgcttatcacttaggtgatagaatataccctgctgaacttccaatcaaatatgctgggtactccacatgcttccggaaggaagctggttcgcatggaagggacacagctggtatcttcagagtccaccagtttgaaaaaatcgaacaattctgcattacaagcccaaatgacaacgattcttgggagatgcatgaagagatgctaaaaaactcagaagattactataaggagattgggctaccataccaagttgtttccattgtctctggcgctcttaatgatgctgctgctaagaaatatgatttggaagcatggttccctgcatcaaagaccttccgagagttagtatcctgttcaaactgcactgactttcagtcaaggagacttggaattgggtatggccagaaaaagaatgatgagcagtccaagcagtttgttcatatgctgaactctaccttgactgccactgagaggaccctctgttgtattctggagaatttccaaaaggaggacggcgtcgaggtgccaaaggcactgcaaccttatatgggtggaatagagtttcttcctttcaagcaacctttggatgtcaaacaagcttctgactccaaatcaaacaagtccaaatcaaagggaaatgctgcttgagctggatgaggaacactatgttaatttttgggcctaccagtacacaatacccatagcatgactatggcgttgcaggttttcgttttacccattttggtttcttggttgccacattatctaatgacctacctggcatacttatattgcaatagcatttcttgaaatctggaatatttgaccaccatcagctctaccggctgtgtttatcgcgttgccacagaacgctgcttgtttgtctccgaaaccaccagtgttctctgtagcacattagtaacaatttgctggtggatttgatatcatcttttttgaatgatggtgtattggtgtacttgtgatcgataatgaaaaagacatcttgtgttagtggcatctagtgctgttgtggctggaacctggaattgttcttggattctcccttcgcatctcttattttgaaacccggtgcggattgttcgcacgagagcgttttctgacggggtgggagtgcctccacctgtaagtcccagacgtgaaatcttcattcaattgcgctctgagcggggttccgacgcagcttcctcacgtgcctagccttccacacttctctgtctgcccacccgtcgccgcctcatcctcctagggttagggctcgcgtcgcggggggccgtggcgcctggtgcaatgcggaaaccgttggggccggcgctctgtgcatccgtctccgcgcgatctaggtgctggtggcgttctccctgatcgacgcgctcgccatgttattcttattcctcgaatcgccccttgtgtttacgtcgctgctcggggcaggggtggctgccgcagcgtcgcggaagctcgacctctatgacgcgaggcaagcaatgccggcgcgtctcgtgaagagcatccgcacagggaggccctctcgacggacgcatggtggcgatgggcgcaccggttagcgtggatcgtctctggcctcgacctcccgccacctcaactctacatgccctggcttgctccgcaaggcatgatatgctgttcggggagcctgggaagagtggtctcgtggctctcaacttggatttcgatcaagtcaagaagtttatcaaggagcggctggggattgaggttgagatgggtggttgcaaggcttaattacgaccttcatcgtcgagccatttgtgccacatgatcaagactactagctttcgattatttcagagaggttgggcagcaccatcagcttctcagagtgtggagggattgagatcgaggagaactgggacaaagttaagactatttttcttcctactgagaagccaacgaggcaacgacgtctgattcatgtgctcctttgattgcgacccatccattggaggcacacagaaaaattggcgacttcattaaaggagtatttgctgtcttccaaggtggggaggtatagaattccctctaccttttggaagagtactcagccctacagaaagtttcatccatgaactagatgagaaggtattgatctctgggctatatttttatctgtatttctttccctggggtctatcacatataaaataatcagtttccatgagaaatacgggatctgcagtgtattctgttgatgtgtgttaattcgccaaccttgttatttcagacaagtgcttgttcttttgtgctactttgcatgtcctgttgatgttataccctgatttaaggctgttcttcattttccttgcgactggatttgaacctgaggacgatgtttgtaggaccatgcatctattgtatttaaagtttaaattaaacataaccacctttttctaatgaaaatatgatgctgcgcttacctgtgttaaatttagtagttcccctttcactgagctaataaaaagttgctttgttgtgatgccatggctagcaagttctttcatctttgtttgccattctattgttgatagtgagagtgagcatgaggtgcacgctgatgtactcaagcggttcaaactgccagcgaagatcatgtagagctcctctcttcactttcactaccacacacacaaagagttctcagtgtttccttttgtatgcagggagttttccgtaccgccgacatgtgaacgatttatatagggacttccctactactgctttaacacttctggactatctacttgcggtgtttgtcagtttggtcattctatcttaaactgcatgcaattcttttcctgagggttgagctaacgtgaacctcaaattccacagattgagataatcttgggaaagagtgacaaattcgatgagttgatggttgctgccgccgccgagaggcgagaagttgaagatgaagagcaggcttgaaaaaacagtgccgaccatccctgccacgcgtgacgcctccgccggcccccgtaggatcctttcgtctcctgctgtggcctcttcattcgcagccgccccatcagcccatcctccacggctggcctgaatcgccttgcagccccttgtcttccccgtccgcctcttttactgatttgtttgaaaggtaacagtgtgttgctcttttgttgttttgatgattctaactgaatgtataaagaagtcccctctccgatgcatcctatacatgttccttcccctcattgcatgtctccctactctttgcagtcataaccattttattgtcttttgttgctaggtcgaaaccttatatagtgctagatgtcttagcagtaacatcggtactactggct

SEQ ID NO: 1372 - DNA, 1194 bp, Zea mays
ggcggcgctcctcgccgcgtgcgccggcggcacgccggcggcgcaggccgcggcggccggcgtgctccggaacctggccgcgttcccggacctccgcccggcgctgcgcgacgagggcgcgctgccgatgctcctgcagctggtctcgctgggcacgccgcgcgcgcgggagctggcgctgggatgcctccagagcctgaccgcgggagacgacgacggcgacgaggagggccagcggctcaaggtcgaggccttccaggcgggcgcgctggggtgcgtgagggacttcctcgacggcagccgcggcgacgaggcgggccttgcgcccgcgctcggcctcctccgcaacatggcctcgttccggtacatcgcggagatcgccgcggcgtcgggcggcttcgcggcgcacgtggccgccgcgctgggcagcgaccggtccgccacccgcacggaggcggccctggcgctcgcggagctgttcggcaacgccggcggcgtaaaggccgggcggcaccagcacgaggccgtcgccgccgactgcgtcccaaggctggtgtggatgatggaggcgaaggccgcggccgagcgcgacgccgcggcgcgcgcgctggcggcgctcctggccgcgtcgggcgggtgccggagggcgttccggaaggacgagcgcggcgtggtgaacgcggtgcagctgctggacccgggcgcgcgcgccgtggacagacggttccccgtgtcggtgctgctggccgtggcgccgtcccggcggtgccgcaagcagatggtggccgccggcgcgtgcgggttcctgcagggcctggtcgccgccgaggtggaaggagccaagcggctcgccgagtggctcggcaaggggaagatgctgggcgtgttcccgcggacgtgacgccgccgtggtccgttcctcttcctctagagtgctgcctctactcagctgtatgtatcaacgtgtgctgctgctgctgctactcctgacactattgtgctataaaccaatatccgattcccttctcctgccctggttcgtctgctgcttctagtgtgatgaactgacgacgactgcgatgatcttgtacatgtcggtgtgcggctgttggatagcttaggtagctctgctttatgtactagcagcagcagtagtgatctctggtacatgtccgactcaaatggttcatgttc

SEQ ID NO: 1373 - DNA, 430 bp, Zea mays
cctttctctctataaatattgacgccaagcccccatgaatctgttcccccggccaccctagctcgccccacaccctctcctctctcgccacgctcgccgacgccctgctaatcgccaaccggagccaccggagcgccgccgccgtccaggaccgccgaagcgccactatcgaggaccgaccagagcacgccgaccgcctgccctgctagccgcctgccctgccgctagccgcgcccctgctccctggccgaccccttgctcttcgatttcgtccctgtgcaagaattagtggagcaaggttgaagatgacatagattttgttctattttctaaactatgtttaattcagtttagatctcctgcggcgatttgttgtttaaatttgtatatatcttgaaatcgaaatcatgagaatactgaacgcttaata

SEQ ID NO: 1374 - DNA, 375 bp, Zea mays
atggcaggaatagaggccgagctagagggcgacgttgctggagcgtacagaccgagctggggcttcacggcgagctcagagggagcagagaccagggcgaactggcggctgggcggtcaagcgctgggaataggaagcgccgagcagggaggaagaagctttggggagatgggacgagcagaggaagtgccgcgcagaataagagccagagagaagctgggagccgcagcacggaggagcatggggaggaagatgagcagggatgggcgagctcaggctccaagaagccatgggagggagagcgagccggagggagccgcacacagcagcaggcgcggtaccaagcgcgaccatgggagcgagccaggcgcgtga

SEQ ID NO: 1375 - DNA, 375 bp, Zea mays
atggcaggaatagaggccgagctagagggcgacgttgctagagcgtacagaccgagctggggcttcacggcgagctcagagggagcagagaccagggcgaactggcggctgggcggtcaagcgctgggaataggaagcgccgagcagggaggaagaagctttggggagatgggacgagcagaggaagtgccgcgcagaatccgagccagagagaagctgggagccgcgacacggaggagcatggggaggaagatgagcagggatgggcgagctcaggctccaagacgccatgggagggagagcgagccggagggagccgcacacagcagcaggcgcggtaccaagcgcgaccatgggagcgagccaggcgcgtga

SEQ ID NO: 1376 - DNA, 5924 bp, Zea mays
aactttcagcttgttcgctgcggcttgctgcggctgcaatccggctgcggctgcggcttctacagtatttttctctctatggattgcagctgcagcagtccaaacagctgcaacagtgtcggcttgcagccaaccgaacacgccctttaaccacctcacccaacaatacactgctattgctaatccaattccgagcagaacgtattcaattcagtcaactgagctatagagaggacgaggagtccgggtggtggggagggagaggaccaagaggaaaaaggcacacagcagcaggtggtggtgtggtgccctgcgagtttgctttgcttgtcgatttgagctgccccgcgcgggaagggaagggaagggaaggcaagggaaggaggaccaagaacactgcccctggcccctgcacctgcagcagcatgcaggaagacgccaatggcgccgcctagtattccgaccgtatctacggtacgtactatactactatactgctcgtaccagtactgccactgctccatttccctgcgaagggaaaaaaaaaagaagagcggctttggatcctcgcatttatcgctcgctccgatgcaccaccatcggtccgtgtcactccatcgcacgcatcgccgccactccgctcggcccgacgcccgagaagcattcgaggaaggaaggaaggagatccgattccaaccaagccgggagctgagagctcccccaccggccccgccgcacctgcagccgctcgcttcggcttcgctcaggctcagcagctgtgtgtgcgtctgcctgtggtgtggactccccctcacatggcgagggcggaggagagccgcaccccgcaggtgaggtgcggtggtgcccgccagtagtaactagtccctttcgcctttttccgcctcgccccgcccctcccggctcgtgttcttgcgcgcttgtccgcctttgctttgcttgttccctgtgctctccttctctctcgtccagtaagcagtgagctggccgggcatcgggcaatgccgctttttccgatccggcctgcgccgcgctgtcctactggcctaaagcggagttactagggatgtagaggagatagacagagaggcactgcgttgagttcagctctctctctcacacacacggagagggagcgagcgagggcgtgtccttgcgcgttcgcctcttgtgacgcgcgcggcgttctccgtgcacccgtttaattccgcccaggtatctaactgcagtacctatcaatgccgccgttcatggctttccctcctcctcctcctccccaatcgtattcagtactgctgctcctccatccatggggtttcggtttcctcaagcgcccccacgtcgtcttctttctctgtctccctcgctcgcccttcggtttctccgctgaaaccgggttcggctccagcaaagacttctgacgcgattggcggcggattccgctcaagggcttggtaggtgattggtttgcccgtgtgttcgtcttcagtcgcgccacatgtttggttgccgccgatggattctgatttctccgcttgcctccgtagccggtggccacaagtttgccgccatgtcatgctcaactggtactcgctgcctcttgttgccactagtccactacacagctctgatgcgacatgggcggtacttgtggaagcatttcatctttctagccctacttttaccgcaatgcctgcaaatcatttctacttctttggtgcgcagcagcgctaaagatgccatagattgtttggacctcgggagtcctgcccactgcattttgtttggtcgggttttcctgagattctactctaccgtggtcggcttccgtgttgacggcgagcagagccgctcgcgggtgtccaagtgctgccaagctgtgctaaagaaaggaaccgcacatgctgacggtgacggggaccaattttttcccctccgttttttcttagccaagctgaaccaccctatgcgagatgtccttttcttccgcagcagatgtgtagagcacgcgtgctggtatttgtttgggtgacctcgttgaacgcgttagttttagccttttagctgtcaaattagcctgacagagaaggatcagctgctacttgcgtttcgaccatcatgcaacgagtactactagttccagtagtctccacctttcacgggttctgttacattagtcaaaactgtatctttagcaattagttgtcgttttcctcgagttataatttatgctgcaagatttttgagttcaccctagtaatcagcatctctgcctatggtgcacagctgtctccccattccaatgccgagtgttgatctctcagcaaggagggagaaagcagaaggaccggttttgatcttctgagcggttcatggttatggatcgcgcgggttggctctggaggcgcaagtcatcggacaagagccccgggggcagtgacagctctctgtccgtgtcgtcacattccgagcagtgctctgatgatcagggtcaatatcaatcccctgaagccttttcaagaagtaagtatgattacagccaagaaactggagtagcaagatccttgaatggcaagctagcagcaggggtcaatatgaacaattttaatccagagcatggtcaatcatttgaacaacatatatcctccaatgttggagatgaagagatcaaggagaccttggagagtttgaactacaaactttctgctgcactttcgaccatcagagcaaaagaagacttggtgaagcagcatgctaaagtcacagaagaggctgttgcaggttgggaacaagctgaagctgaagttactactctgaaggggctacttgaagcttcttgtcggaagaatgcttctctccaggatcaagtcagccacatggatgaggccctcaaggaatgcgtcaggcaactgcggctggcaagggaagaacaagaggacaaagtccgtgaagtcgtttcgaattctctggtcccgcagtctgaaaaccctgagctccaaaaccatatcgcagagctaaaaaagcggctggaaatgaccagattagaagcgtcatcttccatgatattacagcatgatctacatgaaaggcttcgggcgattgagagagagaacttggaccttaaggccaaacatcaggcaattgagaaagagaatatagatctcaaggccaaactgcttgtacagtccaaggacctgaagatactgatgttggaaagagatctgagcaatcaagtagcagagacagcaagtaaacaacacttggaaagtgttaaaaagattgccagggttgaggcagaatgccgcaggctacagcatctaacgcggaaaacaacactgatcaataattctagatccacacaaaacaattgctgcatggaatcactgactgacagccagtccgaccatggggagcatatggtgggcgttgataacgatctgcaaaattccgattcatgggcattagctttgattgctgagcttgatcagttcaagaatggcaaggatggttcaagaaatattgtgaacaatcctgttgagattgacataatggatgatttccttgagatggaaaggttagctgcattgcccgaatcagatggcacaagctctaactttgaaatggaaacagattctgacaaagctgtcacaagaaacagctccttgaaggtcaaaaatgaagaattgcaaaacaaggtcgcaaatttgcaggaaaagtttgaagcaattgcatgcgagaaaagggagcttgagctggcacttgtggaagttagagatcagcttgagatttcctgcgatgcgctagtggtggcaaagaacaggctggttgaaatgcagatgcagttggactcagcaaatgattccaaactttctgctttggatgatgtggagcgtttagactctgagaggaaggctttggaattgcagctggagtccaaatctgtagaagtcgaggagctacttattgctgtagcttcattggaggaaaatgcagagcagaaagagttggagtcgcagttagaactgatgtccgcacaagctacagaacttcgcctgactgtggcatcactggaagagagaattcaggctgagagagatctttctgtgcagcagaaacaaaacgcagaagccatgttgaatgctaaagaagaactggaagcacagctgtgttcagcaaacactgaaatggggaaactgcgtgacattatcaaagcactagagaatgaagtcaaaaaggagagagcactgtgtgaagaattaacagcacagttacagataaaggttgaagcagctgtcaatgcagttaaagaatcattggaggcacagctgtgttcagcaaatactgaagcagggaagcttagagatgttgttaaagcactccaggatgaggtagaaaaagagaaggcattacgtgaagagcttgcagcaaacctagaagtgaaaacaagagcagcaagaactgctgaggttgttaaagaatccttggaggcacagctgtcttcagcacacgctgaaatgcacaaactggaagagatcacaaaacaactacagaatgaggtagaaaaggagaaggaattctcagcacagttagagatgaaaattgaagtagagagagctcgttctattgagtctgctaaagaatcattagaggaacaactcctgttagtgaactcggaagctgcaaaactgcatgacatggtgtctgcgcttgagcacgatgtggaaaaggagaagtttttttctgcagagctccagatgcagctagaagctctagaggttgtcaaaaaggtattggagtctgaggcggagtctgcacatcaggatgccaaaattctcaagcagaaggtagagtcattggaagcaaaactcgaggagcagatgtcatcagctgacgaattcactgagactttgcagtcagagaggatggttatagagcataaacttaaaacagcagacggggaaatattaaaacttacaaacaaggtgagcttgctccatagggagatcgagcaggagaggttgctgtcagaagagtatgaacagaaatgccaaaagctggaagctcagatgtcaagagatagccgtgacgcaaagctctggcgtcttgcaaattcgaatggagatctgaaggttaagaaggagaaggagctcgctaacgcagctgggaagctcgcagaatgccagaagacaattgcttctctggatcgtcaaatcaaatcactgacagatctcgacagtgtggtgctagagcctgaaaggcttgaatccagcagggacatgccactgccactggacttcagaaatggcgatgctgaatttgctatgtttgcggatgacttgtacgactttgaccttccaaacaacgacacaagcttcttttctccacccccgtcgtcgatccagccctcgtctccaccctctgagatgtcagtatttgcaggggggctctcgactcttagcagttacaggagcaaaagagcaattagaaggtgatgaaaggaaggctgcccaaatgccatgctaacaaacagtccatggatgccgccatatgtgtaggtaggtcgatgtacattacagagactgattgttagatttgtgtgatgaacatccattccagcaagctcggtttttgtagcctgcttgatgaggtcttactggtggtcgtttgctgtaaaatgtaaacatggttatcttgtgtgattctagttacaggaaagcaccgagcaagtgcatatttagtgtccactagttaggtaccccgtactagaatatttaatttatttaaatatgaaggaagcatgtcacttatttctctaaatttacaacaatagttaggccctgtacgttgatacgatttctatatattacataaatatatcttattttaattagatagttgtttaaaca

SEQ ID NO: 1377 - DNA, 3726 bp, Zea mays
tccccctttaattttctctgtcggaataataatgctattgtaatacagagtagggaatattatatagagggaaacggtgagggccagggaggcaaatggacaaggagaaaagttagatcaaacctagccaagcaatcctgatatccacagcctctttctccactggacgagaactgtcccagcagaaaccagaagcaccaactgcaaacatcagagaagagaagagtaggggggaaattactactctacgactcgtgcgcccactcctccactgttcttgggaatctcgggggagaagaggaagaaagcagtgggtctcagcgcaccactcattattcctggctccatggcttcctgacgtccctgtgcggcggggacccggcgatgaggatcgtggtgtggttccggagggacctcagggtggaggacaacccggcgctcgcggcggcggcgcgtgccggtggggaggtggtgccggcgtacgtctggtcgccagaggaggagggcccttactaccccggccgcgtatcccggtggtggatcagccagagcctgaaccacctggacgcctcgctccgccgccttggggcgggaaagcttgtcacgcggaggtcggccgacgccgccgtcgcgctgctccagctggtccgcgacaccggcgccacgcacgtctacttcaatcatctatacgacccgatctcactggtcagggaccgccggttgaaggagatgctggcggctgagggcatcgttgtgcaatctttcaattcggatctgctgtacgagccatgggaagttgtcgatgatgaagggcagccattcaccatgttcgacccgttctggaacaggtgcctcagcatgccgtatgacccccctgcaccgcttctgcccccgaagaggatcaattcaggtgacttatcgatgtgcccatcggaggatctgatctttgaggacgagtcagagaggggaagcaacgctcttctggcccgagcgtggacgccagggtggcagaacgcagacaaggcgctgacggccttcctcaacggcccactggccgactactcagtgaaccgcaagaaggccgatagcgcgagcacgtccctgctgtcgcctcacctgcacttcggcgagcttagcgtgcgcaaggtcttccacctagttcgcatgaagcagctcgtgtggagcaacgagggcaaccacgctgccgaggagagctgcaccctgttcctccgttccatcggcctgcgggagtactcccggtacctgagcttcaatcacccgagcagccatgagaggcccctcctggcgcacctcaggttcttcccctgggtggtggacgagagctacttcaagatttggaggcagggaaggaccgggtacccgctcgtcgacgctggcatgagggagctgtgggcgacggggtggctgcatgaccggatacgtgtggtggtggcaagcttcttcgtcaaggtcctccagcttccatggcgatggggcatgaagtacttttgggacacgttactggatgctgatcttgagagcgatgcgctgggctggcagtacatcactggctctcttcctgatggccgggagcttgaccgcatcgacaacccccagtttgaaggctacaagttcgacccgcatggggagtacgtccggcgatggattcctgagctcgcaaggctgccgacggagtggatacaccatccatgggacgcgcctgtctccgtgctgcaagctgcaggaatcgagctgggctctaactaccctctccccatagtggagctggacgcggccaagggcaggctgcaagcggccctgtcagagatgtggcagctggaggcggcgtcgagggccaccatgaacaacgggacggaggaaggcctcggcgactcctcggaggtcctgttccctcaagagctgcagatggaggtcgaccggcagccagccccagccgaggcagcagccaacgtgcacgtgcacgtgccgatgcctgcccggaggcgcggggaccagatggtgcccaccatgacgacctcttcgctgaacagagctggaacagaggtctccgccgatctagtagtagcgaacagcgaggaggaggacaccagggcgcaggttccgttccacgcgcatctccatctccacccccgagccgaagccccgccagctgcgcgtagaaccaacaacggcgctcgccagcacgacgtcttccagcagcgtcggaaccacaggcgagatgctctgcttgctccgtcggcgtcggaggcttcgagcagctggaccggcagagagggcgccgtggtcccggtctggtcgcctcctgcggcgtcgggccattcggacgccttcgccgccgacgaagctgacgtctctagtaggagctatctgggtaggcatccgcagtcgcaccgcctgatgaactggagccaactatcgcagtcatcgtgagctcggatgcacggtaacccattttgttctcactaatattgttgttgttgttatgattaatagtagctgaaatcgcgtctaacatctggtgaaacttgcactgcaggacagcagcagaagattctgtgcggccaaacttaatcgagctgaagattctcgtatgtagattgtccactgaactactcatccatagtctgatgggatggaaaccaggcggcttttcctggttgtggtggctatagctgtgtaaatctcgtcttctagaacgtgtgtggtcgatatagtgcggttggctttacaaccaaaaaaaaaggtcgctattattgatcagacgacaaaggttttccgtatttttttagccttttttgggggaggtatgtgatgtatgtaaccgtaactgtacattcccttgtgctgaccatattgttagttgtagtttccatgcgtcttgtattgctgttttgggctgaggagtgatgaaccatggaccatggtcacgtttgccggtccatatggattggagggctaaaattcctattaaaaagtaagggggttttagctcctctaattcacgtgttgtttggttcacgaaatgtaacgtaaatggtaatgttattaattcacactcgaataccggtgataacaaatttgaataagaaggtatccatttgtagtgtgatatcgattacaattgaatttaaacaaacatgatctaacattattggttacccattacgttactaatatgtgaaccaaacagcacgagcaatctatatagatgcccctctaattcccgctattgaaaggtaaggggattgatatcatgattacttggcagttgttggaacatcacgataccaaataccacatatacgattacttacacatcaacttgattgcggcaaagccttactacatggaaaggcgcaagagacagaagcgcgatgattgaagtggaaagaaagaaagaaagaaagaagatgctatcaacgaacgagcgccaccaagtaagctgagagctgcttgttaaccttaattattatggtgggcgaaggacgagatggcctcacgtgagcctccagacggcactggctctgaccgcaccccgtcagagcgatgagcgggaacgttgctagtcagctttcctgaaaaaaaaaagttgctacggcagtcaatcaacagtgggcgcgaatgctacagctcgtcttggctggtcactctcgctacagaggacgtgatgctacatactacaaacggagatgggtggtgcatcta

SEQ ID NO: 1378 - DNA, 2124 bp, Zea mays
atctacatcctctcgcaattccccatcgtcttctacccttctgtcctccgatccccaccctccggttaactcctcaccaagaaaaaggaaccggccgtcctcgttcctgtcgtcgctgttctttcctcgccattaccggcgtataaaaccagccctcggcctgatcgcacagcatccggccaagcgggagtagtccctgtcgtctgtccaccaccctctgcgagtacgtctcctcctcccgtctgtctctctctgtgtgtcggtctgccgttcccgccgccgccgccgcagatgggcctgttcagctcgccggccaaggtgtacaagccggccgccgacgtggacctcggcccaggcagcgacgagctctacatcagccccaatgtcaaagctcctcgggtcgccgggctcctggtgaagatcttcgtgtggatcctggagatgcccatcgtcgggcagatcgtgctctacatcctgaagaaggacaacctcatcaacaagctggtgtccgacgccgacatcccggagccgccgctgttcacggcatcgcacagctgggaagacaccccggagcagagcgtgcggctgaccaagcccgacctgtcggcggcggagcgggtccaggaggccgtgggctgcctcccggcgcggctggaggccgcgctggccgccgacgcgcgcggcatcaggcgctggaccgtccgcgacttctccgacgcgtacaggtccggcgaggtgacgcctgtccaggtggcggcgaggttcctcgcggcggtgagggagagctcgggccctggcgtgagcaatatggccttcttcatcagctgcgaccccgacgacgtcatgaggcaggccgaggaatccaccctcaggtaccagagaggggcgccgctgtccgcgctggacggcgtgctggtgggcgtgaaggacgagatcgactgcctgccgtacccgaccacgggcgggacgcggtggctgggcgcggcgcggcgctgcgaggccgacgccgcgtgcgtcgcgcagctgcgcgcctgcggggccgtcctcgccggcaaggccaacatgcacgagctcggcgccggcaccagcggcatcaacccgcaccatgggtcgacgaggaacccgtacaacgccagcacgatcgccgggggctcctccagcggctccgccgccatcgtgtgcgccggcctctgccccgtcgcgctcggcgtcgacggaggcggctccgtccggatgccggcggcgctgtgcggcgtcgtcgggttcaagcccaccgccgggcgcctctccaacgccggcgtcctcccgctcaactggacggtcgggatgccggggatcctggcggggacggtcgaggacgcgctcatcgcctactcggcgatcgtcgaccagtcccagccgtcctacttgcggccggaactgaatcttcctcagctcggctccacactctccatcggcaacatcaagctcgccagatacggaaagtggttcaatgacagcgccgaggacatcaggagctgctgcgacaaggcgctgcaggcgctgcgcgcgaactacggctggcagaccgtggacgtgaccatcccggaggtggaggagatgcggctggcgcactacgtcaccatcggctccgagtgcacgacgtcgctcgccaagtacctcgacaagctcaagaggtccgagatcggctgggacgcgagggtggcgctcagcgtctacggctccttcagcagcagggcgtacctgaacgcgcagcggctccggaaccgccagatgtacttccacaagcagatcttcaaggccgcggacgtcatcgtctcgccgatgaccggtgtgactgcgtacccgctgcaagacgacgcgctcagcaccggggagctcgactacataaacggagccgcgctggtccggtactccatagccggcaacttcctcggcctgccggccatcaccgtcacggtcggctacgacaggggcggcctccccatcggcctccagttcatcggcaggccgtgggccgaggccaccctcctccacgtggccttcgccacgcagcaggcgtgcgccaaggggtacaagaagccgccggtgttctacgacctcctcggcaagcaacaggactga

SEQ ID NO: 1379 - DNA, 2329 bp, Zea mays
aaaaaaaaactcaacttaaaacacctaaatttctaacactactttgggcaccgaaagtttcctacgacggcgacggctgcactagaccgttggagaggctttcggtccctttgtcccattgtccgccggtatcatcaggccggcccagagacacagagacgagtcctgcacgtctcaagctgcgggtacgctccgacgtgtcgatcgagaacgacacgtgccgcggctggggagcaaaaggtacgggaccagtccccacggccgtcacgctcgcagcaccggccgttttctacgggcggtgcagtggacgggagtagtaccctttctttctcttcgaagaaaatgcggcggcgtgtggtataaaccccgcccgtcacgccgggccgtccgtgcgtttccttttgtcttcgcttgcttcctttcgaaagtccttgcgtcacactcgccgatcgatcgagtctctccggattccagagaggcccaactgccgaagccatcgatcgccgccacctcttcgagcagaatagttgagaatggctgacgaggatatccagcctatcgtatgtgacaatggcactggaatggtcaaggccggtttcgctggtgatgatgcgccaagagctgtcttccccagcattgtgggaagaccacgccacaccggtgtcatggtcggcatgggccaaaaggatgcctacgtaggtgatgaggctcaggccaagagaggcatcctgacactgaagtacccgattgagcatggcattgtcaacaactgggatgacatggagaaaatctggcatcacaccttctacaacgagctccgtgtttcgcctgaagatcaccctgtgctgctgaccgaggcccctctcaaccccaaggccaacagagagaaaatgacgcagattatgtttgaaaccttcgaatgcccagcaatgtatgttgctatccaggctgttctttcgttgtacgctagtgggcgaacaactggtattgtgatggattccggtgatggtgtgagccacacggttccaatctatgaaggatacacacttcctcatgctattctccgtttggatcttgcggggcgtgacctcaccgaccacctaatgaagatcctcacagagagagggtactccctcactacgagcgctgagcgggagattgtcagggacataaaggagaagcttgcctacgttgcccttgattatgaacaggagctggagactgccaggagcagctcctctgtcgagaagagctacgagatgcctgatggtcaggtcatcaccattgggtcagaaaggtttaggtgccccgaggtgctgttccaaccatcccttgttggcatggaatcgcctggcgtccatgaggccacgtacaactccatcatgaagtgtgatgttgatatcaggaaggatttgtatggtaacgttgtcctcagtgggggatctaccatgttccctgggattgccgatcgtatgagcaaggagatcacgtccctggctcctagcagcatgaaggttaaagtgattgcgccacctgaaaggaagtacagtgtctggatcggtggctctattttggcttctctcagcacttttcagcagatgtggatctccaagggagagtatgacgaaactggtccgggcattgtccacatgaagtgcttctaagtttttttgggaaatttttccaaaaaaaaaaagaagtttctggggaagttcgacatggtacgtcaggcgttaccggctcattgtgaaccaatacatgaactgccatgataaggttataagcagaaataacagtagcactggctccaattcctgaagatgagtctggtgcgccctgctgtatgaaatggatcccactcgtatattcgtcaccgcgccgcactggtgtaacgtgttgcctcagagtttgcttttagctggttccttttttaaaaataagtactgtttttggttggctaccagtcattttgaacttcagtagcaaattatcttatttaatgcttgctttttcatatttgatgtttgatccgtcatagcaacccgcataaagaaactcttcagcacatcaccttgctctgctcccctatttttcctcgctacaatgtctatagcagagatgacaatgggattttttctgggaaattctgggacagaaaagattcttccatagggatgtaaatgaaaaaaatagggatgtaaatgaaaaaatctcctacgggtaaaacgagggtaaaagggaatgggaaagattttttatcctagcatttttcatcatcattttctttttctatggagaccagttaaacttacatgtgacaagattttcg

SEQ ID NO: 1380 - DNA, 1404 bp, Zea mays
ggaccagcaggctagcaggtcatccagaaagctttcgtgctcctccatttctaggctatagctagcctagctggggttggacgacctttcaggcacacgcatgcaagtacctgcagtcggttcataagaggaggaggaggccatatggacgacgaaggagccaagtagaaaaggcaggcaccgcaaccaacggtaaagctggtgatcgagcaagttttgtcaagagcgagctcatggaggatggcagcagtgctccaagacgggctactccccccacccgcaggagcagatctgccgacttccacaacttttcagaaaggaggagaagggacaggatcaacgagaagctgagagcgttgcaggagcttcttccaaactgcaccaaggtaacaacatccacacctcttcgatctgttgccttcttttccgtctcacacatctcagaattaatggctttgttccagaccgacaaagtttccatgctagatgaagcgatcgactacctaaaatccctccagctacagcttcagatgctggtcatggggaaggggggaggaatggcaccggtggttcctcctgagctgcagcagtacatgcactacatcacggccgaccccgcccaccagatgatgcctccgccgctgcggccctccgccgggcagctgcagcccgccgccggccggcagtttcagataacccaagcagcagcagcagcagccaacaacgacaacgacccccagcgacgacgacagtccaacgtcgagtcggacttcttgagccagatgcagaacctgcacccctccgatcagccgcctcatcatcacaacttcctcaggccgccgagattgcagctctttacgccggaacagaggggcggcggcggcggcctgcctaccacgagccacaacgccggctggatttccgggaggagttcctcgtataattttatggagtgacgtgtgtgctccctgatgctgccaaaattaatttgaaacaaccgttctcatcttgaactcagaagacggcgtcagcgcactctgggaccttcagctagcgtgtggtggtgtccatgcatgaatgaatgcagtagtagttatatatatattagcaagctagttgtgtcattaaataaaggaacgctgtgtgactgtgatgctgctgctgctgctcgttttgctatctgaatcgcacaccgttcaattcctccgatcctctgtgcgtgtcgatcgtacgtgttcgattcatgcaaaggctagttggcgacgtctgtgttttgtttatctatatatgcagcagtatgctactgcatgtgtttggcttctcttgatagtcagatctagtggcatcgctagtttaaatccagtgcgatcacaaatgaagaacagtattattgttgcagttcca

SEQ ID NO: 1381 - DNA, 1805 bp, Zea mays
gtcgattcgacgaactacattgttccctctttcctctcctctttccccatccgtccaatcaacccgaccgggctgctctgctgcctctccggcgccattgacgagcaagagagtcctcatcctccggcacctggtccgtcgcgtgccgtgcccacccgctaaggccagggcgccccgacttgagctcaccgcgccgaactcgaaccgctgctgttcctcggtaagctcatcgcttccctagtttcctccggtcagtttatgcaaaagcaagccccttttcagctcgtttttggccggccggccggtcgctggttggttgctttagccttttgtgcatcctgaataaagaatccgccgtggaggtggacaaaaaggaaggagaggctgagctgttcagattccgattcttttggttagagttcctgagctgttcaggatccaggctattgattcagagtggagagaaatacgtgggccatggttaatctcttgttcagctagtaatcgccccagcagctcctgggactgggagggagctatttttcatgtcaagggcgtatctgtaactctgtaagctttttttttcggcctttgtgcactcagcaggcctgtttgtttgagagagagaaaaaaaaccacaggtagcagcaagaagctgaagcatatcacggctctgactaccccacactgtcactgactgactctgcatctaacctgtacgcgcacgcacgtgtttcgtggttctggggattcaggggcagggtcgtcgaggatgccggagcactcagagaacgcggcggcggacctgatgggcaacatcatggagaccatcgcggagaacctcccgaggcagaagtccgtgcggttcgacgacggcgacggctcctccatctccgagcaggccaagaagctgttcggcggcggcgagagcaggaagaagtcggtacaccacgtgctgggcggcggcaaatccgccgacgtgcttctgtggcggaacaagaagatctcgtccagcgtgctgggcgtggcgacgctggtgtgggtcttcttcgagtggctggactaccacttcctcaccatcctctgcttcatgctcgcgctcggcatggccgtccagttcgcctggtccatcttctcgtccagcgtgccccgcgtgcagctgccggaggagctgttcgcgagcgccggcgcggccgccggcgcccaggtgaacagggccctgggcttcctccaggacgtggcctgtggacgcgacctcaagcggctggtcatcgtgatcgccgggttcttcgctgcggcggtcgtcggcagcttctgcaacctcctgacggtcatctacatcgggttcgtgtgcgcgcacaccctgccggtgctgtacgagaggtaccaggaccaggtggacgagttcctgtacaacatgctagggctggtgcagagccagtacagcaagctggacagcaagggcatcctcaaggggggcgtcaagttcaggaagagcgactagctgatttcctcccatctacgactacgatttgattcatcctgggagtcttgatcgatcgacacttgttctgttctgtacagcgagtaacaaccgctgctgctagctacattctttactgtactgtacttgtgtgatgacatcatatcttcgcgtcgcgtgtactgaagaactacacattgcactaaggttgctttcgtacgtgtacgtgctcatctttcttccttggaaatcactcggatgtgccgccctttgcaaaatgcagcgatcccttgtttttttttctttttcttgaggaactggc

SEQ ID NO: 1382 - DNA, 1287 bp, Zea mays
ctatgctgaggtcattgcttatggcacgcatcgatggttgccgatgacttctcctatagtattatattatcttcctgatctgatcatgtggccataaatagcaagggccttagattgttcggccagggatagcataacaccgccgaggaagcagcaagcagcaaggtcgacatgtcgtctccgccgccggtgaagctgatcggcttcttcggcagcccgtacgcgttccgcgcggaggcggcgctgtgcctgaaaggcgtgccgtacgagctgatcctggaggacctgttcggcagcaagagcgagctcctgctccaccacaaccccgtgcacaagaaggtgcccgtgctcctccacggcgacggccgggccatctccgagtccctcgtcatcgccgagtacgtcgacgaggccttcgacgggccgccgctgctccccgccgacccctacgcgcgcgccgcggcccgcttctgggccgacttcatcgagaccaggctcaccaagcccttcttcatggcgatctgggtggaggagcgcgaagcgcgcctgcggttcgaggaggaggccaaggagctcgtggcgctgctggaggcgcagctcgagggaaagaggttcttcgccggcgacaggccggggtacctcgacgtggccgcgtccgcgctcgggccctggcgcagcgtcatcgaggagctcaacggtgtggcgctgctcagcgaggatgaccaccccaacctgtgccggtggaccagggactactgcgccttcgaggctctcaagccgtgcatgccggatcgggagaagctcctcgcctacttcactaagaacttcgacaggtacaaggcggccgtcaatgcgacgctatcgcagtcgcagcagtaataactgcccaactgggtacgcctctgcccggccgtatggcgggcgtttctttttttctttcttcagaataacgtagctgtgcccagtactcatgttttcaattctgcaaagtgcaaaccaacaagtcgctgtgtggtttactctttttacatatactcctacgagactagcggacaggtcaaagactttatctatttgtgtaatcgggactaaaatttgatagtgattgacttagaacaaatctaaaatgactaagccacgtggaacgaagaagtacgtgaggattccaatcgaaccgaacacatatcaaataaaacattcacaccactactagagaaaaacgatctttataagcatcggcctatttcttttacacgtgccacttataaagataaaaatcaaactcct

SEQ ID NO: 1383 - DNA, 2022 bp, Zea mays
actagatagatgctgtcatgctgaggacgaaggcaagcatgttgggcacagcgccatagtatcaaactatcattttgagccgtttcgcgtaccctaaaatcagtggcaacagcgccatagcatcgtcaactccatcaagccgttaccatcaacaacgattgcttgctgccgactgccaagcggggccggtcaatccagaagttggcagcctccaatcgcagcatccctccgagatcgctgccccgtccccctcccccggcttatcccctatcccctcctcccccgctccttccacacaaacctccatgccccttcttcctctcctccccgtcatggcttccaccttctcccccacttccgccgcgagggccctcctcccgggctccacctcccgcccactcttcctcgccgcttcagcttcctcaggtaaccgtcatctcacatttccctccccctactcactctgtttcccagctcgctcatcagcgagcgccgaatccaacacccccccttaccgcccccccggtacactcgcagggcgcattcaaccatccaggaagggactggacttccgccgcggccgattcaccgtctgcaatgtcgccgctcccaccgccgccgaacaggaggcgacggcgtcggccgcgaaggagacccagcgccccgtgtacccgttcgcggccatcgtggggcaggacgagatgaagctctgcctgctgctcaacgtcatcgaccccaagatcggcggcgtcatgatcatgggcgacaggggcacggggaagtccaccaccgtccgctccctcgtcgacctgctcccggacatccgcgtcgtcgtcggcgaccccttcaactccgacccggacgaccccgaggtcatgggccccgaggtccgccagcgggtcctgcagggggacaccggcctccccgtcaccaccgccaagatcaccatggtcgacctgcccctcggcgccaccgaggaccgcgtctgcggcaccattgacatcgagaaggcgctcaccgagggcgtcaaggcgttcgagcccggcctgctcgccaaggccaacaggggcatactgtacgtcgacgaggtcaacctgctggacgaccacctcgtcgacgtgctgctggattccgctgcgtcggggtggaacacggtggagagggagggtatctccatatcccaccctgctcgcttcatcctcatcggctctggtaacccggaggaaggggagctcaggccccagctgctggaccggttcgggatgcacgcgcaggttggtaccgtcagggacgccgagctcagggtgaagatcgtggaggagagggctcgtttcgacagggatccgaagacgttccgtgagtcgtatcatgacgagcaggagaagctccagcagcagatatcatctgcacggagtaaccttggcgctgtgcagattgaccatgacctccgtgtcaagatatccaaggtgtgctctgagttgaacgttgatggactcagaggtgacattgtgactaacagggctgccaaggcgctggctgcgttgaaaggaagggacagcgtcaccgtggaggacattgctactgtcattccaaactgcttgaggcatcggctccgcaaggatccgcttgaatccattgactcgggtttacttgtcattgagaagttttatgaagtctttagctagattgttcttgaggtaaatgttccttagtcacaatttttggcgggaaccctcttgttctgttactttcataatgttctgctgtttaataatatctggagcttgaattggtatcaattttgtgcatctagcatcataataatgtaggatccattccttccatttggaatgcatgttatgagcatcataatgctctttgcatttcagtcttccttgtaaatcagtgttgtagcatttggctgcattagagcataacttcggaagtatttcctcggtcccaaattaaaattcgttttaccattttactgtatgcatacaataattaatgtatgggttatat

SEQ ID NO: 1384 - DNA, 1755 bp, Zea mays
agacaaaaaaaaaacagagtggaagaaaagagaaggccattcaatcctagcaacacaattttaagtttctgaaaaatagaaaatagaaattggtctggattttctggtccattctatgaatcaggtgatataatatgaatataaatcagagggggaggggggcatggcccgcacaccagccttgcagcactattatgctgtgttgtcacttacctactctccgctccctccataaatagctccaccctctcgctctcactcccccacctcacgcactcatccattcggccattccttaacatccttgttgcaagcggcgccagcttgctcgcgctctctcgcagctgctacgctaaagcaagtctagtctctagaggaggaggcggagggggaggccatgggcaaggacgacgtggtccagagcggcgcgggcggcggggagttcgccgccaaggactacacggacccgccgccggcgccgctggtggacgcggcggagctgggttcgtggtcgctgtaccgcgcggtgatcgcggagttcatcgcgacgctgctgttcctgtacgtgacggtggcgacggtgatcgggtacaagcaccagacggacgcgtctgcgtcgggggccggggcggacgcggcgtgcggcggcgtgggcgtgctgggcatcgcgtgggccttcggcggcatgatcttcgtgctggtctactgcaccgccggcatctcggggggccacatcaacccggccgtcaccttcggcctcttcctggcgcgcaaggtgtcgctggtgcgcgcgctgctgtacatggtggcgcagtgcctcggcgccgtctgcggcgtcggcctcgtcaaggcgttccagagcgcctacttcgaccggtacggcggcggcgccaactcgctcgcgtccggctactcccgcggcgcggggctcggcgccgagatcgtcggcaccttcgtgctcgtgtacaccgtcttctccgccaccgaccccaagcgcaacgcccgcgactcccacgtcccggttctggctcccctccccatcggcttcgccgtgttcatggtccacctggccaccatccccgtcaccggcaccggcatcaacccggccaggagcctgggcgccgccgtcgtctacaacaaggacaagccatgggatgaccactggattttctgggtgggcccgctcctgggcgctgccatcgcggccttctaccaccagtacatcctccgggcgggcgccatcaaggctctcggctccttcaggagcaacgcgtgatgagcagagctaaagaaaggccttcgctggactgcgtgctggagcaacggcgatcgatcgatctagcgtggggagaggcggataggcgggcgcgcgagggaggagaataagtttgtgccggtggcccggtctcgtcggtcgcttttgttccagcatgcagctgcgtcgcgttcgtgtgcgtgcgtgggggtctccttaatttccccggcccctgtaatcatcaatcaccatgtgtgcgtataatatctgctgccaagggatcgattattcccccccccccccctctctctctctctgctcttgtagctccttctgttttatcgttattatgtagcgacaacaacgacgacgaccaccatcatcagtgagaaacctcttgcctctgtctaactcaaccgacatgtggagtcttcatcatctgctgttctcttcttgctcgttcgtacgttgtctctgacctctctgtgtgtattgtattg

SEQ ID NO: 1385 - DNA, 2180 bp, Zea mays
ttggcgtctctgtccagtagtgcgtcagcgtcgcttccgattatttaagtagcacggccacggctagctaccatctccccaactccgcctcccaagtcccacccccactccctcgctcaccagaggaactagcggaccaggcaaagccgagccgcaccgcaaccgcgaagatcttgcgtggcctccttttcccagctcgtcactgtgccgctcgtgccctacactcccggtccgcccaaccaataatccatccatccatccatccaccaccaccccgctgcggcgatgtgcggcggcgccatcctctcgggtttcatcccgccgtccggggtggcggcggcggcggcggcggccaagaagcagcagcagcagcagcagcggtgccgtgtgactgcggacctgctatggccggggcccggcagtaagggagctccccaggacaaggaggaggacttcgaggccgacttccgcgagttcgagcgcggcctcggcgaggatgacgtggacagcgccggcgaaggcggcgaccccgaggtccaggagcttcctccgccggagccgacgaggtttgccttcgccaccgcggccaaggcggcagttgatggcgtgatgactcctcctccaaaggatgtccaaggagatagagcagtaaaaaagcgcggccggaagaaccagtacaggggaatcaggcagcggccttggggcaaatgggcagctgagatcagggaccctaacaagggcgtccgcgtctggctcggaacctacaacaccgccgaggaggcagctagggcatacgacgccgaagctcgcaagatccgcggcaagaaagcgaaggtgaattttcccgatgacgcgacaggcactcgtcacaggccaacgaccgatgagatctttaacaacctgaagaacgacgacaacaacaacaacgatgatctgtttgcgatgtttgcgttcggtgacaataagaagaaggttcctgcagcgaagccagccgccgccgagggtggcagtggcagtggcagcttcctcgtccctgcgcctgcggtggcggtggtgcccggtaataagaggaggtcgtccgcgaccaacactatgctctccgtctccgacgaccagcgcagcaactcctacggctccggctcctccgacttggtggggtcgtggtcgtgggacgacgacgcggcggccgccgccatgacctcggactacacctcctcggtcttcgctcccgataacgccgtgctgccggcggcgtcttacacgcaaggcggagcgccgaagagaatgaggagcagctacggcggcgcgccgcccagcctcgcacatgacgcggccatgcctggctttggccttgataaagtgagctaccaccactaccaggcgttgcctccttattacgtcgggagcagcaacgcgtcggtgggcaacctcggtcttctgcagcaggctgatgatgctccagctccacaggatggggcgagcgccggggatatctggagcctcgacgagctgctcatgctggcagcagctggtgcttattgagaaccgcaagaaaaaaaaaatgtaaggcatccatatatacttgctatatcttgttatcccctacaggctacacacgtctgccgccggccgtgaatggagatggagtgtctgtctcatccatgctcgtttttttttgttttcgtgccaggtgttggcgctgctagctggagacgagacgagagggcgagaggcagttgcatccgccatccgctatcgttttgtctctcctatatctagtatatatatgcttctggcagtcgaactctatggcaatgcgtgtgtatagtgtgttgctgccgtctatgattggaagcgagctcgagactggttcaataattcacctttgcctaccgtcgtaccgccggcctgctggactgtagtgtgcgtactgcatatatatgccatagttatgtatgcactcctcctatatatactatatattattatgatgtgcttatactagtactgtgcaactctttgtctggaagcgccaagactggtttatttcgcgcttgctacgctacgcaacatttgtaaaatgtttcgggaaacggtaggtgccggcaatcgagaaagatctgactcgatgacggtggtggcccgcctaatcgagcctgctggtcgctgacgtgcgcagg

SEQ ID NO: 1386 - DNA, 2444 bp, Zea mays
gtctgatcatccaccatgctcgctcgctcatcaacttgcagccgaggcacccagctccagctgccctgcccgtctccaccttttctcggtgtcagtgacgcgcgctcgctcgctcgctgccttcgcctggcctccccctcccccttccgcccattttatacgcgcctcccccgtcccgtctcgtcccctctctctctctccctctcgcgtctcgtcttggccactcaccccacccgccccctctctctttctctctctctgccacagtgcactgctcagtcggcagtcgcagcgctgcggctgtggttcttcttgtcctgttccgccgcccgcccgcccgctgctactgctgggatagtgaaacgtgagtgctattgcctgcatccccccctgttggtgctggagttggatccttcccgtttggtgccttgctacgcccgtccagattcttgcatctcctcttcttccttcctgctcctgctgtgcatgcgtttgcgcgcatgctctcgccttcttcatatcatatcctccctcctgctctgctctgctcgggctctttgccaccccggccgaatcttgagttcctgacgcagggtagggagccccgtgttcctcgattgcttccaccccgtgctgctgcctggattccgagcggctggtgcctggtggttcggttaggtgcttccctcgtcaacgtcagacgcccccacttccgccagcaacaacaccagcagcagcacgatgatgagcttcaggagcagcagccacgagggcttcggcttcggccacgccgccgccgcggccagcggagcgccgctgccgtggtgggcagggccggccccgatgctgagcggcgagccgctggccctgtcgccggaggcccactgccgggacggccgcatccaggccccccagggacctcccgtgccgtcggtcaaggctcctgtactggcaccccagcagccgcctccgctgccggagagggggatccctgagctcctcaacctctccgtggatcctcaaggtaaagggaagaaaggatctgatcactctgccactattgctttgcaatcaccatttgcaatatacaatgctcattttgagctgggccttggtcaatcaatgatttccgctgataattcttatgctgatcaacactatggcctgctttctccttatccagtgggtgcaacgcctggaggtcgtctgcttataccactgaataggccaacagaagcaccaatttatgtgaacgctaagcaatatgacgccatcatgcgtcggcgctgtgcccgtgccaaagcagagagggaaaataggctggtcaaaggcaggaagccatatctccatgagtcacgccatcagcatgcactgcgtcgcccgcgaggctctggcggacgcttcctgaacacaaagaaagaatccagcgggaaggatgctggtggtggcagcaaggcaatgttcagcaaccccctcatgcgccaggtggcgtctccaagctcagagatccagcagtcagacctgggcaacccgagcagcgtgtccagcctgtcgggttcagaggtgtcaagcatgtacgaccatgaagacgcgggtcactgccacggcttggatcaccccttcttcacccggctcccgagcatcatggacggcggcgagcacggggtcatcgtcggcaaccccttcaagtgggcagcggcctctgaagtctgctgcgacctcctgaaagcatgactagaggggttaccggacggccaaacgctaggagctggtgactgctggcggtttccagctccgggtcaggggttgtccctccctccgtttggctcccggtaggcaaatcattcttggctgaaggcaacgtgagcgttccactcgtcccacctatttctcctggaaactctggctcctagtttctgggatcttgtggtgagtgcaacatcccttgcctaaaaaaacaaaaaaaaaatcactagttgattgtactatctaccaacttctaaatggtttcaccttagctttctgaataataaagcctgaaacttcggactcgtctgaagtttcagaggtactggagttctgctatgtatggattctgttaagcgtcaagactaaggttctgttggtgatgaattgtagtgtgattggagcttgggtggtcttgattcctactttgtaatgtgctgaaagcttgtgctagagtaatgtattggaactggagcttggtttgtattttgctttttgtgccatggctttggagttgtggctttttgtgccaggaaggattctgtttatgaccggcctttgcagattagttcttgaactaaactgaatgggaactcagctaaaaactgagctgtttgaatgcttgttttgcagcgggtcacatgatcaaaagtgaaaaggcactgttgcttgtattattgcgttatgcatgaccaagg

SEQ ID NO: 1387 - DNA, 3545 bp, Zea mays
ccgcccacacacactcggcgccgctggcctctttgcttgcttctttctttctccctcttccctttggaccctttccagttgtccacgctcccatctttttcaccaccccttctccttctctctctcccccccaccctcgcccttctcccaccgcgcgcttgccctccggccgggcgcccgtcccgtccttccctacttgtaccagcccctcttttccaatttcatcctctccctccaattccaccatccctctctctctctctcgctcgccacccgcaccactctcgctcggtgtgtgggagagagaggaggggagggagctaggctggcatggccggccgcttgagctgcgcatgcctacaattcagtaccagtactagcaaagcaagctaggtaggagtaacacctccccaattgctacttctactgagttagccatcccgtcgtcccggcagtcacttctacaagtacgcacgcagctacccagcagggcggctatactaatccctccctgcctctgccttccttccgaggaccgccgcggcgggccggggtgcgcgcacccgccatgcagcagcagcaccagggtggcggcggcggcggtggcggaggctcacagttcggggccccgccgccggacatgggccccttctcgccgacgccggctgctaccggtcccatgccgctgagcagcaggcctccgtcggcgcagccgcagcagcaaccgaggaccagctacgaagaattggcgcccatggtgcctggggccgccgctgccagtggcttcgacgacgagacgatgggtagtggcggcggcggcggcgggtcgtcgggcgcgtccagcaaccggtggccgcgggaggagacgcaggcgctcatcaggatccggtcggagatggacgcaaccttccgcgacgcgacgctcaaaggccccctatgggaggacgtctccaggaagcttgccgacctgggctacaagaggagcgccaagaagtgcaaggagaagtttgagaacgtgcacaagtactacaagcgcacaaaggaaggccgcgccggcaggcaggacggcaagagctaccgcttcttcgaggagctggaggcgttgcacgcagccgcgccgcagccgccaccacagcacttgccggcagccagcaccgccccgcagttgcacgccctcgccgcgccagtatccccgacgccccagcagcagttgccggcatccagcgccgccccgccgttgcacgccttccccgcgccagtatccgcgccgccgccgttgagttcaatgccactgctgacagggccgatgcagccagcgcccatatcatcggcggccccagccccggcaccggtggatctgctcgtggcccaccagcccctcaacctgcaaggcttcagcttctcttccatgtcggactcggagtccgacgacgagtccgaggacgacgacatgacggcggagacaggcggaaaccaggaccgcctcggcaagcggaagcgcggcgacggcggcggcagcagcagcaacaagatgatgtctttcttcgaggggctcatgcagcaggtcgtcgacaggcaggaggaaatgcagcggcggttcctggagaccatggagaagcgggaggccgagcgcacggctcgggaggaggcgtggcgcaggcaggaggtcgcccgcctcaaccgcgagcaggagcagctcgctcaggagcgcgccgccgcggcctccagggacgccgccatcatcgccttcctccagcgcatcggcgggcagtccgtgcagccccctgctaccgccgttgttgtcccaatgccagcaccggtgtcagtccataccacgccgccgaaacaaccttctcgccagcagcagcaaccgccgccgccgtcgccccaggccggccaggcgacaccgcagtcgaagccaatctcagccgcgccgctccagcagcaaccgccacagcagcaaccgaaggatacgtcgcagcaggacgccggcacgccgcgcagcttgcccccggcgtctagccagtcactcgagctggtgcccgtcgccgccacggagcaccacgtcgattccgggctaggaggaggggatggaggtgcggcgtcgtcatcgcggtggcccaagaccgaggtgcacgcgctcatccagctgcgcatggacctggacatgcgctaccaggagacaggtcccaagggtcctctctgggaggatatttcgtccgggatgcggcggctgggatacaaccggagctccaagcggtgcaaggagaagtgggagaacatcaacaagtactacaagaaggtgaaggagagcaacaagaagcggcccgaggactccaagacctgcccatacttccaccagctcgaggccatctacaacagaaagcacctccgcagcctcacaaccgcggccacatcgtccgccgccgccgctcctcgtcccgcctacccagatcagctgaacccgagcaggcaagagatagaggggaagaacatcaacgatgacaagaggaacaacggtggatcaggtggaggcacgcaggtgccgaccagcaatggcgagacagcgacgacgacgacgacgacgacgctcgtcgcgttcgacgccgacaccggcatgaagaagccagaagacatcgtcagggagttgaacgagcacccgcgtcgggagttcacgacggaggacgagacggacagcgacgacatgggcgacgagtacaccgacgacggcgaggaaggcgaagacgacggcaaaatgcagtacaggatacagttccagaggccgaacccgggcggcaccaacaccgcgccagcaccggcagcagcgacgacggctgcgccagcggtgccgacttcggctccgaccagcaccttcctcgccatggttcaataggggcgcgggcggcacccctctcaaaccgtacgtacgtatatgcgtccaaaccaaaaacctgcgcgcatcaccgtcaccgtcacctcctcctttactttaccagtccaccaagcatgcaccatcagtccatcacactgttctcttgttcatcctgtaatcccccgtgccattccattatttattgatttgtttcgtgtataataagatccccaccgttgcggaggatgcagagtgaggctgtggtggtagagcaaaaaggaagagtccagtccctcagtaataacttatttataggtcatcgtcgatcgcgttaaacgagaactgtacatcgatgtaacagtcagtccatgatgtttttcctccctttttttttagttactcccttcccgggacggcagtatacaagtttgtataagagtatacaagaattacagacagttcaagcaacctggagcttgcggaggtgagaaggtgtttttgccgttgggaatctacattttttttgtcgatcctttttcttttaacagtggatataattaaatcctgttacttgttacagtgtacattaatcgtgttgttattccagtactctgccctttgtggcaaatatacatgagcagttttaccgttgccagttggataaaaaaaagaa

SEQ ID NO: 1388 - DNA, 4410 bp, Zea mays
atgcccgacgccactgggcttgaaatgggccttaaaggctctaagggagctccagtaccaggaatggaagggggtgtggcaaaggctcctgcttccttggaggaaaacaagtcctctgctgatgaggatcttggcagagggcctgccttgactgggaagaaaaggagggactgcaggggttctgcggatgaggacagaaacgtgacaaaaagggtgttgagatccgacgcaatgaagctgcgggctgaggctgaggcagcttgtgtggtagctgtggaggttagtaaaactgacagtttggagaggaaacgctgtgaggctattgtggaggctgagccttgtaatagcaggctgctgatggaagttacttgcaatggtgaggaagccaacgaattggttaacttggactccagtgacgtctcggaagagtcagctaggtgttctgagaataatatgggaatgcctagtgttcctgcaacagattcttctcaagataacggtttaggcacgcaaagtagccttgcagaatcagatattaagacaatgaagtcagatgagaagatgtctactgcaactctttcagagtgcaatgactccagagctggaatgaacagtttgagtgttgatgaggctcaagatgacaaagtgagacatgggccttgtcagggtgaggtcatagactcagcaatggctaatgatgctggcacaagtacaaatttaatcaaaatcagccctaccagcggatcagaatctgttaagcaggagaataatgtggttggtaccgaggaagtgatactccacagtagcgatacgaaagttgagaagcattctcacattgacgatgtttgtacagaaactgagatttctttgactgataatggaatatgcgcagtagataaccacaccgatctaactgggtgcactaagcaggaggagaggggcagccccatgaatgaagccaatgatgtttcatcacatgacattgtatttacaaggagaggtagaaaatcatgtgaggcaaagcagaggacatgtgaagaggaggcacggtttgagaagcgaatcacaaggtcagctacagttaggcagagagaagtttctgcgagctcacacaaaacttccacaaatgaggctgcactagaaggcagagggaggaagggagatattgttgctcactatacaaggaaagtaagcagtgcagtatctccaaaaggtcaccatgctgagctgggagactgtaataccagtatgccgaaacaaacagtgaaagaaacggtggttgatcgaagagactcaggtgtccctgagaatgataatcatgcgaatgtcacagagaataaggagtcagaaaatggaaaggagatcaatttgaagacccaaccacctgtgggaattgttaagaaaacatccggaggaggtgtttctgcggtggatcagaatgtctctggttcagccatcactgagagaaatgatacggagcatactgattctgatggagttaaatcggaaaataaaactcctgtgcagaaaccactactgtctgttggtgcgaagattgttgccagcaagaagaggatattggaagcagagcttgataaatccactgggagatcaccaattgctttgccatccatgaaaaagacaagaaatatgtcttctggtcctgagataaaccaacctgataagtctactggagataaacttattgagaataattgtgattcgggcaataagcgtgttctgagggaacggcagcatcgcaatcaaacaaatttgtcaaccagatattctaatcactctaatcaaaatgatatggagcagacacaggatcaatctgatgatgatgagatcagcagcgatacttcctacaggagaactcgtagcagacgtcgttgtggtgctgcccgtcttgctgtgccaaaacaagaggactctagtgattctgaagattttattgctgtgaaaaagaatcggcggaaacggaagaaatctgtgcataaacaaagggctggatctaagttgaagcatacttctggtccttccaaagcaggtcgtttgggtagacctcctctgatcaaatctgaatctagttccttatctctgcagccaggaaaaggggaaaggaaggtgcctgaaggtacaggaactcttcgcgaagaaaagcaaaaaataagtgatcagataaaggccatgcttctagatgctggttggacgattgatttaagacccaggaatggtagaaactacatggattctgtgtatatacctcctagtggcaaagggtcttactggtcagtcacaaaagcatattatgcgtttcgtgctggtatggaatctgagcagcaggaaagtcctaaagaccagtctttgtcaacaaaatctgttggtagccccgacaaaaggcaggtctctagttcttcaggttatactttaacagaggatatccttagcaaattaaaaagagttgttgtaaacaaacgaacaaccaaattagagattcaaaggttgagacagaaaaggttcaaaaaggaaaagaagaagaagaacgtttcaaattcaagaagcctgcatctaggcaatgaaaggaaaaagagaggtggctgtgctctactcgctcgtggatcgaacaaggagtctggcagcagcactgatggttttgttccatatgaatggaaacgtacgatcttttcctggctgattgatctggatgttctatcagtcaacactaagctgaaatgtatggatggaagccactcaaaggttttactagagggttttgccactagggatgggattaactgcagctgctgtaacgaggtctattcagtgcttgaatttgtgactcatgctggttctgaagtaaataagccatacagaaacatacttgtggatgggctagacattgaccttttgcactgtctcattaatgcatggaatatgcagtctgatgttgaaaggcaagatttctttccagttagcattgagggcgatgaccccaatgatgacacatgtggtatttgcggcgatggaggcaatttgatctgctgtgatggatgcccctcgacatttcacatgagttgtctaggactggaggtacttccctctgattattggtgttgtgcaaactgctcatgtaaattttgccacgaacattctagtgatggtgctgaagacactgctgatgttgattattcattgcatacttgttcccagtgcgaagagcagtatcatgaagcctgctctcctgagactgattccataactaacctttccagtcagacaggcaatttattctgccaacaaagctgcagactgctgttcgaggaattgcagaatcttcttgcagtcaagaaggatcttgaaccagaatattcatgcagagttgttcaacgcatccatgaagatgtaccagaagaagtccttgctttggacaaaagagttgagtgtaactccaggattgccgttgcactttcattaatggatgagtgcttccttccgattattgaccagagaactggcatcaacttgatacgaaatgttgtgtatagctgtggatcaaattttgcccggttggatttccgtggattctatatatttattttagaacgtggagatgaaataatagctgcagcatctgtccgaatacatggaaccaagttagctgagatgccgttcattggtacccggaatatgtataggcgacaagggatgtgccgccgacttgtagatggaatcgaaatgatcctcagctctctcaatgttgagaagttgatcattcctgctatcacagaacttgtggacacctggacatcgaaatttggatttagtccacttgaagattctgagaagcaagaagtgaaatctatcagcatgttagtttttcctggtacaggtctcctccaaaagccattgctaaaggccttgcctaatgaagaacaatgttcccaaggagacaaaactgagaaagcatctgatgtagtcaatgaagattctccttgctctgatgcaagtgctgatcccctaggtttgggggtcaaagagcatgaggacagcagcaaagacgctgatggcacttgtaacggtgacgtttcacaggaatgtccccattcttggtttttttatgtcttcgctagcgcattcctggaatctaatctcattcctctagaaatcatccgcctcatccctgtgttcgttcctgtggaaaggattcgctttgctggaatgtgtttgtttgttcttcctgtgaaggaaagcttttgcaggcaggcaggcgtctgcgatgctggtgctgctaaggttatcgaggatcttgttcttgacatcctgtggaagcggggcggacggccctgccagcctgccttggagcagaactccgccagcgatctgatccccttctccagcgcgacgtga

SEQ ID NO: 1389 - DNA, 1529 bp, Zea mays
ctcctccctcccctcccctcccctcccctcccggctcccgcacgctataaactgtagctgccgcggcgcctgcttctccccgatgcgtcaaacacttgacctgcacacggacagcggcggtggcgtcccgatcctgtccacccacccatctaatgcggccgcgaggaggatccacctgattctgctgctcctgctcctccttctagtcgagagaccatgacacggaagtcagcagtagcggattatgtttagtggcacaaggatcattcgtgtagctgaaaggatttgccttcaatggagcttgaagctgctcctgacgataaagtattctgttcagatgatgagatgcagacgctgtggcctctgggacaagtagacccaaagagcgtgaggttcccttgctgcatcgtgtggactcctctcccagtagtttcatggctggctccctacatagggcacgtggggattgctcgggaggatggaaccgtcttggactttgcaggttcgaatttagtgagtgtggatgatctggcttatggttctgtcgccagatgcctgcagcttgacagggcaaagtgctgcttccctgccaacccggcgtcgcacgtgtgcttgaggtcccacgagcactcggatgccgggacggcgatctcgtgggacgacgcgctgcggtcggggagccggcgcttcgagcacaagtgctacaacctcttcacctgcaacagccactcgttcgtggccgactgcctcaaccggctggcttacggcggctccgttgggtggaacgtgctgaacctggccgcgctcgtctggctgcgcggccggtggctggaccccatggccgccgtccggtccttcctcccgttcgccgtcgtctcctgcgtcggcgtcctgatggccggctggtccttcctcctgggcatgaccgcgttcacgctgctcttgctcggctggttcgtgctcggcgtctactgcatgaagggcctcgtcgtctgacgcacgctggctcggagccgaacgtgtgcccagcttcttcactgagcatcggggtcatgtagtagatgaatgaaggatcgaaatcttgaaaggggtgtgagtcggaggggagagacaacgggaaaacaaaatttgagcccgtttttaatagcggaaacccaaatccagatatttataaaatcgaagtttctatttgaaacaaagtagaagtacaagataaaaggaaggagggggaaatagcacaaaaacaaaattgggctagagtcttagaaccgttggaggccgaaactcacgccctccttgctgcgaagctgtcgatctgcagaatgcagctctgttaactgacagtctcctgttacgaggcaatcagaggctttttctagactggacctcgccatatccaccatatagatataggaggtaccagaagggggtgttctatatagcaagctgtagctgaactcattggattagacatatcagggcgatcaatccaatagcatctcagtgtcctgtcatttcataaaaaaaca

SEQ ID NO: 1390 - DNA, 1024 bp, Zea mays
gaaaagtgcatgggctgcaaaacaacgtccgcgccgcccgccgcttctcccctcccctccccgcgtccgccgattgtttgtgtggttgggttcccgttccccggccgatgctcttggtggcgcaacggcgcctataaatccttggcctctcctgcgtctggcaacacatccatcctcgctagctcgctcgctctccttgcaactccagtgctgctcactgccactgccagcagatcgagctgctccgtctcacaaaccctcttgctttgctgctgcacctgcaagtctgcaaccgcgcacacagagatgtcgacgacggtgagccgtgcgtccctcgaccagaagctcgccctcgccaagcgttgctcccgagaggcgaccctcgccggagccaaggcggcagcggtggcgactatcgcctccgcgatccccaccctggccagcgtgcggatgctgccatgggccaaggccaacatcaaccccaccggccaggcgctcatcgtctccacggtggctgggatggcctacttcatcgccgccgacaagaagatcctgtcgctggcgaggcgccactcgttcgagcaagcccctgagcacctcaagaacacctccttccagggcaccggccgtccccacccagccttcttcaggccgtgagacgagacctccgtccagagctagctacctacctctttttccagtttgccaatgcaagcaccaaatgcccaccgatgcatgcctgaataaactactgtaattgcgaggctgctgaacgtcgatgcgctagtataactactactactacgaggctagctgcgcgctgaacacagcgctgtaaagtagtgttggtgtgctaaattcagaatgtgtaagtttaatttatgttattaccagttaaccaactttgtgtgtgctattttcttgtaaaaaaataaagtggttagtggccatgtatgttggctttgcaggggaaaaaaaatttaaaacaactgaaaccttgcagaaaaaaaaattaataataccc

SEQ ID NO: 1391 - DNA, 2495 bp, Zea mays
ctcggccgtcgtgcgcgacatgctctctccatcccgtcccgcccaccgctgctcccttgcctgagctgccgcccgccgccgtcgccgtgggaccgatcggtagtaatcggtccagagcgcggtgcagcgagcgggagcgagggaggcgtcgtcggccgtccttcgtgccccgcgttcgttcttggaattggtccgcgcgcgtcctcatcagctgcgggagtcagggtggcgcctcgtgaggcggcgcggcggtgcaagaccgccgagtgccgcgcgcccaggccttgcgcgccaagctcgaggcggcgggctgggtgatggtgcgcttcctccggcgcggacacagccttcacaagaccggatcgcacaacagcaaccagcagcagcagctgctgcgagagcgctacctcgacaggagcggcagcgacacgggcgagatgtatagcaatggcgccggcggcaccccgccccttgccaacagccaggcggcagcggccggggcggcgcggttgcgccagggccgcgacgggccgctctcagagctggacgtgatgaaggagaagttcgccaagctcctgctgggcgaggacatgtccggcaccggcaagggcgtgccgtccgcgctcgcgctgtccaacgccgtcaccaacctcgcggcgtccgtctttggcgagcaccgcaagctggagcccatggcgcccgacaccaaggagcgctggaagagggaggtgggatggctgctctccgtcaccgaccacatcgtcgagttcgtgcccacgcgccacacctcggagaacggaatcacgatggagatcatgtccacggcgcagcggcgcgacctcgccatgaacatccccgcgctgcggaagctcgacgccatgctcctcggctacatggacaacttcgcggaccagaccgagttctggtacgagaagggcggggacaacaagcgcgacgacgacaagtggtggatgccgacggtgaaggtgccgtcggaggggctgtcggacgtgacccgcaagtggctgcagtaccagaaggagtgcgtgaaccaggtgctcaaggcggccatggccatcaacgcccaggtgcttgtggagatggagatcccggaggtgtacattgagtcgctgccaaagaaagggaagacgagcctaggcgacgccatctaccgtagcatcaccgaggacacgttcgacccggtggagttcttggccgggatggacctttcgacggagcacaaggtgctggacctcaagaaccgcatcgaggcctccaccgtgatctggaagcgcaagatgcagaccaacaaggactccaagtcctcgtggagctccatcgtcagcttcgagaagcgcgagcagttcgaggagcgcgccgagaccatcctccacctcctcaagctccagttcccggggacgccgcagtcgcagctcgacatctccaagatccagtacaacagggacgtcgggtacgccctcctggagagctactcgcgcgtgctggagagcctggcgtacagcgtcatgtcccgcatcgaggacgtgctgagcgcggacgcggcggcacagaacctgacggcgaccgaggcggcgcggcgggtgctggagtcggcggacctgctcgcgccgcggaagctggacgccaaggaggagctggagaagctgaacgaggccccggcgtcgatgacgctcttcgacttcatgggctggcacttcgaccaggacgagctgatgaagcgcagggaggacggcacgctggacgccgacggcgaggccatgctcctcaagaaggcgcccagcgtggcgcccaagaagttctcctacgtcgacagcctctcctccggcggcatgaggagcccctctgcgcgccactgataataatatatgatcgtcgtcgcgccactgaactaacagcagctcagtcatcgtctacgatccaacagcaccatggatcgtcgatcgtccactcacgagaaggagagacgtcaatgggagaggagacgacggctcctcccatccgatccgacccaatcgatccttgcttacgtcgtgtacatagctgaggcgcatgaagcacgtgcgcacccattagtgatccatgttctctcctctcttactggtttctttcttgtccttgcctctacgttctagaagattctagatgaggggaagaagagggccaggtgatctcatccacgcactacgcactcaagagttgccgctgtgcgtagctactgcttaatatttctagtaagtagtttggacatggctctctcaagtctcaagagcggttctggggtatatgtatcgaactcgcaagtcaggaaaaaacaacatgtatattctttgtttcgtttcaagataatcattttttcctagactcaggttttctagtttcgtggataatacatatgtcctcacataccacgccaacaacaatattttcacctgtacttctcacgatcattgcagagaatgaaacgccacgacacc

SEQ ID NO: 1392 - DNA, 2822 bp, Zea mays
cacggagcgactgccgtgggatcgaaagagaaaaaagacaattttatttcatatggccggtctttagttttttcgcttcctatggactcctttcacagtgctatatatatagaccacttctctaccgcactgtgcgtctgtgcctgccgtaaagcctcggtgcctccactgtgtgtgtccacttccctgaagctcatacgcagcccacggtttattatagaggactctccgccggcacggtcacttgaaccagtagccgagtacaacgccacacgctcgtcaccaggaggccgccaaccggcaccatgggcgcgggcaacaacaagcggggacaccctctcctgaggggtgggagcgcgaagagggagcggtacacgcacggcttctcggcgtcccagatggccgcgctcaccgccctctgcggcgcgctggtgccgtccctgccgccggcggaccgccggaacggtcaccaccacaacccgcagcctgaggaggacggcggcagcagcaaggtcgtggaggagttcctcctcgcgtcggccgccgacccgcccgtgcccggcgaggtggccgagctgatgtcgcgcaagtgcctccccgaggcgctggctctggtgcgcgcggtgctgtggctgctgggcacgcggctcggctcgctggcgctgtgcggggcgcggtgcctgtcgtggcggttcccgttcgtgcgccggttcgacgagctgcccctggagcaccgggaggccgcgctccggcggtggagccggctgaccctgctcccgccgctgcgcatgttcttcctcatcaccaaggtcttctgcctctacgttttctactcctggaccgacgagaactcaaagaatccgcactggcgcgcgatcgggtacagcccgcccccggcggacgacgagccggcgccggcggaatcagaacgtcccgagaagcgtcccctggacgacggcatcgttgagacgaacaaggagaacgacgcgtccctgcccgcgttgctagccgagaagggcctcagggtggccgatgacgcggcgcggaacgtgtgcagggtcgagtgcgacgtcgtcatcgtcgggtccggctgcggcgggggcgtggcggcagcggtgctcgcggcggcggggcacaaggtggtcgtcatcgagaaggggaactacttcacggcgcgggattacacggccatcgaggcgccgtcgatggagcacctctacgagggcggagggttcgtcagcacgctcagcgccagcgcgctgctcctggcaggctcgacggtcggcggcggcacggcggtcaactggtcggcctgcatcaagacccccgacgacgttcgcggggagtgggcgcgcgaccgggggctcccgctgttcgccaccggcgagtacgccgccgccatggacaaggtgttcgagcggctcggcgtgacggccggttgtgcggaggaggggctccagaacaaggtcctccgcaaggggtgcgagaggctcgggtacaaggtggagtcggtgtcgaggaactcgtcggaggggcactactgcggcagctgcggctacggctgccgcaccggcgacaagcgcggcacggacagcacgtggctcgtcgacgcggtgagccgcggcgcggtgatcctgacggggtgcaaggccgagaagctgctgctggagcctggcagtgccgcggacggcagggcgaagcgatgcgtcggcgtggtggcgaggagcaccaacccggcgatcacgaggacgctggaggtgaccgccagggtgacagtctcggcgtgcgggtctctcctgacgccggtgctgctgcgcgggagcgggctccgcaaccggcatatcgggaagaacctccacctccacccgacggccctggtgtggggctacttcccggacaccgtgccggacctcaggggcaggatgtacgagggcggcatcatcacgtccctgcacaaggtggaaggcggcggtccgggcgcgccggcccgcgccatcctcgaggcgccggcgatgggcctggccggcgcggggacgcagttcccctgggtgtccgggcgcgacatgaaggagcggatgctcaggtacgggcgcacggtgcacctcttctccatggtgagggaccgcgggtccggcaccgtgcacggcgagcggcgggtggcgtaccacctggacgccacggaccgggagaacatgcgcgacggcatgcggcgcgcgctgcgcgtcctggccgcggcgggcgcggcggagatcggcacccaccgcagcgacgggcagcggttcgcgtgcgggggcgccacggaggccgcgctggaggagttcctggacggcgtggacgtggtgcgcgggccccagtcgaaggccgaggcgtggaccctgtgctgcaccgcgcaccagatgggcagctgccggatgggcgccacggcccgggacggcgccgtggacgcgcgcggcgagagctgggaggccgggagcctgtacgtgtgcgacggcagcgtcctgcccggcgccgtgggcgtcaaccctatggtcaccatccagtccgtggcctactgcctcgccacgggcatcgccgagtcgctcaggcgcggcccggtttcacgaaaggattgagactctatttggatatgcacgtatatatccacatcaatttatttcaatttacgtgtgttaaagtggatttcacgaaaggaattgctgcagaataggtctgcagcggttcactgttcgtgtgctggagaataataagaaatggaagtgagacaaatctatcttttcatgtcgcgtgttctgcttgttcgccgtagccgtaaccgtagccgc

SEQ ID NO: 1393 - DNA, 1635 bp, Zea mays
cgcctcccggttcccttccccgtcgcgacctcgccacccaaattcatcaagctcaacacgatctcgattcgattccagttcatccatccaacgcctcccgcctgtacgtatagaagaaagaaggaagaaccgtcaccgtacgtcctcgccagtacaaataatggccctgctcaaagccgcgcgcgtcgccgatgtgcccaccctggacgtggtggtggcccccggcctggtggcggttgccaaggcgaggagcgccgcggcggtgggcggccggttctcggtgatcgggcaccgcggcaaggggatgaacgcgctggcgtcggaggacccgcgtctgcgggaggtccgcgagaacacggtccgctccttcaacgacgccggacgattccccgtcgactacgtcgagttcgacgtccaggtcaccaaggacgggtgcccaatcatcttccatgacaacttcatcttcacacaagacgatggtaagatttcacaaaagcgtgtggccgatattcagctggaagacttcctgcagtatgggctccagaatgagcaggggaaggttggcaagcccctgcttcgcagattgaaggatggcaggatggtgaactggaacgtgcaatcagaggacgctctttgcacactcgaagaagcgttcgagaaggtcaatccaaggttgggcttcaacgtcgagctgaaatttgacgacagtcttgaatacaccgaggaagagctcactcgcatcctccaggccatcctgaaggtggttttcgagtacgccaaggacaggcctatacttttctccagttttcagcccgacgctgcgcagctcatgcgcaaattgcaaggcacataccctgtctacttcttgacgaacggagggacggagctatacgccgacgtgaggaggaactcgctggaggaggccgtcaagctgtgccttgccggtggcctgcaaggaatagtttcagaagcccgcgggatcttcaggcaccctgccgccgtgccaaagatcaaggaggctaacctctccctgctaacctatggaacattgaacaacgtgccggaggcggtgtacatgcagcacctcatgggagtgaacggggtcatcgtcgacctggtgccggagatcaccgaggcagtctctgagctcatcgccctgcccgagcccgacctcgacctggaagtgggcagcttgagcaaccaggcggcagctagaggagccacaacaccgaatttctcgcagcgcgagatctcgttcctgctgaggcttattcctgagcttgtccaataatgcctagacttcctggtgtctgtctgtctgtctatcatggatgaattgactaatgtgttactgatgtactgatccgcatacaagaaaagaagcccttgtgcagggtattatttgttgtcgtgggttgatttgtctgtcctgaagcttgtcctgctcccagttttacttttttcttaagtaaaagttactgtaggaggtctacagtatttttttgcttaaggaaacaagattggggtgaagatacaggagggtgagtatagaaaaaaaatagagttacagaacagaataaagaagccaggttctaattttatctcctattactggcttaactcgatgactaagaa

SEQ ID NO: 1394 - DNA, 1250 bp, Zea mays
ccgatccacccacgacacacagagacagaggtcaggtcaccactactagctagctaggcagagccagcaataaacctcgctgcgcaatcgacagaggtttggaagacaatctctgcgcaaatggcgttcccgacggcgatggcagcagtggccgtagccctgtgcgcggcgttcgcgctcgcggcgctcggcggcgccgaggcgcagcagctcagcccggcgtactacgacgactcgtgcccgcacgtctacgacacggtgcggcgcgtgatccaggaggcgcgcgcctccgatccgcgcatcctcgccagcctccttcgtctccacttccacgactgcttcgtcaatggctgtgacgcgtcgctgctgctcgacgagaccccgacgatgcgcagcgagaaggaagccaaccccaacaagggctctgcgcgagggttccccgtggtggacgacatcaaggccgccctagagaacgcctgcccaggcgtcgtttcctgcgccgacgtcctcgccctggcagccgaggtctccgttgagctggcaggaggtccgtactggagggtgatgctgggccggacggacggcatggcggccaacttcgacggtgcccagaaccttccaaacccgacggaaccgctgaacgatctgaagcagaagttcgccgacctcggcctcgacgacaccgattttgtggccctccaaggggcacacacgatcggccgcgcccagtgcaggttcttccaggacaggctctacaacttcagcgacacggaacggtcggacccgacgctggataggtcctacctcgccgcgctccgggagagctgtccggcggcggtgagcgacaacacgtgcctgaacaacctggacccggccacgccggacacgttcgacaaccgctactacgccaacatcctcagcaaccgcggcctgctcaggtccgaccaggccatgctctccgcgccggaggagggcgcggtgtccaccgcgccgatcgtcgggcggtttgccaacagccaggtcgagttcttccaaagcttcgccacggccatggtcaagatggggaacatcgcgccaatgaccggggggctccgggaggtcaggagaaactgcagggtggtgaactgaagctgctggttctgttctctttgtagtttgttcatcgatgctcatccaacatgtaaattcatgatttttttcctacataattgttttgagttggtaatatgtaatgaagcaacgttttcttg

SEQ ID NO: 1395 - DNA, 2003 bp, Zea mays
tgatcaatatattatcaacatatagattcagcttaaggatgaacagtggaatgatttgtgtcccactcccagtcacacaatgcatggcagctgctgatgctttggcatgtgtgaagtttcagatagattgttcaagtcaccggagcacggcatggacttcagccctcaaagaaagagcggcgaacgcgatcccgtcagcttcgtcgaacacgatgacagtgatgacgacttcggagctgaatccaccgcctctaataagccgtctgcgcattcgcacgacaggaccaaatccaagcccaagacgagccatggcagttcaacccacgcgacgacggcgacgccgttgcctccccaaagtagctccgagccaacagcggcgactgcgacggcgacggcgggcaacaatgccgacgccaacagcgtggacagcggcggcccgaggagcaacagcatggagagcagcagcagcagcaccgcctcaggcgccacgccggccaacgtccgccggcacaccggcggcgacagccagtgggaggccatccagctggccacgtccctggacgcgccgctgaacctgggccacttccggctgctcaagcgcctgggatacggcgacatcggcagcgtgtacctggtggagctccgcgccacgccagccttcttcgccatgaaggtgatggacaaggcgtccatcatcagccggaacaagatggcccgcgcgcagacggagcgcgagatcctcggcctcctcgatcaccctttcctccccacgctctacacgcacttcgagaccgacaagttctactgcctcgtcatggagtactgcagcggcggcaacctccactccctccgacagaagcagcccggcaagcatttcaccgagcccgcggccaggttctacgtcgccgaggtgctgctggccatggagtacctgcacatgctggggatcgtgtacagggacctcaagccggagaacgtgctggtccggaccgacggtcacatcatgctttccgacttcgacctgtcgctgcgctgcaccgtgtgcccgacgctggtcaagtcgtcgtctgtgcactccaccgggagcggcggcggcggaggcgtcggcagcgtcggcagaggaggagtggacgtcgcggacagcgacgtcattaccgccaaccaggggtgcatccagccgtcgtccttcttcccgcgcatcctgccccggcgtagccggaagccgtccaagagcgacctggggctcggcggcccgcccgcggtggagttcaacgcggagccgacggacgcgcggtccatgtcgttcgtcggcacgcacgagtacctggcgccggagatcatccgcggcgagggccacggcagcgccgtggactggtggacgctgggcatcttcctctacgagctgctgcacggctccacgcccttcaagggagccggcaaccgcgccacgctgtgcaacgtcatcgagcagccgctgcgcttcccctccgatggcggcgccgggggaccggcggtcagctccgtcgccaaggacctcatccgcggccttctcgtcaaggacccgcagaagcggatcgccttcaccaggggcgccacggagatcaagcagcacccgttcttcgagggtgtcaactgggcgctggtcaggagcatggtcccgccgtcggtgccggacccggtggacttccggcagtacggagctgccaaagacaagaaggcgcccgacagcagtacaacggcggccgtggaggcgccgccggttggaaagcaaaactccggcgagtcatacacggatttcgagtacttctaggacatactgtcgacatactacataatcttacgacttataaccatatatatacaagattagattaccttgatcgaggtttgccaacttctagaagcttgcgatattcattaaatatcatgcaatatcttgtaatacgattcttccatgtaccatttgactgcaaactaaattttgtaaatttagccacgcacct

SEQ ID NO: 1396 - DNA, 2312 bp, Zea mays
catcatcctgcacgccaccagcgtaccaacccgaagacgaacacgcgcacacgccgcactcgaacacacactcgacgcaatgcaacgcagcgcagcgttgtcacaatgtcacgccaggacaaatccagcgctccctgaagcagagaaagaccgcgaccaaaagcaagttcgatctccgctcctccagtctccaccgcccgccaaccccgagatatacctcccttcctctcgaagcttcgtctccagagtccagacgacgtcgccggctcttcactcggcgctggtgctggtggttgccagtggcggtggctgggtggccgggtggcggtgttgctgggatgcccgccgcgacggcgaccgccgcccgcctccgactgccgctgccaaaagcagcccaccgctcgccctgctcgagccggcgcctctccaattgccaccgccactgacgagcgaccacacgcttggcgcccgccatggacgccttgtcccgccccgctgttgtcatcgacaacggcaccgggtacacgaagatggggttcgcggggaacgtggagccctgcttcatcacccccactgtcgtcgccgtcaacgattccttttccggttcaggccagccggcggcgaggggcgcccctgccagggggaactggctcgctcagcacagtgccggcgtcatggctgacctcgacttctacatcggccaggaggcgctggcccgatcccgcgccagcagctcgcacagcttgagctatcccatccgcaacggccaggtggaaaattgggattctatggagaggttttggcaacagtgcatcttcaattacctccggtgcgacccagaagatcattattttcttctaactgagagccctctgactgcccctgagatccgggagtataccggggagatcatgttcgagacgttcaatgtgcccggcctctatattgctgtccaacctgtccttgctctagctgctgggtacactacaaccaagtgtgaaatgacaggtgttgtagttgatgtgggtgatggggctacccacatcgttccagttgctgatggttatgtcattgggagcagtatcagatctattccaattacaggcaaggatgttacccaatttattcatcaacttctaaaggaaagaggtgagaacattccaccagaagaatcttttgatgtagcaaggaggatcaaagaaatgtactgttatacttcttcagacgttgtgaaggaattcaataaacatgacagggaaccatcaaagtatgttaaacactggacgggcatcaaaccaaaaactggtgcgaaatacacatgtgacattggatacgagcggttcctggggcctgagatcttcttcaacccagagatgtataacaatgacttcaccactcccttgcaagttgttatcgacaggtgcatccaatcatccccaattgacacaaggagggctctttataaggttttgttgatctgtgtattgttgttactatttattctaagacatcgcatcgagtgtaaagaatttccaatggcacagaatattgtcttgtctggaggctcgactatgtttaaagatttccataggaggttacagcgggacctcaaaaagatagtggatgcacgggtccgtgcatctaatagtcggcttcttagtggagatgctaaggcccagcctatagaagtgaatgtggtcagtcatcctattcagagatatgcggtatggtttggtggatctgtgcttgcttcaactgccgaattctacgaggcttgccgcacaaaagcagagtatgaagagtacggtgcgagcatctgccgatcgaaccctgttttcaaagggatgtactgactcagcctatcatagtcctgttctcaagggtatatatgtatttaaaccgagatctgttccctgtggctgacgtcgtgaatggcgtccactcaagcgtaaatggggagatctgacagcggaaacggactgccaagagggatcctggagaatcctagccgtaggagctgtacaaaagtaaagtgcaaatataggttcattttttatcatacaatttagatgctggtaggcctgacgggatgggtttgccacctctgctgaactgggtggcattgtaatttgtagcgtcaacattggtgcttgtatacatgtagggatggcgttgggggggggggggggggcggcggttgggtcgtggttccgttaccccaaaccaattctccatcgtgccttgttgggacaggagagaattagggggattaagggtatgtttggtttgctatctaatttgtcacactttgt

SEQ ID NO: 1397 - DNA, 1055 bp, Zea mays
atgtttagtacatgccaaaacttgtccagctaagctaaccttatttggcccggcgcgggagcccgtcctataactgaataacccgatcgaggcgcgcaaggcacacctccgattcaggacgagcggccggccagccagcgcgcgagaggacgtacggacgcacagctaggcggaggcgatggacggccgacgacgacggcaatggccgaggtcgcgctcgggagcggccgccgcgcgtctcctcctcctgctgctcctggcggtgtccttgggtgggcatggtgatcacggcgcggcggctgcgggcgtcgccccggcaggcggcaacggcatgacggagctgcagaagcacgtggcgttcttcgaccgcaaccacgacggcatcatcaccttcgacgagacctaccaaggtctgcaggacgtcggagttggcgatgtcacggccaaagccagcgccgcgttcattaacggcgccctcgggcccaagaccagacctgacaattccaactcctcgcgcatggatatctacgtagagaacattcagaagggcaaacatggaagcgacacaggcgcctacgacgctcaaggaaggttcgttcccgcgaagctggacgagatgttcaccaagcacgccaagaccgtaccgaacgccctgacgaaagacgagctcgacgagatgctcaaggataaccgggagaagatggacgtcgcaggatggctgggagccaagtcggagtgggagatgctgtacaagctggccaaggacaaggacggccgcctgcccaaggacaccgtcagggccgtgtacgacggatccctcttttaccagctggcggcgcaggcgaagaagggctgattcgtttacgttaatttcagtaatcaataacaagcaacgtttttttttttgtcgtttctgaatgcttgcctgtgtggctgtgtaagaaagcgagtgggtcggactcaatggcaggcaacggttttgttttttttattattattttaacggatcggttctactaagtgtggcatggcaatggcatgtatgtgtagggctc

SEQ ID NO: 1398 - DNA, 1312 bp, Zea mays
atcccgcctcgtcttcggccgctcgcgctcttaatagcagcctcagattctactcggctctcaaacgccacttgttctccctccctctctgcctgaccagctaggatcagcggaagcagcaatggtgatggcgtcgtcgagcgggctgaggagctgcagcgccgtgggcgtgcccagcctgctggcgccgtcgtcccggtccggccgcctggcgccgttctgcgccaacgccaccacctctggccgcgtcaccatgtccgcggagtggatgcccggccagccacgccctgcccacctcgacggctcctctcccggggacttcggcttcgatccgctgggcctcgcgaccgtgccggagaacttcgagcggttcaaggagtcagaggtgtaccactgccgctgggccatgcttgccgtccccgggatcctggtgccggaagctctgggcctgggcaactgggtgaaggcgcaggagtgggcggccgtccccggcgggcaggccacgtacctgggcgccccggtgccgtggggcacgctgccgaccatcctggtgatcgagttcgtggccatcgccttcgccgagcaccagcgcaccatggagaaggaccccgagaagaagaagtaccccggcggcgccttcgacccgctcggcttctccaaggaccccgccaagttcgaggagtacaagctcaaggagatcaagaacggccgcctcgccatgctggccttcgtcggcttctgcgtccagcagtcggcgtaccccggcaccggcccgctggagaacctcgcctcccacctcgccgacccgtggcacaacaacatcggcgacatcatcatccccagatcaatctccccttgagctcagctcagctgctggttgctgtttcctgtgtacgactaggccctgcctgtacaacgagcgacgacggtgacttcccgcccggaaattaaaccctcgtaatgtaaagcttatgttattaagtagcggctactcttgtagtcttgtctgtatcaaatataaactggtttgttagctgaatcccaaggttatttctgagcctaaccaggggaaatttagctcaaaacggagaaaatacatacgagacctttgataactacaaagtattgtatttcatgagctagacacgatgtttttttttaagattcacgagggagagcctctactgagattttattagaaatgacaaaagaaaatgttacaacttagcctagttacaaaacgtaatccaaaagatctaattatgtagtttacaagcaatgtagcaagtagaacaactcttatgtctgccac

SEQ ID NO: 1399 - DNA, 2967 bp, Zea mays
caccatttcttccctgcccttccctgtttcctggcctggctttataatctctcggtcgctactgattgcccgggtcactacttccttcggttttactatcccttcgtttccgctagccttctccttccagagcaaccgcgccattcgtctcctccgtctcgttcgtagtgcaacacatacagcctcgtctggtgaagtgaaagaacgacaagatctgtggtacggcggtgccggccgacatccacccactgtgctaccccttgcggttccagccagcgcagcgatcgattcccgctggccgctgccgtcggtgcctgcccggtcctccactcctcccgctactagtactagtaccagcacactccactgtccactccactgccagtgccatcccattcccatccgaggtaaacgcgtcaacgcgaccagctcacctcgtcatctcccattctctttcatatttgcatgcatctcggttctcggatgttcgtcccctgcgcctttttttcttcttctctgccaccccgcaccccgcaccccggtaataaaagtttaatttctcctcgcgttacagctgcagcgctcgacgacggggagaatagcgtggcgtgggcggcgccatgaagtacagcaaggaagataagcccgagagggcgggcggcgccggcgcagggtccagggcggtgccggtggcgctcgtcgtcgtcgtgctctgcgccttctccttctacctgggcggcatctacagcacgggacggagcctgctggactccatccagccggcgccgacggctctcctcgccctcggcgccgccacgacgacccgccgtccctccgacgacggccaggctcggccggcactggcgtccacggccgccgtggcgttccccgagtgccccgccgactaccaggactacaccccctgcaccgaccccaagcgctggcggaggtacggcaactaccgcctcagcttcatggagcggcactgcccgccgccgcccgaccggcagcagtgcctggtgccgccgcccaaggggtacaagccgcccatccggtggcccaagagcaaggaccagtgctggtaccggaacgtcccctacgactggatcaacagccagaagtccaaccagcactggctcgtcaaggagggcgaccgcttccggttccccggcggcggcaccatgttccccaacggcgtcggcgcgtacgtggacctgatgcagggcctggtcccgggcatgcgcgacggcaccgtccgcaccgcgctcgacaccggctgcggcgtcgccagctggggcggcgacctgctggggcggggcatcctcaccgtgtcgctggcgcccagggacaaccacgaggcccaggtgcagttcgcgctggagcgcggcatcccggccatcctcggcatcatctccacgcagcgcctgccgttcccgtccgccgccttcgacatggcgcactgctcgcgctgcctcatcccctggaccgagttcggcggcctctacctcctggagatccaccgcgtcctccgcccgggcggcttctgggtgctctccggcccgcccgtcaactacgagaaccgctggcacggctggaacaccaccgcgcaggcgcagaaggccgacctggacaggctcaagaagatgctggccagcatgtgcttcaagctctacagcatgaagggggacatcgccgtgtggcagaagtccgccgacgcctgctacgacaagctcaccccggtcaccacgcccgccaagtgcgacgacagcgtcgaccccgacgccgcctggtacgtgcccatgcgctcctgcgtcacggctcccagccccaagtacaggaagctggggctcaacgccacgcccaagtggccccagaggctcagcgtcgccccggagcgcatcagcgtcgtcccgggcagcagcgccgccgccttcaagcaggacgacgcccggtggaagctcagggtcaagcactacaagacgctgctgccggcgctggggagcgacaagatcaggaacgtcatggacatgaacaccgtgtacggaggattcgcaggcagcctcatcaaggaccccgtctgggtcatgaacgtcgtctcctcctacggcccaaactccctcggcgtcgtctacgacagagggctcatcggcgtcaaccacgactggtgtgaggcgttctcgacatatccacgcacctatgacctgttgcatcttgatggcctgttcacagcagagtctcacaggtgcgagatgaagtacgtgctccttgagatggaccgtatccttcgtcccacgggctacgccataatccgggagagcacctacttcctcgattctgtggcacccattgccaaagggatgcgatggagctgcgagaagcacagcagcgagaacaaggccgacaaggacaagatcctcgtctgccagaaaaagctttgggcaggaaagcagtgacgagagaggatcatccttcttccttccgagtataaaaaagtaggcatccagatcggccaacaaggcaagaggcgcttcaatacacatggaagatgagcgagtacttctgatacaaagagtgttcggcagttattatcaaaataaataagccgagtaaaactccatataggatccaacagttaccatttttcattaatcacagtttaattctttttctgtaccgacagtttgtaggcaaggagtgggtcaattcatataccatatggtgagcaaatgtaagtttactccacactagatgtgtatagcttggttggtgctactgctatcgatgtaatagcgggccacgtatttacttcacatgttttgtggatcaatatactatgactgtgatgtcctaaagcgacggattttgttgagtgctgctatcagttgacgtcgcaatgcattgttcttgagcaagcaattcctctgaaattgaaatagaaacaaacaagaaaaaggaaccggtaatgca

SEQ ID NO: 1400 - DNA, 1017 bp, Zea mays
cgtctgctgtcttaattttgtcagctacgttgaaagccatgtttcgtattaatccgttgtcacataaagttctttctttcagcccttttgtgtatatgctcagatataaggattaaattgactcccgatgagtaagttggtgcatgctgttgtgtaaattttcagtatacatttttttgtttaaatggcatgggcaggcctctatgaggtagcatctaactatttaacaagacatcctccttgtgtactgtttatgatatcaattttgtttgctcccttttattgttttccttctttacttgtcagatgatcatgaatacaactcagaaagctaatttggtggaacaagatgctaaggtttttgtgaaacaagccccacagttcaaaaggtgggggcgaaaacatccatttgttcggtatgggttaccactcatttccttgacagtgtttggtgcagtgggacttgctcaccttatacagggcagcaaagaagtgaccaaggaaaaggaggatatggaatgggaggttgtagagacaacaaaagctctaagtcgaacagggccagtggaaggagcctataagcctaagaaactctctctagaggacgaactgaaggctttgcagcagaaggttgacataaacagctacgactacaagcccatcccaagacccagtgagaaataagtgaagatgaagaccgtttgctagtgcgtcgagtggatgtttgtttcttgatactttcgtcgtctcgtcttgtcacaagttttgtatgaatgtacggagctgattcaagtttgaaattagaatatgaataggaataagtgaagctgtagagaactggtacgaggatccttgaaccgtttgcatatgtttgtttccccccccccccccccccccccccttttttgggttagtaaattctgatgtgtctgatcagttttctagtgtttatttacagaggaaaaaatataaaggtacagtgcatcgtgttgatctagtttttttgtcgtattatta

SEQ ID NO: 1401 - DNA, 182 bp, Zea mays
tgaagctcaggagggatagcgcctaggaaaacacatagatcggagccggccgcgaggagaaagaaagagccaagagatatgtgtgatgaataatctacatggatcttggctagcttttgtgttctcctctggaggcgtggttctgtctatcaatctgaagcgctatctatcctgagctccac

SEQ ID NO: 1402 - DNA, 2285 bp, Zea mays
gtttatcttctatgtttgaaaaatagcttacctgtttctgtatcaccaccaccagaacatgaggagctttgagaattaagaaccgaaagtaaacactgccaaccactcttccgtcttcaaccctttggcaaccagcaaacaaataccagtaccgctccactacttgattgccgcctcactggcaccgctggtccgctcccagttccagtgacactgcaccagaccacccggctccagcgagatccagacccaaaacctcacctcgcagccaacctctgctcggaggggaagggaagggaagggaagcaatggcggccaacggaggcgggtaccgggcggaggacgactacgactacctcttcaaggtggtgctcatcggcgactccggcgtcggcaagtccaacctcctctcccgcttcaccaagaacgagttcagcctcgagtccaagtccaccatcggcgtcgagttcgccacccgcagtctccaggtcgacggcaaggtcatcaaggcccagatttgggacaccgccggccaggagaggtaccgtgcaatcacaagtgcctattaccgaggagccgtaggggcactgcttgtctacgatgtcacccgtcgcgccacgttcgacaacgtgggccgttggctgagggagctcagagaccacaccgaccagagcatcgtcgtgatgctggtcggcaacaagtccgatctccggcacctggtggccgtctcgactgacgacgccaaggagttcgccgaggccgagtccatgtacttcatggagacgtccgccctcgacgccaccaacgtggacagctccttctcggaggtgctgacccagatataccagatcgtgagcaagaagacggtggaggcctccgaggagggggcggccgcccctggcaagggggagaagataaacgtcaaggatgacgtttctgcgatgaagagggttgggtgctgctcaaactaaggcgaatagccggatacgaactgtttgttcgattgtctttctgtggatgctgagggttagaggaccgttgagagagactatcagcttaaattatttattatcagctctgaattcgtggttctgtcaaattcaatcatttttttgtgttcttgcctcctactgctatatttttttaatgaactgaagaatttgccaaccaatctttctgtgtgtactaagtactaacagaagaacacgaaccctttctataaactactacatccatgcaagttacgaaacagtttatacgtgcaaccaatttagagaagttccatctctgcgccgaattgtgctcggctcacctacagcttcatctggctatacactgacgacgacgcagtagcagcgcccgttcatccaggaccagactgaatcagcggccccggatcagctgcgcgcacacgaggaacagcgacgccgggacgccgagcagcatcaccgccagcaagccggcgccgagccccgggcgcgcgttcacgaggagcgcctcgagaaggccgaccgcgccgcgcacgccgaccacgtagctcccgtggtgccgccgctccagctccgtccacccggtcggcggcagcgggatgccggcgtcgtcggcgtcaagaatgccgtcctcctccgacgactccgcccgcgcctcgcggatgcgccgccgcagcgtcgccatgtcctcgtccaccagccggccgccctcggaggagggagaagagccgccgtcggcgccccacgcgtcgcgccgcccggcgccgaggagcacggccctgttcgcgccggcgcgacgtggcagccgaatgggattgggaggtggccccaagaaactgctcgtggagatgaagtgactagggcctgagccaccaatagctctagctcgggttgctgctgccggtgccatagccattacctgctcctgctgctgctgctggtgccgtcgcctacactggaacgtacgagccgagacgagagggtctggtgtgccaaatgcgaggtgccacgtcccaccgtcgtgcgcggcgcgtgatatatatacggcgacgcccggcgccgggaacagcttggacagggacagggacagggacagggacggggaagtgtagcgtagcgggatttgcgcgcgtgattgcgcgaagggaaaacgtggggagaagggcaaaggatctgtcgacagccgtgtgcgggccgcgtccggcgtccatcgcgttcgtttagcccgcctgcgttctcatgcgtgctcactggccacggcccacggctgccggcgcggacgggacgtgcacgggc

SEQ ID NO: 1403 - DNA, 3049 bp, Zea mays
gaagaaatgttttgactaattgtgccgaataaggactctcatggtagcctgactgtgatgcacacacggccagctgaatcgccgatcagatgcagtcatgcagaacaggacccccccccccaccccacccccacgacgagatgccatataagtaaatactagcaagtagcaagggagaaagaagaaggcaagccatcccccacctcctctgcctgcctctttcacacggagcaagcgcgcagagaaagagaggccgttccgttcccttttgtcgctgggcagcatggccatcccgctgccgtgcaaggcgctgccgcggcatgacgggacgaagggcagcgggcaggcgtacgacggcgacgaccagccgtcggtggctgcggagctgcgcgcgctgtggggcatggcggcgcctgtcactgctctcaactgcgtggtgtacctgcgcgcgatggtgtccgtgctgtgcctggggcggctgggcccgctggacctggcgggcggcgcgctggccatcgggctgaccaacatcacgggccacagcgtgctgttcgggctggcgtcggggctggagccgctgtgcgcgcaggcgttcgggtcccgcaaccacgagctgctgacgctgtccctccagcgcgccgtgctgctgcttctcctggcggcgctgcccatcgcgctgctgtggctgaacgtgggccccatcctggtggcgctggggcaggaccccaccatctcggcgcacgccgcgtcgtacgccgcgttcgcgctcccggaccttgccgcgggcgccgtgctccagccgctgcgcgtgtacctccggtcgcagggcatcacgcgccccatggcggcctgctccgccgccgccgtggcgctgcacgtcccgctcaacgtcggcctcgtcttcggcttgggcctcggcgtgcgcggcgtcgcggcggcgcaggccctcaccaacgccaacatgctgctcttcctgctcgcctacgtgcgctgggcgcgcgcctgcgagcacacctggaagggctgggcgcgccccgccgacgtcgccgccggcctcccggccctcgccggcctcgccgtgcccagctgcgtcggcgtctgcctcgagtggtggtggtacgaggtcgtcaccgtgctcgccggctacctccccaaccccgccgccgcagttggcgccgccggggtgctcatccagaccaccagcctcatgtacaccgtgcccatggcgctcgccgccagcgtctctacccgggtgggcaacgagctgggcgccgggaagccgcggcgcgcccggatggcggcgctggtggcgctgtggtgcgcgctggcggtcggcgtgctgcacgtggcgtggacggtggcgctgagcaggcggtgggtggagctgttcacggcggatcccggcgtggtgcggctggcgtcggcggcgatgcccgtggtggggctgtgcgagctgggcaactgcccgcagacggcgggctgcggggtgctccggggcacggcgcgcccggccgtgggcgcccgcatcaacctcctctccttctacctggtgggcacccccgtggcggtgtacctggcgttcggcgcccgcgccgggttccgcggcctctggtacggcctcctgtcggcgcaggccacgtgcgtggcgctcgtcctcgtcgccgtcgtctggcgcacggactggcgcgtcgaggccatgcgcgccaagaagctggcggggctggagctcaccaacgacgccgaggaggagagcaggcgcctcgtggccgccaccggcgagcaggcggaggatactagctagtagtggcgtaggtaggtaagctagctagctagctagctaggtgctgacagcggcgcgacgtgcgtgcgtgcgtgcagggtcgccgtcatcgtctttgaggccccagcagccagcatcaatggaccatactactagtaccatagctagagtggcttggccttttcaattcgctgcaggctagagcttcgtggggcgtgcaggggcctgacggattacaattgattatacctagctttgcgatggcggtggtggtggctgctgtcgcggctcgcaacttgtaggaggacagggtagggcatcccgcgccgtcgctgtcgccttttaatttcctcctgcgcggcgagcggacggagctgcctgcctgaatcagcctgatcgtgtcgccgccgctgtctgatcgggtgcggttttctccatcggcaacttaacggcagcgcgtcgtcttcatatatatctatcttgtttcttcgatcgctagctagcttcgtcgtcgcagccggcccagactgtgcagtgcgctctagctagcagtggaggcagacagagagcccagagccctcaggcgtgcgtacgtcgccgtccgtcttgcgtgcattggcatgccaggcggactgggctgcctgcgcgggcatctcgtgcctttgaccgtgacgccgtcgctgtttccaagcaccgtgtgtgcttgtggaaaggctgcatatgatacaactatggcaggctcgagcatgccgcgggttcgtcgcgattgggacatgatgagccgtggaagtcaggctgccgctcatcaggctgccgctgccaggacggcaacacagacagacagggagacagcctctatctctctcgctttttctggggtgcaggcagcagcgtgccgctgatgcaggcgccgccgaggcggaaattccggggattcggaggccacgaccacgagagacgagagatggggatatgtaaccgcgatccgatatctatgtgatggctattttctctatttgagtatatatacctataagtattttattgaacactaaccttcatctaatctaatagataaaagtgtcttagtctcttggaacgttcgggtctcgctcatatctcttaactcgtgagtataaaatacccgatataaacttagtctaaaaacataaacttagtcttcagccatccatctcttttgactatttaacaattttttaaacgaaaatgttatataaggcttaacaactatttgataaccctgtaaat

SEQ ID NO: 1404 - DNA, 1309 bp, Zea mays
agaaggcataggagctaggagcgatgaccgtacgcgcatatactaggagcagcaaattaaaggcatatataggcaaatagtagtagtagcgaagcgagtagcgacgggcgagagagaaagcagtgctactgctacgactactccttagctcgtagccggttataaggtgacgagagagagagagaaagggggagagagatcttgatctagttctagtagactgctagcgagggagcttttttggtgcaagagaggacgtagaggtaagagagaagggggacggaacaagcagctagctagcagggaagatgggtcgcggcaaggtggagctgaagcggatcgagaacaagatcagccggcaggtgacgttcgccaagcgcaggaacgggctgctcaagaaggcgtacgagctgtcgctgctgtgcgacgccgaggtcgcgctcatcatattctccggccgcggccgcctcttcgagttctccagctcctcatgcatgtacaaaacactcgagagataccgcagctccaactacagcacacaggaagtaaaagctccactggagagtgaaattaactaccaggactacttgaagttgaggaccagagttgattttctccagactacacaaagaaacatccttggcgaagatctgggcccactcagcatgaaggagctcgagcagctggagaaccagatagaggtatccctgaagcatatcaggtcaagaaagaatcagatgctactcgatcagctctttgatctcaaaagcaaggaacaagagttgcaggatctcaacaaagacctaaggaaaaagctgcaagaaacaagtccgcagaatgtgatccacgacgtctcctgggaggaaggcgggcacagtgggagtagtgttcttggtccgttccagggactccttcagtaccatggcaatgatccttccctgcagacacggtaccatcagcaggcctacatggaccagctgaacgaggacatggcggaccctgacgagcacggtcggtctggatggatatgagatgctccggtccgatgccccccaaataatgtcgatgcatgcatatagtttcctgcggtatgcggaactatatatgtgttgaaactgcaccaacgattagctgcctgattgtaatggttagcttaagaactccagtgtattgtattgttgtgtgctgtgctgtgttgtcagaagcttgcaactttgtatatgtacatgtatggtattctgttagtttcttggagctgcgcaaaaaaaaaaaaaaaaaaaaaaaaggttgatgagccaagaaaaaaaaa

SEQ ID NO: 1405 - DNA, 836 bp, Zea mays
acacagataattcagctactcttatgcgtatgtatccatatatatatattgatggtcctatgtaaagcaatgctctttcgactgtacaaacacatcgatcaaagactcgcggcgtggggcgcgagtaaattggcataaaatcggcgaccatccccttccctccacggccgcacccagtgccgactgccgagttcttccgatccgccgccttgcacctgtcgctcctgacgccttgcccttacggttggagcgcatgccgggaccgggaagctccgaaaggcaacgggccgtgacctgtcgctacggacatggaacagtggctgcaccacaatgcacactttactaataatttctcactgtttgtgttgtaagaaagatactggatacatgatattgcatctctactgtgactcgcccagagccgcgcgcgcgcgccatgggcatacacatacatacacacgcactccattaccatgcatcttctctcccacggaggatgatggagacctgccaaagatgtatagttgccctacatggccgatcgaacgcctacaagctgcccgcgccccgcgcgccctatcgtcaacagggcacgcaccaccgtcggagctagcacccgatgtagttttcaccgtcgttgccgccgccggtgaagccgaggggggagcgctgcatatatgggctacatggcagcagcatcaggccaatgttggggggtacaaactagagagggccgggacaccctgctggtgacgatgggtcttccatggaaggtgttggatgaggacgcatatatagatcgagagagtttgaggcaggcttgttccggcgagtgg

SEQ ID NO: 1406 - DNA, 2033 bp, Zea mays
ctataccaaccagccaaaaccaagcagggaatcacaccattcaccaagcagcagatggaagcgaaaggtggcgccgcggcgtggctagctaggccggctcgtgcgcacgcggagacagacacgggactggttgcgtgaccgagctctggtctggtggctggtgctgagagagagggagacagacgacctgcagctcgcatcacagtcccacagtgcaggagggagtggaagagagtagagagagagtgggagcgagagcacagggaggggagttgttttgaaggcaacagcgagccctgctgtccctctgcttcgccacctcctccctccctctctttccttcctcttggaggagagagaagagggggagagccagtcagccagccagcccaagaacagcgtacgtacgttgtcaagtcccgtcgccgccgcagcagcttcgctcctcccgccccgcccaccgtcgcgcgcggcggcggggagcgagcaatggaggccggcggcgccagcggcggcgacgacggggacggccagctgcacggcctcaagttcggcaagaagatctacttcgaggacgccggcggctccagtagcagcggcggcagtggcagtgccagcgcgaccgcgcctccagcgacgcagcagccgtcgccgccggccgcttcgcctagggccgcgcccggtggcggcaggaggggcagggccgcggctggcggcgcgggcccctccttgccgcccgcgcccccgcgctgcctggtcgacggctgcaacgccgacctcaccgacgccaagacctactactgccgccacaaggtgtgcgaaatgcactccaaggagccccgcgtcgtcgtcaacggtctcgagctacgcttctgccagcagtgcagcaggttccacaacctggccgaatttgaccagcaaaagaaaagctgtcgcaagcgtctagcaggccacaacgaacgccggagacggccacctcctggaccccttgcgtcacgatatggccgtctcgctgcaccgctcggtgaagagcccggcggcaggttcagaagcttcatgctggatttctcatacccaagggttccaagcgccatgagggatgggtttccagcggttcgacctggtggtgaaagggtgcctggcagcaatatccagtggcaagcagcgagcctagatcctcctccccctcaccatcagagcgcggcagcaggatacggtgcccactcgtacgggagcccgggtagctcgtcgtcgtcgaggccaccggtgttccctgctggcccggagctccccccaggcggtggatgtctcgcaggagtccccacggactctagctgtgctctctctcttctgtcaactcagccatgggacgctgctggccacagcgccggccacggccacggccacgccgcgtcactgcccgcaacagcaggcttcgacggcaaccccgtggccatggcgagtagctacatcgcgccgccaagcccctggaccgactcccgggcccacgaaggcgggcggcggaacgtgcctcaactgccacccgacgtccccctcggcgacgtgcactctggcccaggcacccatcacggccagttctcaggtgagctcgagcttgccctgcagggaaacaggccagccccggcgccgcgcaatggccagggctccgcgggcgcgttcgaccaggccggcagcacgacggagtggtcgctctaggaggccaaataaaagcgcggcacatcgtcgtagccgcacagcgagatggagcttgaagcctggctccgctagctacctgcatgcgctgtttgcttgcctagaggctagagcatccagtatgataataagcgaggaactagtgcagtgccggccaggagactgatttcttttgcgcttgtccatgaactcgtctgttgcgtctatgtacacctccatggtttgaactcgtcggggacttcgctcgatgtgttattaatctcatgctcatccttccgctaatgttgcctggcggcatcgccaggaatcggttccaaggc

SEQ ID NO: 1407 - DNA, 1671 bp, Zea mays
gtgatcagttggctatagctaaggagactggccggagactaggaatgggcacaaacatgtatccttcttcatcattgctgggtgacaaaaaaggtgacatcgcagttctaccagtggacgaattgattgagcaagcggatggatttgctggagttttcccagagcacaaatacgagattgtgcagaggttgcaagccagaaagcacatatgtgggatgactggagatggagttaatgatgcacctgctttgaagatagcagatattggtattgctgtggctgatgctactgatgctgctcgaggtgcttctgacatagttctgacggaacctggattgagtgtcatcatcagtgctgtactaaccagtcgggcaattttccaaagaatgaagaattatactatatatgctgtatctataaccatacgtattgtgcttgggtttttgctcttggcatgcttttggaagtttgacttccctccgatgcttgttcttgtgatagctattcttaatgatggaactattatgactatatccaaagacaaggtgaggccatctccccatccggacagttggaagctagcagagatatttgcaactggagtgatcattggggcgtatttggctgtaaccacggtgctgttcttttgggtaatttacaagacggagttttttgtgagggttttccacgttagaacaatgaatagaaaaaagatcgaagaaacaggagaccagaatctacttgccgacaacatggagatgctggcctctgcagtgtaccttcaagtgagcaccattagccaggcgttgatatttgtgacgaggtcgaggggttggtccttcatggagaggcctggcctgctgctgatggccgcattcgtgatagctcagctgatcgcgtctgtgcttgctgccatggtgagctgggagcttgctggcatcaaaggcatcgggtggcgttggaccggcgtgatctggctgtacaacttggttgtgtacctgctgctggacccgatcaagttcgcggtgcggtacgggctgagcggcaaggcctggaacctggtgatcgaccacaaggtggccttcacgaaccgcaaggactttgggaaggaggcccgggaggcggcatgggcgcacgagcagcgcacactgcatgggctggagagcgccgggacccctggggagaaagcggcgtcggtggagctggggcagatggcggaggacgcccggcggcgcgcggagatcgccaggctgcgggagctgcacaccctcaagggcaaggtggaatcggtggtgaagctcaaagggctggacctggaggacatcaacaaccagcactacacggtgtaagtgtaaccgccgtgattgattcgtcatagcctccttatcttagagagagggatataaagtaataattggatgcaataaccatctgattggttgcccccactatcttgtcctaaactatcacatgcgttgattttatcttaaacttctgtttggttctttgtacgtgaaagacgtaagttgcatatcatttttgttgcacccgtagataggaaacaaatcattttctgtttgatataaagtagtaattggatcgttagtaaccggtctgatttgctgaactatcacatgtgttaactttatctaagctcttgtttagttcttt

SEQ ID NO: 1408 - DNA, 6234 bp, Zea mays
ccatcgttcatccgtccccagtccccacgccggtcgccccgggtttcaattttcaaactatccccaaaccccaccctgtcccggccggccgtctcccttcgtcccttccagctccacgcctccaccccttccacctctctagcccccttccccccccagatctagcccagccctgaacccatcgcaaccaatgctagcatgaccacgccgcgcggcacccagcgacgcgcggccgcccctgcggcggccgcgggcggcgagccctacaacatcctgcccatccacgacctcctcgccgagcacccgtcgctccggttccccgaggtgcgggctgccgcggcggcgctccgggcggtgggcggcctccgcccgccgcccttctcgcagtggcgcgccgaccaggacctcatggattggctcggcgccttcttcggcttccagcgcgacaacgtcaggaaccagcgggagcacctcgtgctcctcctcgccaacgcgcagatgcgcctctcctccgccgacttctccgacacgctcgagccccgcatcgcgcgccaaatccgcaagaagctgctccgcaactacacctcctggtgcggcttcctcggccgccgcccctccgtctacgtccccgagggcgacccgcgcgccgatctgctctacacgggcctgcacctgctcgtctggggcgaggctgccaacctgcgtttcatgcccgagtgcctctgctacatctaccaccacatggcgaccgagctgcaccgcatcctcgagggcttcatcgacaccgccacgggccgccccgccaaccccgccgtgcacggcgagaacgccttcctcgtgcgcgtcgtcacgcccatctgcgacgtcatccgcgccgaggccgaatccagccgcgacggcaaggcgccgcacgccgcctggaggaactacgacgacatcaacgagtacttctggcgccgtgacgtgttcgaccgcctcggctggcccatggagcagtcacgccagttcttccgcaccccgccggaccgcagccgcgtacgcaagacgggcttcgtcgaggtccgctcgttctggaacatttataggagcttcgacaggctgtgggtcatgctgcttctctacctgcaagctgcagcaatcgtggcgtgggagggcgccaagtggccgtgggatgatctgctctcttcccgtggctcagagtccaaggacacacaggtgcgcgtgctcaccgttttcatcacctgggctgcgctccggttcctccagtctctgctggacatcggcacacagttccgccgcgcatttagggatggccgaatgcttgctgtgcgcatggtgctcaaggccgttgttgcagccgcttgggttgttgcgttcgctgtcctatacatgagggtctggaaccagaggacagacaatgggcagtggtcgtcagcagctgattcacggatgaggagcttcctctatgcagctgcagcgtttgttatccctgaggtccttgccatcgtgctcttcattgtgccttgggtgcgaaacgcattggagaagacaaattggaagatctgttacgccctgacctggtggttccagagccgcagctttgttggccgaggactacgtgagggcacatttgacaatgtcaagtactccatcttttgggtgcttttgctcgccgtgaagtttgccttcagctattttctccaaatcaggccacttgtaaaacccacaaaagagatatacaatctgaatggaatccagtacacttggcatgagttctttggccaaagcaatcgttttgcggtgtttgtgctctggttaccagtggtgttgatctacctcatggatatccagatttggtatgctatattttcttctctgtcgggtgcatttgtggggctttttgcacatttgggagagatcagggacatgaaacagctgcgacttaggttccagttctttgcaagtgccatgtcattcaacatcatgccagaggagcagcaggtgaatgagagcttcttgcccagccgttttcgcaatttctggcagcgattacagctaaggtatggtttcagcagatcctttcggaagattgagtcaaatcaggtggaggcacggcggtttgcacttgtttggaatgagataataagcaagttccgggaggaagacattgttagtgatcgtgaggttgagcttcttgagctgccacctgagctgtggaatgtgcgtgtaatccgttggccttgtttcttgctctgtaatgagctgtcacttgcacttggtcaggcaaaagaagttacaggatctgatcgtaggctatggaggaagatatgtaagaatgattatcgtcgttgtgcagtgattgaggtctatgatagtgcaaaacacatgctgcttgagatcataaaggaggggactgaggagcatggtattgttacacaactgttcagcgattttgatggatccatgaagatggagaagttcactgtggagtataagatgactgagctgcacaatatccatacaaggcttgtagctctattggtcctcatcctcaaacccaccaaagatgttaccaagatagttaatgctttgcagactctctatgatgttgttgttcgtgatttccaagctgagaagaggagcatggaacaactgagaagtgaaggtcttgcacagtcaaggcccaccaggcttctctttgtggatgcagttgtgcttcctgaagaggacaatgctaccttctataagcaagtgaggcgcatgcacaccatcctgacctccagagactctatgattaatgtcccacagaaccttgaagctcgtcggaggattgcctttttcagcaattcattgtttatgaacataccaagggcaacccaggttgagaagatgatgtctttcagtgtcttgacgccttattataaggaggaggtgttgtacagcaaggaccaactctataaagagaatgaagatggcatctcaatattatactatctaaaacagatttacccagatgagtgggagtacttcgtagagcgaatgaaacgtgaggggatgtctgatattaatgagctgtacagtgagaaggaaaggctgagggatcttcggcactgggtctcatataggggacagacattatcacgtactgtgagaggaatgatgtactattatgaagctctcaagatgctgacctttttggattctgcctctgaacatgatttaaagactggatcaagggagttagctactatgggttcctcaagaattggatcctcaaggcatgacggagttgctggtgggtcagggtattacagcagggcatcttcctctcatgcattgagtagagcaagcagtagtgtgagctccttgtttaaaggaagcgaatatgggactgtcctcatgaaatacacatatgtagttgcatgccaggtatatggacagcagaaagctaagaatgaccccaatgcttttgaaatattggagctaatgaaaaattatgaagcattacgtgttgcttatgttgatgaaaggcagatcaatggcaacgaaaaagagttcttctctgttctcgtgaaatatgaccaacaattgcagcgggaggttgaaatctatcgggttaagttgcctggagagttgaagattggcgaaggaaagccagaaaatcagaatcatgcactcatcttcacaaggggcgatgcagttcaaactattgatatgaaccaagacaactactttgaagaagctctaaagatgagaaacctactagaagagttcaatcgttattatggaattcgcaagcctaaaattcttggggttcgggaacacgtcttcacgggttcagtttcttctcttgcttggttcatgtctgcccaggagacaagttttgtcactctggggcagcgtgttctggctgatccacttaaagtcagaatgcattatggccacccagatgtttttgatcgtctttggtttttgggccgaggtggtatcagtaaagcatcaagaataatcaacattagtgaggacatttttgctggtttcaactgtactctccgtggtggtaatgttacacaccacgagtatatccaggttggtaaaggtagagatgtgggcctcaaccaggtctctatgtttgaagccaaggttgctagtggcaatggtgaacaaactttgagccgagatgtttacaggctgggccaccgattggatttcttccggatgctctctttcttctatacaactgttggattctatttcaatacaatgatggttgtgctaactgtctatgcatttgtatgggggcgcttttaccttgcactcagtgggcttgaggactacatcaacaagaacacttcctcttccaataatgcagccctgggagctgttctcaatcagcagttcgtcatacagctaggcctgttcacagctttacccatgattattgaaaattcacttgagcacgggttcctcactgctgtgtgggatttcatgaaaatgcagctacagtttgcatctgttttctacacattctccatgggaacaaagacacactattatgggaggacaatccttcacggaggagcgaaatatcgagccactggcagaggttttgttgtggagcataagaagtttgctgaaaactataggctctatgctcgcagccatttcatcaaagctatagaacttggtgttatattaactctttatgcatcttatggcagtgcatctgggaatacattggtgtatattctgctgacactttcaagttggtttcttgtgtcatcatggattcttgctccattcatttttaatccctctggttttgactggctgaagaattttaatgactttgaggattttctaaactggatatggttccggggtgggatctcagttcagtcagatcaaagctgggagaagtggtgggaggatgaaactgatcatctccggacgacaggtctatggggctgcatcttggaaatcatattagaccttcgatttttcttttttcagtatgcaattgtatatcggcttcacattgctgataatagtagaagcatccttgtctatcttctttcgtggacatgcatcctcctagcttttgtggctcttgtgacagtggcttactttcgagacagatattcagcaaagaagcacatacggtatcgccttgtccaggcaatcattgttgggagcactgtggctgctattgttgtgctgttggaattcacaaagtttcagtttgttgacacttttactagtcttttggcttttctgccgactggctggggaatcatatctattgctctggtattcaagccatatctgaggagatctgagatggtctggaaaactgtggttaccgtggcacgtttgtatgacatattgtttggagtaattgttatggcacctgtggctgtattatcatggttgcctgggcttcaggaaatgcaaacaaggatcctgttcaatgaagctttcagcaggggacttcacatttctcaaatcattactggcaaaaaggcacatgtgttttgagttatattatatttgcccgtgctactgtttgtatgccatgttgaaaacaggatgatcttgcacactgaactgcagattaagagagtatgcacttgctttatgttcttgcagctaaatacatattccaactgaccattttccaaagtgagctgcttcgtcattctggaggactagtttgtctccatggcctatggtttatacaagctttatggcgtgtagagtagatggatgatagctcttccctgtacaggcaatctatttgtcgccgattcttcttaactttcgatatacacttggatgttcatgctagagatgatagtccatctaatgagatgtcgatgctgtccgtattcgtaaaatcgtaactccagatttttggtagcctttagatatctagttaaggctgtacaaaacttcatcatgagcgctattcaagctatggtttctgtcccctactcttttgttgtaaagggtacgatatttctgcatacctgcacatatctcagcgttatgtggaggactaatcctgtacacctaaattactgcctgaaatgtcatcttgcttggtccatatgtgtctcgctgctgggctgcatctaagctcctgtgcatgtggcacgttacgcgcgagatgctgacatgataatgccctattcgtctcgtgcttttatttatataaaggaaattatgtcgttg

SEQ ID NO: 1409 - DNA, 2532 bp, Zea mays
atgaaagtggtctctatacaccttgctgctgctgttgttgctgttctacttctgttggcggcaaagcgcacccctgctattgcggttcctagccctcaatgccaatggcaatgcggcggcgttgacattgcgtttccgttcggcatcggtgacaactgctcgctatcagcaggattcaacctcagctgtcaggaggtccaaagtggcgtctacaggccattccaaggtaatattgaggtgctcaacatctccttgataaatggcacggtccgggagctgaaccccgtctcgacatactgctacgactcctcctctggttccatggagtccagtacctggtatttcgacgcgagcggaaccccgtaccggttttcggacgtccagaacaagttcaccgtcatagggtgccagaccctcgcctacatcacggacaacaccgacaagagctaccagagtgggtgcgtctcgacgtgccagaatgtgtcagacctaacggacggatcctgctccggcatgggatgctgccagacaaacatacccaagaagatgggcttctacaacgtgagcttcgaccctgcctccgacacaagccaaatctcacggctgggcctcggcagctgcagctatgccgtgctgatggaggcggaggagttcagcttcagcaccacgtacatcaccaacacgacagctttcaacgacaccaacagtgggagggtgccggtggtgatggactgggcgataagagatgatggcgcgccgtcgtgtgagctcgccacaaggaacgagacgggcacttacgcgtgccgcagcggcaacagcaagtgtgtggaatcccccaatgggccagggtatctgtgcaactgctccggtgggtacgaaggcaacccatatcttccagatggatgccatgatgtcgacgagtgcaagaagaacagtccatgcccttcagtaggaggtgtatgccacaacacggtcggagcgtacaggtgttcttgtcgagcaggaagaaagcttaacaagcaaaacaatacgtgtgaccctgataccacattaataacaggggttacaatcggcttccttgttctcgtaatcttctcctccttcggatacatgatcctccagaagagaaaactgaaccaggttaagcaagatcattttcggcagcacggaggcatgattttgttcgagaggatgagatcagaaaatggccttgctttcacggtgttcagtgaagctgagcttgtaaaagctacagacagctacgacaagagcagaataattgggaagggaggccatgggacagtctacaaagggatagtcaagggcaacgtgccgatcgcgattaagcgatgtgcgcttattgacgagaggcagaagaaagagtttggtcaggagatgctgatactctcccagatcaaccacaagaacatcgtcaagctcgagggctgttgcctcgaggtggaagttccaatgctggtctacgagttcgttccaaatggcaccctctacgaactcatccatgtcaagaaccaagcgctacagatccccttcagcaccctactgaggatcgcccatgaggcagcagagggcctcagttttctgcactcgtacgcgtctcctccgatcatccatggcgacgtgaagagcgccaacatccttcttgatggcaactacatggccaaagtgtcagattttggggcctccatactagcgccgtcggacaaagagcagtatgtcacgatggttcaaggtacctgtggatacctcgaccctgaatacatgcagacatgccaactgactgagaagagtgacgtctacagcttcggcgtcatccttcttgaggtcctcaccggccaagagcctctcaagttggatgggcctgagacgcagagaagcttgtcatcgaagttcctgtccgctatgaaggagaacaatcttgatgcgatcttgccgagccacgtgaatggtggacaagagagcaatgaattgatcagagggctcgcacagctagccaagcagtgcttggacatgtgtggctgcaacagaccatccatgaaggaggttgccgatgagcttggtagattgaggaagctttcgctgcatccttgggtacagatcaatgcagagatgatagagtctcaaagccttcttagtgggacaacgactgctagctttgaaatagaagttggtacaactgggtatcctacacaggaagctgagaacctgcccatgaacccaagaagttcgtactatgcgaggtaggtgattagcgtatgttgttgtgtactccgttgaaatttctgctgctaggataactgcaagctagcagttctgctatcaaagatatactgcatattgacacaaagctctgccgcctatctttagccattcaagtatgtatatgtgtttctgcggagcacgtctgcaacatatataatacggtctttttttaatgtggtgctcttagttaatactccttgacaataaattatatagcttatttctttagataagtttatacacctgaaacat

SEQ ID NO: 1410 - DNA, 2360 bp, Zea mays
tgcgtgcacccgcccatccacgaacgaccatgagacctctgatccatcccccctggccctgccccccggacgccgcgctcaaaagcagcagcgcacgcaccaccaccaccaccgcaccaccatccgcctcgctcgcactgacagacaggcaggcagagagagagagagagcgcgagccggattgattgccgagggcagagcagcggcagagggagcagcaacagcaacagtccacgaccgatcgcccggcccgcgcgcaggcaggcagcagccatgaaccacctgacgccggcgctccacggggcgatgcggccgccctcggcgcaggggcaggggctggcccggtacggctccgcgccgggctcgctcctggccgccatcgccgactccgtcacccgcggcgaccccgcgccgccgccgccgcccgtgagccggttctactccgccgagtcctcggggctcacctcctgcgactccagctgccgcaccgactgcggacgcccgcccctcgagcgggcgtacggcggctccggcgagatccgcgtgccgccgccgctgcagcagcagcagcaccacctgctggctccccccgcggcctccccgctgttccgccacagcagctcccccgccgggctgctctcccgcctcatgaccgacccgcacggaatggcggcgagcggaggagcgatggggagctacacgcaggcgggcagcgacgccgcgctgggccccggccacggccacggccacgcgcagctcagctcgcagtggagcttctccaggcaggacctgccgcagatctcggagatggggatgataccggccgacatcggggagagcatcgtgggcgccggcgggtgcaacagctccagcgacgccgcgcagtcctcctcctacctctccaggaccttctccgtcggctcctgggacgacaccaactccatcatgttctcgtctgccccctgcaagaagcccaaggtggaccccgccgccggcgccgacgacatggtcaccaacttcagcaccattgacccgcagttcggcctgtccaactcgtccctggagctgcccggcatggacgactacctgcagctgcagcaggactccgtcgcctgcagagtgcgtgcgaggcgtggctgcgcgactcacccacggagcattgccgagagggaaagaaggacgaggatcagcaagaggctgaagaagctgcaagacctcgtgcccaacatggacaagcaaacgaatacgtcggacatgttggaccttgctgtggagtacatcaaagagctcaaggaccaagttgagaagctaaaacacgaccaagcaaactgctgttgcctaggcaacaagagctgctgctgatgctggagaagcagacggaggagggtttttacgccgtaacaatgtgactgttaaaccagagctgttgcttcaggagaccaggccgcgggcagaagtgcgtgacatgtggagcggcttccatgactcagcttcctcttttcttggttgttccacggactagcgaccggggtgccaacggcttgaagactaggagataacaagtaggacgatgttgtaatttagttaccgcgacgcggtggctctggctttcgtgtaaagaagtcctccctttcaacgcgactgggattgttgttgctggtaaaattgttgtaggaatatcatctgtgctccatttttcatcgagctcatctttttttttgtgtgtcactggattttgacaagaccgtaactcagaaaccgagcactgaccgagcgttcatgccaccccatacgaagtccaagagaattttagtatgacaacttgagcattattcagcttttttttttctatgcagcattcttgttgagcaaaaacgatcgaagaaactttacacggtcggtcactcgatgctgggcatggtaccaggtagtagctcaactgattttctgactcgggtgacgagtttttttttgtgtgtgtgtgtgtttatttatacatcaaacgttgaagaacagaaaaggctggtacagtcaaagccgccaggcatagtttcgtattggctatacggctgtgtggaactggagtaaaaaaatagcgtcgtcaaatcttgagctgctcgcagttacgcagctgtcctgtagaagaagcttaggcagcgcagcccccggtgacctacacacctcgccttctcgatgattgtgttcttacgagagatggctggagtgcgtcgtagtgcccgtagccgtcgtagagaacgcggactggatcgtcctttccgtattcctggccgtattccgctatgatccttgggccgtcggagctgcccgtatacatgtagacggtgatgggcatcctgcaa

SEQ ID NO: 1411 - DNA, 1174 bp, Zea mays
attcccaccagcaagaccaacaaacccacttctgactgaccactgtgccgcgccgtggtcaccggacggacacacagaacgacgatggccgcgtcggcgctgcaccagaccaccagcttcctcgggcaggccctggtctcccgcgccgccggcgtcgatgccggcggccgcatcaccatgcgccgcaccgtcaagagcgttccccagagcatatggtacggccctgatcgccccaagtatcttggcccgttctccgagcagacgccgtcgtacctgaccggcgagttccccggcgactacgggtgggacaccgcgggcctctcggccgacccggagacattcgcgcgcaaccgggagctggaggtgatccactcccggtgggcgatgctgggcgcgctgggctgcgtgttcccggagatcctggccaagaacggcgtcaagttcggcgaggcggtgtggttcaaggccggcgcgcagatcttctcggagggcgggctggactacctggggaaccccaacctggtgcacgcacagagcatcctggccatctgggcgtgccaggtggtgctcatgggcttcgtcgagggctaccgcgtcggcggcggcccgctcggggaagggctcgacaaggtgtaccccggcggcgccttcgacccgctgggcctcgccgacgacccggacaccgccgccgagctcaaggtgaaggagctcaagaacggccgccttgccatgttctccatgttcggcttcttcgtgcaggccatcgtcaccggcaagggccccatcgagaacctcttcgaccacgtcgccgaccccgtcgccaacaacgcctgggcatacgccacgaacttcgtccccggcaactaactgactgagcaacgccgtacatgtgtactaccatcagatccatccattcgttcgtccgtccgtcgagtgaacagtgtggtcttctctgtactctacttgttcagatcgtaggcgtgtagtagttgcaccagccggcgtatgctcatgatcgatgtgtgctcatcaatcaatgtcaatggctgcctgctgtaagcggtcgatgtaaactaagcacagacgcatgtatcgtcatcagtggatgaatcaatctatcgatggcctgtgccattcatttttgaatcgatcaacatcactccatcgatcgacc

SEQ ID NO: 1412 - DNA, 1157 bp, Zea mays
attcccaccagcaagaccaacaaacccacttctgactgaccactgtgccgcgccgtggtcaccggacggacacacagaacgacgatggccgcgtcggcgctgcaccagaccaccagcttcctcgggcaggccctggtctcccgcgccgccggcgtcgatgccggcggccgcatcaccatgcgccgcaccgtcaagagcgttccccagagcatatggtacggccctgatcgccccaagtatcttggcccgttctccgagcagacgccgtcgtacctgaccggcgagttccccggcgactacgggtgggacaccgcgggcctctcggccgacccggagacattcgcgcgcaaccgggagctggaggtgatccactcccggtgggcgatgctgggcgcgctgggctgcgtgttcccggagatcctggccaagaacggcgtcaagttcggcgaggcggtgtggttcaaggccggcgcgcagatcttctcggagggcgggctggactacctggggaaccccaacctggtgcacgcacagagcatcctggccatctgggcgtgccaggtggtgctcatgggcttcgtcgagggctaccgcgtcggcggcggcccgctcggggaagggctcgacaaggtgtaccccggcggcgccttcgacccgctgggcctcgccgacgacccggacaccgccgccgagctcaaggtgaaggagctcaagaacggccgccttgccatgttctccatgttcggcttcttcgtgcaggccatcgtcaccggcaagggccccatcgagaacctcttcgaccacgtcgccgaccccgtcgccaacaacgcctgggcatacgccacgaacttcgtccccggcaactaactgactgagcaacgccgtacatgtgtactaccatcagatccatccattcgttcgtccgtccgtcgagtgaacagtgtggtcttctctgtactctacttgttcagatcgtaggcgtgtagtagttgcaccagccggcgtatgctcatgatcgatgtgtgctcatcaatcaatgtcaatggctgcctgctgtaagcggtcgatgtaaactaagcacagacgcatgtatcgtcatcagtggatgaatcaatctatcgatggcctgtgccattcatttttgaatcgatcaacat

SEQ ID NO: 1413 - DNA, 2095 bp, Zea mays
atggccgaacacacaagctcgatttcagggcagattcgttgtatatgcacgtacgcgtgtgcgattccaggatggacgtttgtccattgggcccgcaatttcggcggcgacagaaatggacgggataaagattccgtcacgtccccgtcgtccggcaccacccagagcttgtccctctcgcgtgttgcttcctcggttcctccccagctcaaacttccaagaacccgtgaagtgaagtgaggaggtcggcggaaccggaacccaggcgatacgagatgatcgcaaacggcctccgcaaatccagtgctgcctcctcccaggttagcaagctggtgaaatacattgctagtgctggaagcttgcaaggggggcacagtttatcagagccgtctgccagacattacagctctgaaccttcacttcaggcgacagaagaaaatgggtttaaggggcacagcatgctggctccattcacagcgggatggcagagcactgatgtacacccattggttatagagagatcagagggttcttatgtctatgacagcaatgggaagaagtatattgatgctcttgcaggactgtggtgcacagctttaggtggtaatgagcctcgactagtcaaagcggcaactgagcaattaaacaaattaccgttctaccattccttttggaaccgtacaaccaaaccctcattggatctcgcaaatgatattctcagcatgttcaccgcaagggagatgggaaaggtgttcttcacaaatagtggttcagaagcaaatgactcccaggttaaactagtgtggtattataataatgcactgggaaggccagacaagaagaaatttattgctcgctcaaaatcgtaccatggatcaaccttgattgcagctagtctatcaggtctgccagcgcttcatcagaagtttgatctaccagcaccttttgtcctgcacacagactgccctcactactggcgattccgtcttcctgatgagacagaagaagagttttcaactagacttgccaataatttggagaatcttgtcctcaaagaaggacctgaaacaattgctgctttcattgctgaacctgtgatgggcgctggtggtgttatccttcctccaaagacctattttgagaagattcaggcagttctgaagaagtatgacatcttgttaattgcggatgaggtcattactgcatttggaagactagggacaatgtttggatgtgatatgtataatattaaaccagatcttgtttccatagccaaggctctttcttctgcatatatgccaattggagcaattctcgttagcccagaaataacggatgtaatctattctcagagcaataaacttggttcttttgctcatggctttacatactcgggacatcctgtttcttgtgccgttgctgtagaaaccttgaagatatataaggaaaggaatattgtagaacacgtcaacaaaattgctccaaggttccaggagggaatcaaggccttctcaggcagcccaattgttggggagatacgcggtctgggactgatacttggaactgaatttgtcgacaacaaatctccaaatgatccatttccagctgaatggggtgttggttcgatatttggcgcggagtgcgagaagcgtgggatgctcatcagggtggctggggacagcatcatgctgtcacccccgctgatcatgactcccaatgaagtcgaagaaatcataagcaaattcggcgatgctctgaaggctacagaggaacggattgtagaactgaaatccaggaagaattagccgatgctgctggttgtaacgacagtgaggatggtgatggcagtgtccaatatacagtgtattttcaaactttatttcagtaaagtgctgggctggaatcttgtagtcggttgcatagcgacagttgttccttgttatggagcaataagtaatgcatctgcttaatcagagtagcatacccttgggtttgtgctggtacaggtttttcaaatgaacatagcttggtataatgtagggccatagtacccccccacccccccccccccccccccacacacacacacaaaacg

SEQ ID NO: 1414 - DNA, 2520 bp, Zea mays
cacacatatgggtcgtcccaatcccaagtcccgaccaaaaccccaacccctccccaccaaacccggccagggcgcccaaccaaaacctcccagcacagcgcaccgcggctcctccacgcctcgctcgccgtccgtccccgcgctctcctgctggtccccggccagtccgtcactcccgtctcgctatgtaatcaccctgcccaggactccatactccagtcagtcagtcactccactagcgggctcgccgcctacagctaaccaataatggcggatcaccccatgaagccaccagcttccggctccatgtgcgcactcgcctgcctcttcctcctctccgccggcatcctcctcgccgccgccgtctaccggccgttccagtcgcgcgcggcggcgtcgtgggacccattctccagggtgcagcagaaggaggaggccccggcgccgccaccgctcgcccgccgcggctcgtaccgtgctgcgccaccggcgccagacgccgtctcaccatcagccggcggccctgctgactggagcccggacgacgacgacgacgccgacgctggaccgccttcaccggccccggcgccgtccgaggaaggatggggggacggcgacgaggacgcccagtgcgacctattcgacggagagtgggtggaggacgcggcggggtacccgctgtacgacgcggcagagtgcccgttcctgagcgaccaggtggcgtgccgccggaacgggcgcccggactccggctacgagcggtggcggtggcagcccaggggctgcggcggcaccacgaggctgggcggcgcggaggccctggagctgtgccgggacaagcggctggtgctggtgggcgactcgctgaaccgcaacatgtgggagtcgctcgcctgcatcctctacgcggcagtgccggaccggttgcggacgcgcctcatcgacgacgctggctccgagtacatgatcttccgcgccatggattataattgctccgtggagttcttctggagccccttcctcgtgaagctcgaaacaaaagacaacaagaccaaggcactcgagctggaccagctgccgccaatgctgcagcggacgctcggtgctgacgtcctcatcttcaacaccggtcactggtggactcacaccggcaagctcagggcgtgggatcatctcgagtggggcggaaagacggtgcagatggcaggtgaggaagccttcgatggagcactgaggacctgggctaggtggatcgactacaatatagaccctagcagaactcgagttttcttccgaagtgtctcacctgaacacaagagcgtaaattggtgctacaaccaaacggctcctatctccagggggaacatcgctccatggtttccacaaagtttgatagacatcatcgagaaaaacatcaagaggatgaaaacgcctattgtatatatgaacatcactcgcctctcagaactccgaattgatgcacacccatcaatttacaccatcactcacgaaggaaaaccacttagcaaagagcaacggcaacaaccactcacatacagtgactgcagccactggtgcctaccagggctacctgatacatggaacatgcttttgttcaacttcctaattagacctctccccagtacataaaaagctcgggtgttttcaattgttcatcattcatgtatttctactaaggtgaggtcattttttggacagtagtttatcattatcatgttacagagtgaatggcaaatcaatcaaaacggagggctgtacaaacagagaaacatgatacacagacattaccgcaaagaatcacaatatacatacattgcaacattggtaaacatttacattgaagaacatagatacaaatttacatcgacgaacatataccactaggatcaataaggcagttcttatcgcaggctcgcggggagagaaaatgcactcaatggctcaaatcgactaacctgcctctgtcccaaattaaaaaccattttaggtaattaatgattgatgtatgtattttatgtctctaaatgcataatcatccatttgaatttgaatgtagatataaaacccaagagctaaaacgaatactattttgggacgtagggagtaccaatacagcacaattcttatcgcagggggaaaatagcacctcaatggttcaaatcgaataaacaatcaactccattccaaaatataagttattctaacctcttttttaaggtgcataaaagagagcagacccatggctcccggaagggataaactgacaagccttcccctagatgctgataggctcattcaaacccaggatattgactgagacagctctcgccactacatcagacatctgtcctttcttagattcatagcttttactatatatctagacataatacatggttagacctgtgtttctgttagcctctctagatagtaattatactctatctattccaaacatccgatcaaaattgacacattactatgtatcttgacaaaatc

SEQ ID NO: 1415 - DNA, 1583 bp, Zea mays
cgatgcctctccccgccgcgatgagatcatccatgctcagaggtcggtgtaacctcttcctccctttcgctgctcgctgttcgcaggccggaggaggaggcggcggcggatgctcccttctgctcccgcgccggtggcagtcgtcgctgccgcagctggaccacgtcgccgacaggtccaacgaggagagcggcggcgagatcgactgggacaacctcggcttcggcctcaccccgaccgactacatgtacgtcacgcggtgctcgccggaggaccgcggcgacttcccccgcggcgagctctgccgctacggcaacatcgagctcagcccctcctccggcgttctaaactacgcccagggcctgttcgagggaatgaaggcgtaccggcggccggaccgggccgggtacacgctgttccggccggaggagaacgcgcggcggatgcagcgcggcgccgagcgcatgtgcatgccggcgccgtcggtggagcagttcgtccacgccgtcaggcagacagtcctcgccaacaggcgctgggtacgtgcgtacgttccgctgtttgcccgccccgccccagccacgcgccggcgccgaccagcgatcacttgcgtgccatgcgttccgtttgcaggtgccgccgcaggggaagggagccctgtacctccggcctctgctcgtggggagcggcccgatccttgggctggctccggcccccgagtacaccttcctcatctacgccgcacccgttgggaactacttcaaggtcagttagtttccactgccacaccggttccgttcctgctgaacagagaacgagacgcgaccttgatttttttttttcaggagggcctggcgcccatcaacctggtggtgcatgacgagttccaccgcgcgatgcccggcggcaccggcggggtcaagaccatcgccaactacgcgccggtgctgagggcgcagatggacgccaagagcaaggggttcacggacgtgctgtacctggactcggtccacaagcggtacctggaggaggtgtcgtcgtgcaacgtgttcgtcgtcaagggcggcgtggtcgccacgccggacacccggggcaccatcctgccgggcatcacgcgcaagagcgtcatcgagctcgccagggaccgcggatacaaggttgaggaacgcctggtttccatcgacgatctggtggccgcagacgaggtgttctgcaccgggaccgcggtggtggttgctcccgtgtcgacagtcacgtaccagggcgagaggtatgagttcagaacggggccggacacggtgtcgcaggagctgtacacgacgctgacatccattcagatgggcatggccgccgaggacagcaagggatggacagtagcagtagagtagattaataaggttggggaatgccatcgccacgacattggatcctacatcagtattgtcatccggtagaatgcatactcggttgatcagcatatgtagtgttgcagcaaattgaagaataaaccgtgtgtgttcgatggcgatcagtgacgaggccattgagcagccattgatttgatctccgcgagtcccttgtgc

SEQ ID NO: 1416 - DNA, 1127 bp, Zea mays
acaaaaaaaaaaaaacagagcgcagcattggaggcgaggaagagctgtcggccggagatggacaagtactgggaggagacgcagcgctacctggagtacgaggagctcagcatctacttggaggcgcaggaggacgccatgtcttgctacgactccagctcgccggacggctccatctcccactcgtcgtcgtcggcggcggcgtgcggcaacaagaacatcctgatggagcgcgaccgccgccgcaagctcaacgacaagctctacgcgctccgcagcgtcgtgccgaacatcaccaagatggacaaggcgtcgatcatcaaggacgccatcgagtacatccagcagctgcaggtggaggagcggcgggtgctgcaggagctgcgcgtgctcgacgacgacaccgccgccgccgccaccgcgcaggtggagtgctgcgacgtcgacgggggcctgctgcgacgggaagccgagcgcgcgaagaagatgaagcgcgcgcagtccgtcgccagcggcgcgcagtctgctccgcctccgcccccgccgccgcacgtcgaggtgctggagctgcgcgtgtcggaggtgggcgaccacgtgctggtggtcagcgtgacgtgccgcaagcgacgcgacgccatggccagggtgtgccgcgccatcgaggacctccggctccgtgtcatcactgccaacgtcacctccgtcgccggctgccacgtgcacaccgtcttcgtcgagtgtggaaatggaaatctggatagtcacgtgctcgatcagtcgatcggatccccacattcacatggcatacatagctcgcacgtgcttcagatgcaggattgggaaagagagaagaagctgggggctgaggatctctccccacccggctcgtatcatgccatgacaatcacacgctgggtgggatcccatcacgtgcgccatctctcccctcggcgtcaaacgcacatggcgtactgtagtagtactagcaaccactttttgcctttttttggtgattcagacttgatgaaaatgaaacagattaagcgcgtgggggaggacatttgtaagaaatggacttagcggctgtttgtttaagatcataatttaacttagggctagtttggtaa

SEQ ID NO: 1417 - DNA, 720 bp, Zea mays
cgcactagttcgcatcaagcttcaagcatccccacacgcactccgcctccgctccgctgtctccaccggtccgcccctcctcccctcctttgcgcctccccgaatcgcatcagcctttctcctcgtgtcgcgactcgcgagcgaaaccctcgccatggcggaggcgaccgacaccgccgcagccacgccgccgccagcgccagcgatggcgactttgtccccgcctcctaagtcggggatcccgccgcggtacaacctggacgccaagtgggacgcgtgcctcgacctctccatccgtcgagttgcctactcctccctcgccggcgccttagcgggcctcctcctcttccgtagccctactactcgctgggcatcagttacccttggggctggtgtggggataggggctgcatacactgaatgctcatacttgttcagtggtggtcctccaaattggtcacccaaagtatcaacaattccttctgcacactctgaagtaattgctctatcattctcccttaatcctgtttgaactctgtggtgactggtttacaaacatcaatattgctgcattgctatagtcttctactaaactagccagttgtccgtgctttgctacggtttttatatatcatataaataggtattaagatatttattcaaatataattattgtttatttctaaacactaagacacgtgtggtctggtggttagcccc

SEQ ID NO: 1418 - DNA, 6657 bp, Zea mays
atggagtccccaacatatacccctaaggttgtacaccctacaacagatgcaattgaacctaatggatccgctcttaccccctgcgactgggttatccctgatatcgccagtaacccgttcctaccagcttcaacacagatcgaggatgccgattcactgcgtatgtctactagaccactaagacgtaaacaacatgtgccacgtggtgaaagacaagctatcttagcccgtcgaaaccggcaatttgaagcatccatttcaaggaacatggctactgtggctgaggatatcattagtgacgccgaggaaggggatgattggacacaaccccatatgactgaaaagatcaacaacaatggtaattactatcatttttatccccccttttatcctgaatgcccaggtattttatgtgtcttgtattttcaccctccagttgatgacgatgacggtgtcgtatttgaagacgatgctgatgagaacgagggatacctattcgctgggcaatatgaggataccgatgaggatatagagatcgatggtagtcaagatgaatcgagtgccattgatgttcctgacccgtacgacaaggtgtatagcaacatccctgaagaaacccatatgctaaagactgttcccaactgcggttattgcaccgcgaagaagtttgagtatgagacacctggtttttgttgtcgtggtgggaaggttgagctagccccactggagacccctccccaactcaagaggttgtgggatagtgcagactctgatgctaggcactttcgtgataacattaggttttttaatggccatttctctttcacttccctatactgttgcctcgatagtatgacaactaatgtaagggattctggtatatacacgttccgagcacagggcatgatgtatcacaatatcaagtcatttggtagggatggtggggcagagcataaacaccttgagctttacttttatgatgatgatcccactctcgagcatcggtaccgtaagtgtcgcgaagagcatcaacagaaagacaaagaggttattcgacagatagtcgacatactacgtggaaacccgtacttcgagcaccttaggaccatgggtcacgttgagaaccttgatgactatcgtatcgcgttgaacctagaccagacgttgaaccagaagacatatataacacctctcacttcggaggtggccgctgtctggatcgaagggagcgaagggagaggccagttcagcaagagtgttatgctccatgggaaggacagttcaagccactgcatccgctcataccatggatgctacgatgcactatcatatccattgttcttccctagaggcgaacttggctggcacgcaaatatcccaaaggttggagtatccatggacgaagtggatgcataccgtgcgacacatagggcaagtaatgcaaatgatgaagatgcgggcccacgaaggaatgaccttacgatttattgggcccttgggcctttcgtgagtgactactactgctacaaattccagattcgccccggggtattcaatcctatacttcatggaaagcggctttttcagcagttcgcggtcgacacgtacataaagattgagaactctcgtttagattacatacgcaagaatcaggatcggttaagggcagacctgtaccagggcttggtggatagcatgctagatggagatattagaggagagaaggttggcaagcgaactgtgctgtcgacgtcgtttattggcggtcctcgtgacatgagacgtcggtatatggatgctatggctctggtgcggaagtttggtaaactagacatatttcttaccatgacatgtaaccctaactgggatgagataaggagggagcttctccctgggcagacaccgcaagatcgtccggatcttgtagtgcgtgtctttcatgcgaagctacaagagttaaagcatcggctgactaaacaggatattcttggtaaggtccgagcctacgtctatgtcgtggagtttcagaagcggggtttgccgcatgcccattttctactcataatgcagaggaagtacaagctcacatgtcctgagcagtacgaccttttgatctcagccgagatcccaagcaacaagtaccctgaactacgaaagatggttatcaagcatatgatgcatggcccgtgtgggtcgctaaaccctaactgcccatgcactaagggtcgtaaatcgtgcaagaatcattaccctcggcctttcagtgacacaaccttgcaagggaaggattcgtaccctatttatagacgtcgtgacgatgaccgtaaagaaaaggtccgagggtgcgaactggacaatagatgggttgtcccttataacccatacctccttcgtctcttcaactgccacatcaatgtcgaggcatgtgggagcatcaaggctgttaaatacctgttcaaatacatatacaaaggccatgatcgtgcgtctgttgttatgagagatgcgagcaaggcagatgatgatgttgatgagatcaagcagtatagagatgcaaggtgggtgactcctccggaagccttgtggaggatatacggctttgagcttagtcagatatctccacctgttatgcagcttcaactccatcttccaaacatgcacatggtggcgtttcacgagcggcaaatggtcgagcgagtcgtcaaccgtccaggtgttgataggtcgatgctcacatcatattttgaggcgaataggctacacgaggaggctcgtggcatcctatatcgtgacttccctgagtggtacacttggcagagtggtaagggaaaagtatggcaacggaggaaacgagatacaggtggacaagtcggtaggatagtctctgctcatctggctgagggggagcgctactatcttcgtgttctcctaaaccacgtgactggcgccgcctcctatgtggatctaaggacagttgatggtgtcaccctaccgacttttcgtgaggcagcagagagaaggggactacttgagtcggacaacacactggatgagtgtctcactgaacgtgctcttttccagatgccatcgtcgctgcaacggctttttgccacaatactggtttactgtgagccaagcgatgtggctgtactctggcagaaacacaaagattctatgtccgaggactatcaacacaagagtcagaacaaaactcatgttcagcagatggtattgattgacattaggaacatgctgcagttaatgggaaaggacataaagacattccctctacctcctatgatcgacgcgtatgacgatgctattggtactgctcgggaggtttacgaggaggaaagtatccaaccgacagtggaagatgtggctcttaaagactctcttaacgaggaacagagggccgcctatgataagattatgtctgccgttgacaccgatcagggcggattattctttgtggatggacctggtggcaccgggaagacttatctatacagagtgctgctcgcgacgctacgcaaccagggcaagattgcagtggcaacagctacatctggcgttgcggcttccataatgcctggaggaagaaccgcccattcacgcttcaagataccactcactattgacgatggcgctgtatgtagcttcacgaagcagagtggaacaacagagttgctacggaaagcatctctcattatctgggacgaggcttctatgactaagagacaagccgtggaggcactggacaatagcatgcgcgatataatgggtcgccccgcactaccatttggtggtaaaaccattgtcttcggtggagatttcagacaggtcttgcctgttgttcgtaaagggtcaagggctcaagtggtcgcgtcttcgctacgaatgtcttacctatgggagtccatgtcccacttaaagcttgttagcaacatgagagcaaaaaacgacccttggtttgcggagtttttgctgcgcgtaggcggtggaactgaggaaacaaatagtgacggcgacattcgtcttcctgatgatgtgtgtgtgccttacagtgggagtgacaacgatcttgacaacctaatagactttgctttcccaaatctcaacgaaaatatgtctgattccacctacatcacttcaagggcgatactgtcaacacggaacgactgggttgatatgataaatgttaagatgattgatcgttttcaaggggagcatatggtgtatcatagtttcgatagcgccatggatgatccccacaactactacccacccgagttcctaaacacattgacgcctaatgggctaccacctcatgttttgaagctcaagattggatgtcctgttatattgctccggaatatagaccctacaaatggactttgcaatggcaccaggttggtcgttcgtggcttccaaagaaatagcattgacgcagagattgtactgggtcaacacgttggaaaacggattttcctaccgcgtataccgttgtgtccctccgatgaagagatgttccctttccagttcaaaagaaagcagtttcctgtacggcttagctttgcaatgacggttaacaaagcacagggtcagactattcccaatgttggtgtatacttgcttgaaccagtgttctctcatggccaactatatgttgctctatctagagcgacagcccgatcgaacataaagattcttgtcatcccagctgtcgatgggaggaaaaagtcaaggaagggtgtaaagaaaacccccaccgtagattgtgggacatataccaagaacatcgtctacaaagaggaaatcccttgtgaaccaagggtagaagtcgttcttattgatgatgcctttgttgaaaggaagtggatggagtgtttatttcagccgagcgcatatttaggtgacgaggttatagactgttacataaatttgataaaagctcaaaagcatctaaagtgtcgatctggaggtcgcgttcacatagaaaatgctttccaattcaatttcctgaagcgagatggtgatcttgaaattaaaacagaggagctatatccaattaaagacatgacacacatatgtagcgctgaacgaagggtgttactttacctagaccatgacatggtgtttattccgataaacatccgagagacgcattggtatcttgctgtgatccatgcaagaaatatggagatacaagtgctcgattcacttggtacttcacaagaccgcaaagacctcactgactctattaaaggactgcaaagacaaatagatatgatatctcaacgtaaggagttaaaagaccacaggtggccagacctccaaattgcttcttggtcgctcagagaaatagacatgggatatgcaaagcagacagatagctcttcatgtggcctctttcttttgaactatatcgaatactggacaggggatgaactgtctgacagttttacccaggatgacatgtcacactttaggaaaaaaatggctgctatattactatcttcagacctgaataagagaagggggtgtctgttatacaaaaatgaaaaagaagttgactctggaagcccatctgatgttgagatattagaaaacccaacagattctaataagaggaaactactccacgtgcttgatgatagcgaagtagtgtttgaagatgaggaaggccctattactcaagcagacttgcaaaggtggtttgttgatgattgggataaaagagctcctgtaaaagtctctaacgatggttgcaccaatgactttttaatggttggtctttccacaaaggacatgccagtgaccaaagccgattcaatagatgttttatgtgattatatcatggcaatagaagacgatacgacactagagagaacatgggtgcgaagtttcaatccttttaagatagaaatatctgtcaaagacctgcaaaacatattaacgacaactcaagatatgattctaagatgttttgatatggctgttcggctgcttgccaataaagagtcacgtaaaccgaaagaagaaatcataaataatagaaagcattatatggacatgcgtttttggagaatggttggttttggtaaacttccaaagtaccatcaggatcctacaacagaagagttggccaaaacactagattgttggccatcaatgaattattatatcacgggttgtagatatgttctcatgccatggaaattcaatggatgtcacgcccttttcgtaatagatcatgttaaaaagcatgtgacttttatcgattttacaccgactcaagattggtgtaaacacatgccatacaagaggttcgcggaagcgattatcatggcctcaaaaaaatataagattgcttacagcaagaaacgttctggatgggcggaggatatctttaagtgggaacatacaattcagactggtgttccaattgacttaagagggtttaataccagctacctcgttctacaagctatggccatgtgggggaatgacagacgactgaaatttgttggggatgcaaagactcttcgaagaaactttgtgattgatcttttaagttatgaggacaattcgtgccgatatgccatccctgcaaacatacaacaaagacttgtcgatatcgctaaaaaggattag

SEQ ID NO: 1419 - DNA, 3237 bp, Zea mays
atccgcctgagcctcctctttctgaggaaaaaatcacctccaaactccgaccgagcatcttccccgggccggtaggccttatccggtttcttcttgcacctctccagtgagccagtcaccgccagtccacgccatggcttgtcgcgccactctcctgcctctcttcctcttcctcctcgtggcgcccgagcctgcgctcgccacatccggcaccatcgtcttcaccacgctgggccggagccgctacgcctttgacgtcttcgcgctcacgatcgccccgctctccgccgcctccgcggagctgcgcctcacggacggcgcctccgtcaactacaacggcaacttcgcgccctcctcctccggaccgccctccctcctcttcgtctccgagcgcaacggctcgctcaacctctacctcacccccgtccccacatccgcctccgcccgtcgccgcgacgcgctggaggaggaggaggaggactcggcgccgcccacgccgctgctcccgtgggaccctatcgcgctcaaggaccggccttcgctcacccccgacggcgcccacctagtgtacgtctccacggcggagcccgcgggggcgccgcgccggagctgggcggccgtgtactccacgagcctggcccccggccgcgccacgcgccgcctcaccccgcggggagtcgccgacttcagccccgccgtgtcgccgtccggggtctggaccgccgccgcgtcacccggcccgcgcggctgggccggcgaggtggaggacctccgcaccgacatctacgtcttccggacctccgacgggtcgcgccgggcgctggccgtcccggacggcgggtggccgacctgggccgacgacaccaccgtcttcttccaccgccgggacgccgacggctggtacggcgtgtaccgcgccaggctcaccttcacggacgacgacgtcgcgtccgtcgtcgaccggatcaccccgccgggtttccacgcgttcacccccgccgcgtcgcccggcgcgccggggctcgtggccgtggccaccaggcgcccgggttccgactaccgccacatcgaggtcatcgacttgtccggcggcggcggcggcgccaacaacaggagcgcctactacgaggtgacccggcccgtggccccgcgcgcgcaccacttcaacccgttcatctcgccggacggcgagcgcgtcgggtaccaccggtgccggggcagcgggaacggggactcgccgctgctgctggagagcatcaagggccccgcgccggacacgttctcgctcttcaggatcgacgggtcgttcccctccttctcgcacgacggcaagaggatcgccttcgtcgggctgccggggctgtacgtggtcaactccgacggctccggtggccgccgccgggtcttctcgggcaacgcgttcccgacgacatgggactggaagaggaaaggggtcatctacaccagcgtcggcccagacttcgcgagcgagagcaccgaggtggacgtggtcgccgtgtcgctcggcgacggcgacggcgacgaccccagcgtctccatcaagaagctcaccgtgggcggcgagaacaacgcgttcccgtccccttcgcccgacggcaagtgggtggtgttccggtccgggcggtccgggcacaagaacctctacatcatggacgcggaggacggcgaggccggcggcatccggcgcctcaccgagggtccttggtccgacaccatgtgcaactggtcccccgacggcgagtggatcgcgttcgcctcggaccggcacaacccgggcggcggcagcttcgccatctacatggtgcacccgaacggcaccggcctgcggagggtggtgcacagcgccgacggcggccgcaccaaccacccctggttcagcccggactcgaagacgctggtgttcacgtcggactacgccgccgtgtccgcggagcccatctccaacccgcaccactaccagccctacggggagatcttcaccgtaaacatcgacgggtctggcatccgccggctcacgcacaactccttcgaggacgggacgccgtcgtggacgccgtaccacctcaaggcggaggacgtgggcgagacgctgcaggcctccgggacgtgcgcgttcgaggactgccactggctcaacatcgctgcccggcctgatggcctcatgtgtggcaagcacgcctagttatagtatctgtggaagaaatgggactcacgtatatatgtgtgtgtgtatatagtgcggtgatgccatcttgtttgcttgcatatgcatactactgaacatacgatgatgaataaggtcatgccaactttagggcaaaaaataaacatacttatgatgacgctttacatttatactggctcatgtttgtatagcaagcatctagggcacagaatgggaagaagaaccagctgatctaattaacaaatgacctcctccaccatacctggaaagctctgctgagattagggcatcctcctgtgcctctagacgcaaagcactgaaaccattctacgaacaagctctgttgtaggtggagcggaagggtgagcagggcctgccccaggttctcctccaggactctcacatccagccccttggagcacctctgcagccagccgaagtccacaagcatgggcctgaaccatccacggaacagctggctcctcgtgtcgctggggcactggattctccctctccccagagccatgaacacgctcgccgatacccggctgagctcgtacctgaacatcggcgatgctcgctcgtgcattctgatgagctcctcctgcgtaccccacagctcaacgtattcttctgccatgtcgttgttcagaaggatgtccaagagccagttgagattctcagtttgctgactgatcctttcaaccataggccttctgcctgaaggtgccatagcttggccgccatctgagtcctccatgaaaagttccacaagtgagctcaagcaggaacggcagattcggtaaaggccccccttgttcaccccggacaggtccttatggtagactgagcttctgcttaggagaccgctcaccaaagactgcatttctttcctcgcgccgttgttggctccgctcgtgatagattccacgagctgcaccgccaggtcctccgagccgctcgcgcactgctgctgcaatcttgccagcacatctttactaactgattcgccgaaagtgcatctggcaaaa

SEQ ID NO: 1420 - DNA, 2991 bp, Zea mays
aaaacgaataaatcgaaacttcagtgttcagtcaattactgaagcacccacatgtagagaagtattactgtataaccgaactctgtgacaacatattgagggtaaatcagcattcctgcttcaagtaatcataattaaggacgtgaatttccgttatgatcaacatatactagtactctagcaccgtaagggcttgttcgtttaatccatgtggattgggtgcgattgagtttcaatcccaagtaatttaaaatctttcatattttttacaatctcatccaatccatatgaaaaaattgagataggaataaccgaacaaagtctaacttgacatgtactgtatataccaccaaaatccactacaacacaagcacggcataaatggggagatcattaattaaatcgccaggaaacagcatacataattaagaaaccccaacttcacagcgtgccaggttatccagtagtaaaaacataccacaaaccgaaacggatgtaccagttccacaagagagcgggactgcgggagtaacccagggatccgacggccacgtcgacgacggactaccaaatgcgagccaggaactcaccgggagagggagaaaggaaatctcaccgtctcatatcacgccgcggacgcagattaggggaaccgacgtgggacgcggggtggggaggggagagccgggtccctcttccgattccttgataccaccgatccaacgggttccagcttgcccgcccgtccgcccgccacgctttgactgccgctactcctactcctccactccttggttggctgcagtttcgcagcagccgaaagggaaattcccctgttggatttcagtttcttagattttcttcgtcctattttgatggtgaatttctttttcctttccctgttcgtaaaattcctcgcgcagccgtgtcactggctgggccggtctcacattgctgctgcgtttgttgggccgggctttcagcatcggaactcgtaaggaaacgggcccacccccacttattcatagtttgccacacctaaatttagaaaagtttcacgtttaatcgagttattagaagtaagtttgatttgtagctacagttgtcaaaataggacaagccccagcagtttgccactcccacgcgaaacagaagccccagcagggcggcactcccgacgcgacgcccctgcttgccggccgggaggctcactcgactctgcctccacttcctcgtctgtccgttggagcacggcgccgatggcggcggcgccagcgctcgcgcgggagctgctggacgcggcgcgggagccggagttcgcggagtggcagcgcggcgtgcggcgccggatccaccagcacccggagctggccttccaggagcaccgcaccagcgcgctcgtgcgcgccgagctcgacgcgatcggcgtcccgtacgcctggcccgtcgcgcagacgggcgtcgtggccaccatcaccggccccgccgcgggccccgtgttcgcgctccgcgccgacatggacgcgctccccatccaggaaatggtagaatgggagttcaagagcaaggaagacgggaagatgcatgcgtgcggccatgacgcccacgtggcgatgcttcttggagcagctaggttgcttcagtctcggagggacgatttaaagggtacagtgaagctcgtcttccagccagccgaggagggacacgccggcgcataccacgtcctcaaggaaggcgtcctggacaacgtgcaggccatcttcggcgtgcacgtggacacggcgttgccggtggggctcgtcgggtccaggccagggccgttcctcgccggatcggcgcggttcacggcgaccatcacggggaaaggcgggcacgcagcggggccgcagcacgtcgtcgacccgatcgtcgcggcgtcctccgccgtgctcagcctccagcagctcgtcgcccgcgagaccgacccgctacagggcgcagttgtgtcggtgaccttcatcaaaggaggaggcggagctttcaatgtcatcccagaatccgtcaccatgggcggcaccttgaggagcatgacgaacgatggcatgtcctatctcgtgaaaagaatcagagaggtgatacaaggacaagccgccgtgagccgctgcgccgctacggtggacttgatggaggagaagatgaggccgtacccggccaccgtgaacgacgaggccatgtactcccacgccaaggcggtggcggagagcatgctgggcgaggccagcgtgatgctgtgcccccagttcatggcggcggaggacttcggcttctacgcgcagcggatcccggcggccttcttcagcgtcggcgtccgcgacgaggcgacggggaaggtccaccacgtgcactcaccgcacctggacatcgacgaggccgcgctccccgtcggagccgcgttgcacgccgccgtggccatggagtacctgaacaaacacgcaccatgcaaataaacacaaggctctggccatcccgataatacatgtcattcttattgaagtgactgcatgccgcaaaatcttccctccttggagcggtaagaatttgctaccccgcatccgtgctctgtacgtcgaaaataaatgtgtccagacatccctgaaagattggtttggttgtactgcgcctgttccaccaattgtatgtaaacgcatgtgcctgaaattcatgtaatgattaatttagattgcaaacggtaatagtaaatatgaacaacatttgaaattaaattacagccccgagaaaaatattcaagggggccaattcaaatatgaacaacgatattctgaattcaagggggccaattcaactaaaaaacacacactcggactatattttgtatttttctctttattttcaatagtatattcaagcaactcaatgctcgtccctcttttctttgaaaagtctaataaatatgttcacattaaacattgaatgactcacataatttctatc

SEQ ID NO: 1421 - DNA, 1404 bp, Zea mays
cccacgccataggccgcctcctgaaacgcctgtcccgccgccttgtcgcttctctccgctctgcttctccgccgccggccgtcgcctctctagcgccgctcgcccactccggctccgttacgcgcggggcgcaaccgcgcctgcggcctgcccagctgcccccctctccaaggtccagccgactgccgtgacgccgtccggccggcgtcgagcgcgtctccgcgccccccaccacccctctccgcgcaatcgcgcctccgcggcccccgtcctctgcctccgacgactgaacgtggtgagtggtgacgcgactggcggagtggtgattgacgcgcttgccggcgagttgcgaactggagttcagccctgcctgctattttagtctggatctgccactggtcaaggttcaagtatggcttctgtagggttggctcgggtgagtggtgtggctcgccctctcatgaggcttgtcaccatgagccgcatgccgatcctgcagcagctgcacctggaggagcagctcctgcgacgcacatcagacaactggtgtattatcaacgatggcacggcccctgctaccatcgttatgggcgtgtctgggagagtctcggagcttgtcaatatacagctggtcctccgggacaaggtgccgattgtgaggaggttcagtggaggtggcaccgtcattgttgatcagggaacggtgtttgtgactttcatttgcaacaagaatgttgttgctgggctgcagccctttccacgggacatcatgtcatggagtggtcagttatatggcaaagtttttgacagatttggtgaatttcatctacgtgagaatgactatgcatttagtcatcgaaagtttggtggaaatgctcagtcaataacaaaaaatcgttgggttcatcacacatcgtttttgtgggattatgatgtaaaaaatatggattatctcaaaatcccaaagcgtgcacctgaatatcgactggcaagaaaccacacagatttcttgtgccgcatgaaggagtacataccttcgcgatcagttttcaccgatggggtcattgctgccctgggagaacacttctcagttcagcccatggatctacaagcaattctttccggtgatgaagaatttgtgccttctacaaagctgctgtcacaacaatacctagaagaaattgtttcctccaaagaatcccttgaaattatagaaagctgaagcatgacctgatgaccatggttgtcgtttttgttgtgaaatgtgagcaattttattgtgaaatccgagcaattatcggcgagctgtgaattcattcaactttgagtccgacattatttcactgaaccacttacattgttttttaagacccagtacatttttgtggttactggttacatgcc

SEQ ID NO: 1422 - DNA, 3993 bp, Zea mays
ctcacccacaccgcgaagcccaaccgaatcggaatccaacccaaccctcctcaaagcctcgcctcccaactctagagaatccaaatttgacaaggacaggactcgactctaccgcgccgccatggcgctgctggtgcgcgcgcggctgtccccgctggacgacgacgacgacgcgtccacggcgtcctcgctctcctcggcggcctcctccccgccgctctcgcccgcggccgcctccacgccgctaccgctgtacgcgcgcgccgcggtgctcgtcgccccgcggatcgccgcgcagctctcgtccacggaggaggacgtcagcgagtccttcgatgacaccaccagctccggcgaggacgtcgacctgccggaggaggtgtccaacggcttcttcttcagcgtcgccagggtgccgccgacgccgacgtccgaggacccgatcctggtccccggcggcggggtggcggggatcgccgctgcggaggcgcccgaggccgagggcggggacggcttgggcgccgcggaggagccgctggaggggggcatcttcgtgagcgccaagaatgggttggatggcgtcgagggttcgctgggtggcagcttcctcaaatctgggagctgcattggcgcgcacaacggcggggaggctgctgcgtcaggtgattcggtgatcgtttcagatggcaccgtgctgaatgaggaggatgataagcagggggagcaggctgtcaatgacgcggcgtctgggcctttactgatgcctgttgctggggtagatggcctcgtcattgtggatgctttggaggggatgcttgatcgtgaggctgctgaatcgcttcctattcccagtgctactgctactggtacagaaggagaggaggctgctgccgagcttcgcagcgatgcagtaggtagtgcagccaagcttgatgctagtcctgaatatgctgccacaggagatgtcatatctgatgccatgcaagttcttgatagtgtagatgatgaagctgatggtgatcatgaaggttccgacgatcttacatccatgccaatctcttcaagtgactatgctgtggaacttgcaaaagaactggagaacaacgtgcctacttccataggcgcacgctttgttgcggatgattcagatgatgcagagatcaacggtgatgatgaatatgaagaagagatgaatggaaaggagaacgagctttttgatcatacagctttaattgagcttctaagagctgcaagcagctcgcctgaacaaggcaaggccaaggttttcccagttgaatcttctgaacctagggatctgcctcccactttagccagcaatgctaggatgaacgtggcttctgctcctgtgccacaagcaatcgctgaccctgagaaacagatgaccgatgaggaaaagaagatttacggaaaggtggacatggcacgaatcaaatacatgcgtcttgttcatagattggggtatgatactaaccatcaggtaccagtacaagtgttgtttcggcttagtcttgttgaaagtttcaggtgcgtaaggatgacaaaccattcctcagagatcgagaatgcctggaagagggctttgcagcgtgaggcagagggaactgagaaccttgaattctcctgcaatgttttggtccttgggaagactggagttgggaaaagtgcaacaataaattccatcttcggggaagataaatccaaaacaaatgcttttctaccggcaacatcatctgtgaaggagattaatggagttgttaatggtgttaagtttcatgtcgtcgacacccctgggcttgggacttcagccgaggatgaaaaatcaaataggaaaatgctcaatgctgtgaagaagtatatgaagagatgccctccagatattattctgtatgttgataggcttgatacaccgcgggaggaggcaaatagcctatccctcttgcgatgcattaccagtgtgctaggcctgtcaatatggcccagaacaattattactctcactcactcaggagcagcttcccctgaaggccctaatggtttggaagtgaactatgatatggttgtgtctcgtcgaactcatgccattcagcaaagcatccggcagataactaatgatcctcaaattcagaatcctgtggctcttgtggagaaccatcatctgtgtcggaggaacgcagaaggtgaaaagatgcttcctgatggccttatctggaggcggctcctcctcctcctatgcttctcactaaagatgattgctgagattgacagtctctcaacccgccgtgcttcttctgcaagtttcttaggccgccttctccaagtgcctccaattccttacttcttatcatctttgttgaaatctagagagcaccctaagcgttccaatgaccataatgttgtgagtgtggactcagatttttacctagatgaattgttgaatggggaccaagaggatgaagatgactatgatcaacttcctcccttcaagccactaagtaaatcccaggttgcaaaactctccaaggagcaacagattttgtattttgatgaatctgattaccgaactaagctgcttcagaagaagcagctgaaggaacagctcaaaggatttaaggaaatgaagaagaaagagggtgatgataatgatatactttctgatgatgatcatcccgatgatggatatgatacagatagatatcctatgccagaatggaccttgccatcttcatttgattctgatgatcctgtgtaccgctatcgttgccctgtgtctacaccaaaccttctggtgcgtgctgtttacaatcctgatggatgggatcatgattttggatttgatggtgtgagtgtccaacacagccatgatgttgctaacaaatatccagcatctctgtgggttcaagttaacaaggacaagagagagtttaccatccatttggattcctcaatgtcagttaagcatggagattatgcctcgagcctggcaggctttgacatccaaacaattatgaaccagctttcttacaccctcagaggggagaccaaatttaaaaacttcaagaaaaacatcactactggtggtttatccatgacctttttgggaaattccatggtggctggagcaaagcttgaagacaagcttttagttggtaacaggttaacactatcaggcaacactggtgctgtgtccatgagaggtgatgctgcatatggagtgattatggaagcaactcttcgtgaaaaaagctatcctgtaggtcaaggcgttgccactttgggtgcatccttagtgaaatggcataaagagtggaccatggccgcaaatttggattcccatgtctctgttggaaggtcttcaaacatgtcagttcatgttgatgtaaacaacaaactaactggacgggtcagcatcaaggccaacacttcagaacagttgaacattgcccttttaggtacatgttcagtgataatgtatgtgtggaacaagatgcaccctagtgcagatcctaatgctgagtagcactgaactccccagatccaagcagtcacaggttggcaagcacatcatttgtgtcccagcttatgattcaagaacgaggtagctgaaaactgcacactctggcaacttgccaggattggaagttgaaccatcgctttctgtcaagaatcgagataagtgtagctgtgctggcgtttttacccccatccagtgcgcagttggtggccaacttcatgaatcatgagtgactcaactttttttttttgtcaaaagttgtaattagggtgtgagggtaaaatatcactttaagaccataaataagctgaaattagctagtattgggtagcttattttagcttatttgtaattctaaagtgatatttcatctttctaacatttcaccataatccagcttatataatctaggagggaaacaaacagggtctcagtaacacggctcaatggttcatgaagcc

SEQ ID NO: 1423 - DNA, 486 bp, Zea mays
catctcgcatgggtcaggctaagctcatacaagcaaccaaacgtagagatattacatgctctcaaccaggttaagagtcaggttctttagatactagccaggcccacctatccagacaaccaaacatgccagtagtgcatgtgttaaaccagggctgcgtgatcattgtgtgtggattgattggaagctggtgggactgggctgttcgttactatatattcggtttggcagatccgttcacgcaagcatgtctctccgtgtgcctgcaaaacgatgggcctgcgcatgtcgtctgcaccggcagatgtttcgatgtggagagagagagagtgagagagagagctgtgctgcacgcctgcactgcactgcactgcagccaaagttcattcgttgttgctgatgctgccgcgcgcgggcgtccgatcctttcctccctctcgtctctatgtctgagcgagtgctgctggatagaggaggataggggag

SEQ ID NO: 1424 - DNA, 3549 bp, Zea mays
ctataacccacgctgtccgcctgcctcggacggatacccactccactcaccacaccatccatggcgatggcgccctccacggcggccgcatccacccttctccccgtcctcctcctcatcgccaccgccacccagtgcaccgcagccgattcattctcttctcaggacgctgccgccctcctcaacctctctgcggcggtagcagacccctcgggctacctctccacgcactggactccggacaccgcggtctgctcgtggccgcgcgtgtcctgcgacgccaccgacacacgagtcatctccctcgacctctccggcctcaatctatctggccccatccccgccgccgcgctctcctctttcccgtacctccagtcgctcaacctctccaacaacatactcaactccaccgccttccccgacgagatcatcgcgtcgctcaagagccttcgcgttctcgacctctacaacaacaacctcaccggttcgctgccggcagcgctccccaacctcaccgacctcgtccacgtccacctcggcggcaatttcttctccggcagcatcccgaggtcctacggccagtggagccgcatccggtacctggccctctccgggaacgagctcaccggcgagataccggaggagctcggcaacctgacgacattgagggagctgtacctcggctactacaacaacttcaccggcggtataccacccgagctcgggaggctgcgggcgctcgtccggctcgacatggctaactgcggcatctccgaggagatcccgccggaactggcgaacttgacgtcgctcgacactctgtttcttcagatcaacgctctgtctgggaggctcccgacggagataggcgcaatggggtcgctcaaatcgctcgacctgtcgaacaacttgttcgtcggggagatccccgcgagcttcgcgtcgctcaagaacctgaccctgctgaacctcttccggaatcgcctcgccggtgagattcccgagttcatcggcgacttgccgaacctcgaggttctgcagctgtgggagaacaacttcacaggcgggatacccacgaacctcggcgtggcggcgaccaggctgaggatcgttgacgtgagcacgaacaagctcaccggcgttctgccatccgagctgtgcgccggccagcggctggagacgttcatcgctctgggaaattcgctattcggcgacgttccggacgggctcgcggggtgcccgtcgctgacgaggattcggctgggagagaattttctcaacgggacgatacctgcaaagctgttcacgttgccgaacctgacgcaggtagagctgcacaacaatttgctctccggcgagctccggctggacggagggaaggtgtcttcttcgatcggagagctgagtctgttcaacaaccgactgaccggccaggtgcctaccgggatcggtggactcctgggattacagaagctgttgctcgccgggaacatgttgtccggcgagctcccgccggaggtcgggaagcttcagcagctctcgaaggcggacctttctgggaacctgctctccggagcggtacccccggcgatcggcagatgccgtctgctcaccttcctcgatatctcgagcaacaagctctccggcagcatcccgccggagctcggcagcctccgcatcctcaactacctcaacgtttcccacaacgcgctccaaggggagattccgcctgccatcgccggaatgcagagcctgacagccgtggacttctcgtacaacaacctctcgggcgaggtcccgtccaccggtcagtttggctacttcaacgccacttccttcgcaggcaacgctggcctctgcggggcgttcctctccccgtgccgctccgtgggcgtggcgacttcggccctgggctccctctcttcgacgtccaaactcctgctcgtgctcggcctcctcgcgctgtccgtcgtcttcgcgggcgcggccgtgctgaaggcgcggtcgctgaagcggtccgccgaggcgcgcgcgtggcggctgacggcgttccagcggctggacttcgccgtggacgacgtgctggactgcctcaaggaggagaacgtgatcggcaagggcgggtccgggatcgtgtacaagggcgcgatgccgggcggcgccgtggtggccgtgaagcggctgccggccatcgggcgcgcgggcgcggcgcacgacgactacgggttctcggcggagatacagacgctggggcgcatcaggcaccgccacatcgtgcggctgctcggcttcgcggccaaccgggagaccaacctgctggtgtacgagtacatgccgaacggcagcctcggcgaggtgctccacggcaagaagggcggccacctgcagtgggcgacgcggttcaagatcgccgtggaggcggccaagggcctctgctacctgcaccacgactgctcgccgccgatcctgcaccgcgacgtcaagtccaacaacatcctcctcgacgccgacttcgaggcccacgtcgcggacttcggcctcgccaagttcctccggggcaacgctggcggttcggagtgcatgtccgctatcgccggctcgtacggctacattgctcctgagtacgcctacacgctgaaggtggacgagaagagcgacgtgtacagcttcggcgtggtgctgctggagctcatcgccgggcgcaagcccgtcggggagttcggcgacggcgtggacatcgtgcactgggtgcggacggtgaccgggtcgagcaaggagggcgtgatgaagatcgccgacccacggctctcgacggtgcctctgtacgagctaacccacgtcttctacgtcgccatgctgtgcgtggcggagcagagcgtggagcggcccacgatgcgcgaggtcgtgcagatactggccgacatgcccggctcgacatccacgacgtccatagacgtgccccttgtcatcgagccgaaggaggaggacgggggcccggagaagaagcagcagcagcagcaggaagggccacacgactcgccgccgcagcaggatcttcttagtatctagaagcgcagttgcgagagttggtcgtactgatggtacttggtagcatccctgcctgccctgttctttgagtgaagcgttggaacgtggcgtgtgtgtagtgtaactgtgtatgcaggcggtgatttatatgcatgcttcctttaagtagattgccagtagtatttgcgtatggtgagctggtcggtccttaatgtctgtccccatgtacaaaaccagatcaagatgcttgggcttccggttgagtttacgccttaggtgctgtttgtttaccctcgacattatataatccagcttaaataaatcaagagttaaacaaacaacacagattatatattaggtggattatatagtctagatgtctagattatgataatttataagcatgtcattagatgcagatatggattagaattgctagtttgtttgtttgtttgttttcgagaaaaaagaagaatcgttcctttgaaaaaaaaaaactac

SEQ ID NO: 1425 - DNA, 3148 bp, Zea mays
atgaagctgagtgctgctgttctcttcttctccatcttgttgcagtactgcaccagcagcggccagccagatagccgaggtttcataagcatcgactgcggcatcccggagaactccacgtaccaggacctcacctccaccatactctacgtctccgaccgcggcttcgtcacctccggcgagaaccgcaacatctccgccggctacatcagcccgtccctcgcgcagcgctactacaccgtccgcgccttcgcgtccggcgttcggaactgctacaccctcccctccctggtcgccgggaacaagtacctcgtccgcgccgccttctactacgcggactacgacggcctgagcacgccgcccgtcttcgacctgtacctgggcgcgagcctctggcacgaggtcaggttcagggacgcggccgcgatcaactggatggacgtcgtggccgtggctcccaccgacttcctgcaggtctgcctggtgaacaagggcaccggcaccccgttcatctccggcctggacctcaggccgctgcggagcactctttacccggaggcgaacgctagccagtcccttgtcatggtcaacgccaaccggtgcaacgtgggacccacggacaagtctgtggttcgcccaaccaaagcacatttctctggcccaacaagcaggtacccgctggacccccacgaccggatctggctggcgtacggcgccgtcccggcctggaccgaggcgtccgccacgtccgtcgtccggaactacctcgccgacccctacgacgcgccgtccgccgtcatgcagagcgccgcgacgccatccgacggctcggtgctcagtttctcgtgggacacgtccgacgaccgctccgtggacgccagcagcgccacgtacctcctcgtcctctacttcgccgagctgcagcgcgtgtcggcgagcggcgagctgcggcggcagttcgacatcgccgtcgacggcaccgcgtggaacagggaaccttactctccgccgtacctcttcgccgactccttctccggcacggtgcaggggcaggcgaggcatagcgtctcgcttactgcgacgaggaacgcgacgctcccgcctcttctcaacgccatggaggtgtacttggtgaggccggtggatgaagctgcaaccgaccctggagatgctaaagccatgatcgcaatccaagaagcttatgttgtgagcaaaaactggatgggtgatccatgtgctccaaaggcttttgcatgggaaggactggactgtactactgatcctccaactggtactccaagaataacagcattaaacttgtcttcaagtgggttgacaggtcccatcactacctattttggagatctgaaagcactccaatacctggacttgtcacacaataacttgtctggctccattccagattgtcttggacagcttccattcctagtgttcctggatctctccagcaatgacctccgtggaccagttccttacactcttcttcaaaaatcccacaatgggactctatcgctaaggcttagtaacaacccaaatttgtctgggaacggatcgggtccaaagaagttgaatggggccgcacttctctccgcgataatcatcccaacagttgccgccactgccttgtctgttaccttcattgctctgctgctccgagcactcaaggaacaagctagaagacgggctgttgatccaactccgagagatgagacggcgttgcttgagaaccgagaattctcttacagagaactgaagcacatcacgaagaactttagcctggagattggcagaggtgggtttggagctgtcttccttgggtacctggggaacggaaacccggtagctgtgaaaatccggtcggagtcgtcttcgcaagggggtaaagagtttctggctgaggctcaacatctgacgagggtacaccacaagaacctggtatccttgattggctactgtaaggacaaagaccatttcgcccttgtctacgagtacatgcctgaagggaacctgcaggatcatctgagactgagagacacttgcactcacagaccactcacttggcagcaacgccttcagatcgcccttgatgccgctcaaggtctggagtacctgcatgtggcatgcaaaccagcgctgatccacagagacgtgaagagcaggaacatcctcctgaccacgggccttggggctaagatcgccgactttggtctgaccaaggctttcagcgactcggagacacacatcaccactgaaccagctggaacaatgggctacttggatccagagtattaccgcagctaccgggccagcgagaagagcgacgtgtacagcttcggcgtcgtgctcctggagctggtgacaggccagtccccggtcgtcccggtggacgacagcgtgagcgtccacgtcggcgagtgggtgcagcagagcctcgaccggggcggcggcgtcgagagcgtcgtggatccgagcatgggacggtgcgagcgcggcgactacgacgtcaactccgtctggaaagtcgccgacctcgcgctgcgctgccggcgggaggcctccagggagcggcctacgatgacggacgtggtcgcgcagatcagggagagcgtggagctcgaggcggcccgccggagctcggcgtcgggtgctgctgctgctggtggtggtgggggtctgaggagttgtgccggcgagagggacgcgtttgaggtggtggaaggaagcgttggggagacggcgggggccgcgcctggtccggcgatgatctgagctgaagactctgaactaattaaggtacgagggtggtggtggacatgtgtttcaccgtgagaaacctgctcagcaagggaagatcggaacagtgggccttctttttcttctttttttactggtaatgcattattgttggagacatcgtcgacaggattttgctgatgaagcaaccaggcagctatcttgtctgccggtcacatatataatgtgaggaggttagctagtagtggtaggggaacaattcccttggccagggcgattgaataatacaagtctgaatatgaaatccagaaactaataattagtttgttagcttcgatttaataacgggtgtgaataaatagtaattcctccg

SEQ ID NO: 1426 - DNA, 2658 bp, Zea mays
aaagagcagtaggactcttgcagtaggttggtcgttggtccgaatggccccggctttaatcccgaattctgcgccatggaacgcatgcaaacaaacaaagacaccagtcgcggcggcaagcgcacttgtccaaccgcgcctcggccaaaaccaaacccatcgccgaccgccttctcctcgctacgccgcggcggcggcagcctgccggtctttgacttaaggagagatgaggcgcgtcgctcagcggccagcgaagtgagtttccctttcctaggggagagagagagagagatcgatggtgcggggctcggcggcggcggcggcactgctgctcctgccgtggctgctgcatgctgcagccgcgggcaacgggagctgcgcgcggagctgcgggggcttgacggtgcagtacccgttcggcttctcccccggctgcgagatacggctcgggtgcgacccggcggacggcaccgcgtggctcgggaagacgcgcgagctgggcctgctcgtgtccaacgtcacggcgcgcgcgctcttcctcaccctgcgcccgaactgctcgcgccggctcaacgcctccgtcgaggcgctcttcaccaaggcgtacgcgcccggcagccagaacgggctcgtcgtgagctcgtgcagctccgcctcccaggccgaccacatccgtaactgcagcgtcccccctagcgcttacctcgacaactcgtcccagtgcggccgcgccgctgcggactccatccgctgccccgtgctgacacggccgaccagcgtccccgaccgtttcctcaacagaaccaggatgcaagcgctcgccgcggaatgcaccgggctggtgtcggcggtgagctacttggacgcgccggcgccggcgctgctgctagccacgatggagctggagtggtggatgctggggccgtgccgatgctcgagccacgctaactgcacccaggtcaccacgccggtcgcagggcaggaggcgttccggtgcgactgccccaagggctcggagggcgacggcttcgccgagggcgtcggttgccgggaaggtccaaaatgcaatccttcaaaatacctacaaggagattgtggcaagacgatccaaatcgtccttctcgtggcagggatcatgtttggcgccatggtgacgggcgtgacctgcctggcgtaccaactgctgaagcgccggtccgcgtccatccgtatgaagcgcagcacgaagcagttcctatccgaggcctcctgcacggtgcccctgtactcgtaccgcgagatcgaacgcgccaccggcggtttctccgaggaaaagcggctgggcacgggcgcctacggcaccgtgtacgaggggcggctgagcgacgaccgtctcgtggccgtgaagcggatcagaccgagcgacaatggcggcggggtggacagcgtcgtgaacgaggtgaagctcttgtcgtgcgtgtgccaccgcaacctggtccgcctcctcggctgctgcatcgagcaggggcagcagatcctggtgtacgagttcatgcccaacggcacgctggcgcagcacctgcagcgggagcggggccccgccgcgatgccgtggacggtccgcctccgcatcgccgccgagacggccaaggccgtcgcgtacctgcactcggaggtgcacccgcccatctaccaccgcgacatcaagtccagcaacatcctgctcgacttcgagtacaactccaaggtcgccgacttcgggctgtcgcggatgggcaaggcgtcgtcgccatcgtctgtgggcgacccctcgcacatctcgacggcgccgcagggcacgccgggctacgtcgacccgcagtaccaccagaacttccacctatccgacaggagcgacgtctacagcttcggcgtcgtgctcgtggagatcatcaccgccatgaaggccgtcgacttcaccagggtgcccagcgaggtcaacctggcgcagctcgccgtggacaggatcggcaggggccgcgtcgacgacatcgtcgatccctacctggatcctcacagggacgcctggacgctctcgtccatccataaggtggccgagctggcgttccggtgcctggcgttccacagcgagatgaggccgtccatgaccgaggtcgccgacgagctggagcagatacagcgcagcgggtgggcgccatcggctgacgacgccgcgttcttgtcgacgtcatcgtcgatctcctcgtccgtagcgtcgacgcgcgtcaccgacaggtcgtggggtgccgacagaagccggacggagaggggcagggtgaatgcattggtcgtgcaagagacggcggcgaagagtgcagtggagtctcctgtgtccgtgcaggagaggtggttcagcgatgggagctccccttcctccaacagcttgctgggcagtcgctccctgcattgaactgaaacatacaaattgctcgtccatgtatcagctggtcagattagagcccttagatatatatgcatttagaacgatgcatttgttgatctgttcttgcgcgtcgttcgttccctcttccctcccattagtctggaactatgtgtacatcatgtacagtatatgtaatttagccttggctaagagcaacttcaatagaagccctaagtacagaaacaaattaaaatata

SEQ ID NO: 1427 - DNA, 2115 bp, Zea mays
cttcagaggggcggccgacggtggcggtggaggtggatccgtcgtggcggttcccgagccggcgcctgcgggacgcgtacgtcgcgctgcagacgtggaagcggcaggccatcttctccgaccccaacaacctcaccgccgactgggtaggcccgggggtctgcaactacacgggcgtctactgcgcgcagctcccctccggcggcacccaccaccgcggcgcgctcgccgtcgccggggtcgacctcaaccacggcgacatcgcgggcttcctcccgccggagctcggcctcctcgccgacctcgccctgctccacctcaactccaaccgcttctgcggcgtcctcccccgcgcgctccgccgcctccgcctcctccacgagctcgacctcagcaacaaccgcttcgtcggcaagttcccggacgtcgtcctggacctcccggcgctgcgcttcctggacctccgcttcaacgacttcgagggcgccgtcccgccgcgcctcttcgaccgcccgctcgacgccatcttcctcaaccacaaccgcctccgcttccagctcccggacaacctcggcaactcgccggcctccgtcctcgtcctcgcgcacaacgccttcggcggctgcctccccgccagcgtcgccaacatgtccggcacgctcaacgagatcctgctcatcaacaacggcctctcctcctgcttcccgccggagatcggcctgctgcgggagctcaccgtgctcgacgtcagcttcaaccagctcgccggcccgctgccgccggagctcgccctcatgaggaagctggagcagctggacgtcgcccacaacctgctcaccggcgcgataccgccggggatatgcgacctgccgcgcctcaacaacttcacattcgcctacaacttcttcacgggcgagccaccggcgtgcgcgcgcgtcgtgccacgggacagcgaccgcagcaactgcctgcccaaccgccccgcccagcggacgccgcagcagtgcgccgccttctacgcccgcccacctgtcaactgcgccgcgttccactgcaaaccgttcgtccagcccatgccgccgccgcgactcccatcaccgcccccgccgatgctcccatcaccgcccccgccgcggctcccatcaccgcccccgccgatgcttccatcaccgcccccgccttcgccacctccaccatcgccgccgccgccatctccacctccaccacttatgtctcctccactgccaccaccaccgctgccaccaccacacgccacctcaaccgctgccgtcaccaccaccaccatcaccactaccgcattccccacctccaccatccccaccccccccagcgccagtctaccacccgccaccaccaccacagtgcccaccatgccccgtcctgccgccaccgctaccctgcacaccaacgcatccatggccacctccgccaccatattaccccggcccattcccacccacagaccctgtccgatacgcatcacctcctcccccacagcaacaccatccatggccaccagtatacccagttcaatacggatcgccgccgccccctccgctgcattgacagagaatctcagacgcacgaacggaaggatagttggttctgctcttgcccctccggccatggctaccacttgccagattcaccagtgtacgtggtcattgtcatgcttagcaaataccgttggttgatggctacatgcctcgagagcgcgtggtaatctccacagaattttgtgaaatcatggtctgtcggtgtcggtcgttggtgctgaaagggattgaattgaatgtgacggggtggtctgctgggtctcttcggagcgttttaggcttgggattggtggttaaaattggctgtgaataaagaagagtttgagagggacagcagaggaggattgtattgtaggtgcagggatatatcatatatctgggtgtatagagaagtttcagctcagttgagttcagtcagacataaaaagtttagaaacaacaaaaattccattgccatttgttccttttgtatcacagctacccatcgattatttgctcttatattattcactccttttctttaaaaaaaaaaaaaaaa

SEQ ID NO: 1428 - DNA, 1699 bp, Zea mays
aattaagcgaggcgatgagctcgtcctctctcttgcacgagccgtcctcccacgccccacgcatatatacctcggcctctcgagtctccggcctcacaacacacaacaagcaaagcgaagcgcgcgcacagagatctagctgagctactagctatagcagcagctgctgcaggtctcctgacatggcgaagcaggacatcgaagcatcggggcccgaggccggcgagttctcggccaaggactacacggaccctccgccggcgccgctcatcgacgcggatgagctcaccaagtggtccctctaccgcgcggtcatcgccgagttcatcgccacgctgctcttcctctacatcaccgtggccaccgtcatcgggtacaagcaccagacggacgcggcggcgtcgggccccgacgcggcgtgcggcggcgtgggcatcctcggcatcgcgtgggccttcggcggcatgatcttcatcctcgtctactgcaccgccggcatctcaggtgggcacatcaacccggccgtgaccttcggcctgttcctggcgaggaaggtgtccctcgtccgcgccctgctctacatcatcgcgcagtgcctgggcgccatctgcggcgtcggcctcgtcaagggcttccagagcgcctactacgtgcgctacggcggcggcgccaacgagctcagcgacggctactccaagggcaccggcctcgccgccgagatcatcggcaccttcgtgctcgtctacaccgtcttctccgccaccgaccccaagcgcagtgcccgtgactcccacgtcccggtgttggccatgcatgtaattgatgagcgagctaatctatgtctgcaggtgttggcccctcttccgattgggttcgccgtgttcatggtgcacctggccaccatccccatcaccggcaccggcatcaacccggcgaggagcttgggagccgcggtcatctacaacaaggacaaggcctgggacgaccaatggatcttctgggtgggcccactgatcggcgccgccatcgccgccgcctaccaccagtacgtgctgagagccagcgccaccaagctcgggtcctaccggagcaacgcctaataagtccggcggcgggagctgtgggcgccaccgatcgatccaagtgtagatacgtacgctcccccgactccgtccagtatatgacgccctgtggtcgtccacatctgccaccacagtcccgtccgcttggtgctgttttctttctttccttgacggggaaaaaaagtgtgatatatctttgctttctgtatatgtgacaaaatgcattctgtaagccagtcatgtgagtttttatttaaccacagtctacttttagaacgatttaaacggccctgaatcttacttgcaactttagaggaaagtacgggaaaagaacctcacaagtcaccaagggacttgacagttggttggtatgtgttaggcctgcggcccaaataagcaagcccatcggcgggctccgtttctcctctgttgtactgccctagtgcctgaaggccgaaccccctgaaccttgcgctgccaatgaggtaacgctccacaatttttctccctctgttttgtatcacgcgatttagattgagagttcgaaatggttgtgttttctgcttattcagcagcaatttcgatttcttttatctgattgttaggatttatgggtt

SEQ ID NO: 1429 - DNA, 2278 bp, Zea mays
caaacaagccatcctggaaactgacttgaattcagcccaattctgtagatccaaacagggccggcgtcagtgcctcaggtgagagagcagcagacgatgcaaagagccaaaactgcaagcagacgcagccgaagccgaagccgaagcccaagcccaaaactgttttgtctttgcccagaaccgcgacgagcctaaactgcgcttcctcctatctacaagtccctggcacatcacgcatagtccaaccatggcgcgcaggcgataaggcgcgccacggggacgcgacatgtggtggcggacgcgatcaggatagggccaggctggccgggcgcggccacgggagaacggtggccactcgtcccacatccgcttcgtcctgtcctgtactgcgtcctgcccccaacgagagccggagccggccatcccgtcgcacactctccccctctatatatgccgtcggtgtgggggagcctactacaggacgacccaagcaagcaagcaagcagcgagtacatacatactaggcagccaggcagccatggcgcccaccgtgatgatggcctcgtcggccaccgccgtcgctccgttccaggggctcaagtccaccgccagcctccccgtcgcccgccgctcctccagaagcctcggcaacgtcagcaacggcggaaggatccggtgcatgcaggtgtggccggcctacggcaacaagaagttcgagacgctgtcgtacctgccgccgctgtcgacggacgacctgctgaagcaggtggactacctgctgcgcaacggctggataccctgcctcgagttcagcaaggtcggcttcgtgtaccgcgagaactccacctccccgtgctactacgacggccgctactggaccatgtggaagctgcccatgttcggctgcaacgacgccacccaggtgtacaaggagctgcaggaggccatcaaatcctacccggacgccttccaccgcgtcatcggcttcgacaacatcaagcagacgcagtgcgtcagcttcatcgcctacaagcccccgggcagcgactagaccgcgcccgccggccgccccccgccggctagctagctagctagctcctgcgtgagctagtagctagtgccatgcgtcgtctctgtcgttcggttttgcttcgggtcaccgtgtaccctttgcttgcttggtttcttctttccttttttcctttttttttcttcttttccccggccatggttcctttgctttccagcagttctctgctggatgtgatgtatccattgttgcaatcatggccttgcattggctacctctatacctgctacaaaactactgcaacgcctatatatacttggggtgaggaacatgtgaatgcaagctccggctatcatatacatgtaatatggatacaaactatatatataaatccgccgaggcgccgacaatactatacgacaccgtgttaagttaatatataactggtgctttttatttatatatctgtctcatcatatatatgctaattaatggatgtgtgtcctcttcacttcaattccttctttcctttcctatgtcttttttgagatcttaagtgaacgaattcgagatgtaccaacaagcgtgatgctattattaaactgcatatatatgtatatacctatcttgtggaatggaaaacgaaataagccaacagatgcagttttatgtttacatcacacataaagtagtgctagaacactagcaaaatgaaaccagagaaacgaatgaaaaaccagagagaaaatatgtggtacagagcgcacgagtagatcagatgatgtaaagtttgaatgattggcaagtgattgtaccggcctactcccactgtcgatacacagctttactgatggagactgcaaggcaagtcgacggccgttttcttacatgtacgacaaaggcacactgctacttctcttttttttcgagcgagtaaaaccccatttctattattaccatatattttctattattaccgtaatagaaatatagcaggtccagatacaatacagaaggtcaagtaaatgcagagtaactaaggtaactcgcaacagagtttccctatcacagtagttatctggtttagatgacttgacagaggactcctattacaggcacggcacagatagccaaaaggtaggagaagagagatgacctagagtgttgtgaaaagggctaaaggggtgacatacaccatagccacacccaacctcagaagaaaaaaggaagcaaaacaatcatcctgct

SEQ ID NO: 1430 - DNA, 1591 bp, Zea mays
atatacacagtgtctcggagttgctcttacaacccgtagacagtcgcgcaaatgttgcgagcggccgcgtcgaggtgcgcccgcggcgccgtccggcggctgtcgtcgtctgcggtgatggaggcttcaccagtcgccgtggggtcgcggtggcagtctctccttgacgagggtgactggtcgtaccatcgggagtggtggggcgaggaggacggccccggcgagggcgtgcagaccgtcttccgccgccactccgagtgcggcaacggcgtcgtctccgtctccgcctaccctgcttcccttccggctagtgagcattggccagccatggagagatggcttcaagagagtaattcaagactatacccagaatcagccagctctgaccagtttaaggtactaggctaccagtggcgagtgatgcgttttaatgaccatacacggcaaagcactgcaaaagtgatgacatgttataggacttcgggtcagagatcattattcttgatgcagcaaccacatgttttagctgttccttatgtcaagagtatggtatcagcaggattgacagcgctctcatgttcttcgtatgatctaccacaagcagcatctggacagaacaccatgaaaattctgtgcatcggccatggtggcggcagcttaccattgtttttggctagcaagttcagaggtgctaccatccacattgtggaaatcgatccggtggttgtttcagcatcagttgaatccatgggtttccccgcgtcacccgttaaaggcttatcgcccgagtccatgctaccttccgacgccgacgacctattatggggaggcatacacgaccgcgtcttcctgcacacagcagacgccgaggatttcattggcagcgacggcaacgagtatgacatcgtcttcatcgacgcctacgacggagacgacgtgttccctcgcaagctctgggacgtggacggggcgttcatgaagagcctagagaagagagtgcaccccgtccacggcaccgtggtcgtgaacctgcactccgactcagactccgaggccgcggaaggcaacgccgacttccagagcgcgcttcccatgggcaggcacgtctcccaggtctgcagggcttacatgcagcacttcggggtggccttcacggccgcggtcccgtggctctgcaacatcacgctcgtcgcctgccgcgccggcgggatggcgggcggcgcgcgccgggggctgagccgcagggatctcgtccttggcaagcttctgtccaagtccgacacggtggagcgcgcgctgggcctgccgttcccgtgtctgccctacatcaagaacggcttcacgatgccgactgatatcaaagactacgcttgctgcacaaaggaaatggccggaaacatcctgcaggcccgggttggagcggctgttgcggtgcacaaaagactcgactactgtgattccggcaaccgtatgagagaagtcgtggccgccgccgccgcaggctcaggggcgcgcacgtgaggtacattaaactggacgcatggcaggccacgagatgcttgcggttgccgatagaggcctttaccctcaa

SEQ ID NO: 1431 - DNA, 1089 bp, Zea mays
atgattttgttcgagaggatgagatcagaaaatggccttgctttcacggtgttcagtgaagctgagcttgtaaaagctacagacagctacgacaagagcagaataattgggaagggaggccacgggacagtctacaaagggatagtcaagggcaacgtgccgatcgcgattaagcgatgtgcgcttattgacgagaggcagaagaaagagtttggtcaggagatgctgatactctcccagatcaaccacaagaacatcgtcaagctcgagggctgttgcctcgaggtggaagttccaatgctggtctacgagttcgttccaaatggcaccctgtacgaactcatccatggcaagaaccaagcgctacagatccccttcagcaccctactgaggatcgcccatgaagcagcagagggcctcagttttctgcactcgtacgcgtctcctccgatcatccatggcgacgtgaagagcgccaacatacttcttgacggcaactacatggccaaagtgtcagattttggggcctccatactagcgccgtccgacaaagagcagtatgtcacgatggttcaaggtacctgtggatacctcgaccctgaatacatgcagacatgccaactgactgagaagagtgacgtctacagcttcggcgtcatccttcttgaggtactcaccggccaagagcctctcaagttggatgggcctgagacgcagagaagcttgtcatcgaagttcctgtccgctatgaaggagaacaatcttgatgtgatattgccgagccacgtgaatggtggacaagggagcaatgaactgatcagagggctcgcagagctagccaagcagtgcctggacatgtgtggctgcaacagaccatccatgaaggaggttgccgatgagcttggtagattgaggaagctttcgctgcatccttgggtacagatcgatgcagagatgatagagtcccaaagccttcttagtgggacaacgactgctagctttgaaatagaagttggtacaactgggtatcctacacaggaagctgagaacctgcccatgaacccaagaagttcgtactatgcgaggtag

SEQ ID NO: 1432 - DNA, 2579 bp, Zea mays
caataattgaagtaatctccaaaggttcagacttcagaggtgctcttggcttcaaggggcggctgggtgagggcagagctctcaactaaatgcccaaaggatatatccagcaaaggacagaatgaaagtggtctctatacaccttgctgctgctgttgttgctgttctacttctgttggcggcaaagcgcacccctgctattgcggttcctagccctcaatgccaatggcaatgcggcggcgttgacattgcgtttccgttcggcatcggtgacaactgctcgctatcagcaggattcaacctcagctgtcaggaggtccaaagtggcgtctacaggccattccaaggtaatattgaggtgctcaacatctccttgataaatggcacggtccgggagctgaaccccgtctcgacatactgctacgactcctcctctggttccatggagtccagtacctggtatttcgacgcgagcggaaccccgtaccggttttcggacgtccagaacaagttcaccgtcatagggtgccagaccctcgcctacatcacggacaacaccgacaagagctaccagagtgggtgcgtctcgacgtgccagaatgtgtcagacctaacggacggatcctgctccggcatgggatgctgccagacaaacatacccaagaagatgggcttctacaacgtgagcttcgaccctgcctccgacacaagccaaatctcacggctgggcctcggcagctgcagctatgccgtgctgatggaggcggaggagttcagcttcagcaccacgtacatcaccaacacgacagctttcaacgacaccaacagtgggagggtgccggtggtgatggactgggcgataagagatgatggcgcgccgtcgtgtgagctcgccacaaggaacgagacgggcacttacgcgtgccgcagcggcaacagcaagtgtgtggaatcccccaatgggccagggtatctgtgcaactgctccggtgggtacgaaggcaacccatatcttccagatggatgccatgatgtcgacgagtgcaagaagaacagtccatgcccttcagtaggaggtgtatgccacaacacggtcggagcgtacaggtgttcttgtcgagcaggaagaaggcttaacaagcaaaacaatacgtgtgaccctgataccacattaataacaggggttacaatcggcttccttgttctcgtaatcttctcctccttcggatacatgatcctccagaagagaaaactgaaccaggttaagcaagatcattttcggcagcacggaggcatgattttgttcgagaggatgagatcagaaaatggccttgctttcacggtgttcagtgaagctgagcttgtaaaagctacagacagctacgacaagagcagaataattgggaagggaggccatgggacagtctacaaagggatagtcaagggcaacgtgccgatcgcgattaagcgatgtgcgcttattgacgacaggcagaagaaagagtttggtcaggagatgctgatactctcccagatcaaccacaagaacatcgtcaagctcgagggctgttgcctcgaggtggaagttccaatgctggtctacgagttcgttccaaatggcaccctctacgaactcatccatggcaagaaccaagcgctacagatccccttcagcaccctactgaggatcgcccatgaggcagcagagggcctcagttttctgcactcgtacgcgtctcctccgatcatccatggcgacgtgaagagcgccaacatccttcttgatggcaactacatggccaaagtgtcagattttggggcctccatactagcgccgtccgacaaagagcagtatgtcacgatggttcaaggtacctgtggatacctcgaccctgaatacatgcagacatgccaactgactgagaagagtgacgtctacagcttcggcgtcatccttcttgaggtcctcaccggccaagagcctctcaagttggatgggcctgagacgcagagaagcttgtcatcgaagttcctgtccgctatgaaggagaacaatcttgatgtgatcttgccgagccacgtgaatggtggacaagggagcaatgaactgatcagagggctcgcagagctagccaagcagtgcctggacatgtgtggctgcaacagaccatccatgaaggaggttgccgatgagcttggtagattgaggaagctttcgctgcatccttgggtacagatcgatgcagagatgatagagtctcaaagccttcttagtgggacaacgactgctagctttgaaatagaagttggtacaactgggtatcctacacaggaagctgagaacctgcccatgaacccaagaagttcgtactatgcgaggtaggtgattagcgtatgttgttgtgtactccgttgaaatttctactgctaggataacagcaagctagcagttctgttatcaaagatatactgcatattgacacaaatctctgcctatctttagccattcaaaagtatgtatatgtgtttctgcgcagcacgtctgcaacatatataatccggttttttacgtggtgccc

SEQ ID NO: 1433 - DNA, 1405 bp, Zea mays
caaaattataaccccagaaacctccctggccagacgctcggctccggccggggccttatctctgaggaggaggagaggacttaaacaatccaatcatgaagcagccgcctgttgctgtcacgaaccaccgccaccgtctcactcccactcgccctccttaaatacctcgcctcgcctcggccagtctcgtcaaaagcgagagagctaagctaagccgagctaagaagcacagcaagtctcaccagactagcggctagcgcgagaatggccaaggacatcgaggccgcggcggcgcacgagggcaaggactactcggacccgcccccggcgccgctggtggacgcggaggagctgaccaagtggtcgctgtaccgcgcggtgatcgccgagttcgtggccacgctgctcttcctctacatcacggtggccacggtgatcgggtacaagcaccagacggacgcggcggcgtcgggccccgacgcggcgtgcggcggcgtcggcgtgctcggcatcgcctgggccttcggcggcatgatcttcatcctcgtctactgcaccgcgggggtgtcgggtgggcacatcaacccggccgtcaccttcggcctcttcctggcgcgcaaggtctcgctggtgcgcgcgctgctctacatcgtggcgcagtgcctcggcgccatctgcggcgtcgggctcgtcaagggcttccagagcgccttctacgtgcgctacggcggcggcgccaacgagctcagcgccggctactccaagggcaccggcctcgccgcggagatcatcggcaccttcgtgctcgtctacaccgtcttctccgccaccgaccccaagcgcaacgcccgtgactctcatgtccccgtgcttgcccctctccccatcgggtttgcggtgttcatggtccatctggccacgatccccatcaccggcaccggcatcaacccggccaggagcttgggcgctgctgtcatctacaacaacgacaaggcctgggatgaccacgtacgccctacacacacagacaccaccccttctcccgctgaaagttctactaacaataaattaagtgctaattgcttacaggcatggctggccgctgccataccaacactgacctaaccttaataaccaatcgaacaaaactgttgcgacatttctcagccgtagggtttattactagataggagcagatagaactgatatattattataacaaactggatgctcaggataaggctcaatgatgatcacttagttaaactgatcagcagatgtcatccaaattgattattagtatgcagttgttaatttagtatgccattaacacaggcactttcagctgtgtgattaaggtctgtttcgttcctttagtgacaaaagtttagtccttacctttttt

SEQ ID NO: 1434 - DNA, 1945 bp, Zea mays
gcgctcctccagtctccagtctccaccgcccgccaaccccgagatatacctcccttcctctcgaagcttcgtctgcagacgaagtcgccggctcttccctcggcgctggtgccggtgggttgcctgtggcggtgggtgggtggccgggtggtggtgttgctgggatgcccgccgcgacggcgaccgcagcccgcctccgcgtgccgctgccaaaagccgcccaccactcgccctgctcgagccggcgccaccccgactgccgccgccgctgacgagacgagcggccacacgcttggcgcgcgccatggatgccttgtcccgccctgctgtcgtcatcgacaacggcaccgggtacacgaagatggggttcgcggggaacgtggagccctgcttcatcacccccactgtcgtcgccgtcaacgattccttctccggctccgcccagccggcggtgaggggcacccccgccagggggaactggctcgctcagcacagcgccggcgtcatggctgacctcgacttctacatcggcgacgaagcgctggcccgatcccgcgccagcagctcgcatagtttgagctatcccatccgcaacggccaggtggagaattgggataccatggagaggttctggcaacagtgcatcttcaattacctccggtgcgacccagaagatcattattttcttctaactgagagccctctgactgcccccgagacccgggagtacaccggagagatcatgttcgagacgttcaatgtgcctggcctctatattgcagtccaacctgtccttgcgctggctgctgggtacactacaaccaagtgtgaaatgacaggtgttgtagttgatgtgggtgatggggctacccatatcgttccggttgctgatggttatgtcattgggagcagtatcagatctattccaattacaggcaaggatgttacccagtttattcatcaacttctaaaggaaagaggtgagaacattccagcagaagaatcttttgatgtagcaagaaggattaaagaaatgtactgctatacttcttcggacattgtgaaggaattcaataaacatgacaaggagccatcaaagtacattaaacactggacgggcaccaaaccgaagactggtgcaaaatacacatgtgacattggatatgagcgattcctagggcctgagatcttcttcaacccagagatatataacaacgacttcaccactcctttgcaagttgttattgacaagtgcatccaatcatctccaatcgacacaaggagggctctttataagaatattgtcctgtctggaggctcgactatgttcaaagatttccataggaggttacagcgggacctaaagaagatagtggatgcacgggtccgtgcatctaatagccggcttattagtggggatgctaaggcccagcctatagaagtgaacgtggtcagtcatccgatccagagatatgcggtatggtttggtggctctgtgcttgcttcaactgccgaattctacgaggcttgccacacaaaggcagagtacgaggagtacggtgccagcatctgccgaacgaatcctgtcttcaaagggatgtactgactcagagcggttccctgtggctgacgtcgtggatgatatccactcaaagcttaaatggggagaagtgacagtggtcgtggagacaggactgtcgagagggatcctgatcgtggggaagcatagccgtacgagctgtacaaaagagaagcgcaaatagataggtttatgtttcaccatacaatttagatgctggtaggcctgacaggatgggtttgccacccctgctgaattgggtggcattgtaatttgtagcgtcaacacttctggcggtgcgagattgctccttgtatacatgttgattcggcagcgaaaaaaaaaaaaaaaaaaaaaaaaaaaaaa

SEQ ID NO: 1435 - DNA, 2009 bp, Zea mays
gctatgacaactgtcgccgcgcacataaatgaaacggacgccgttcctcttctcccctcttccatagcatagcagagcaggcgcacggcgcaccgcacacctcactgccgctcccttctcgtctcctctcctctcctctcctcggcggatccggcaccgacccaccgcccctctgctcgctccttccgccggaatcgctgctcctctctgtgctgtcgatttgtgcggcgactgttagtttggttcggtcccatccttctgttgatcaatggctgacggtgaggatatccagccacttgtgtgtgacaatggcactggaatggtcaaggctggctttgctggtgatgatgcgcccagagcagtgttccctagtatagtcggccgccctcggcacacgggtgtgatggttggaatgggccagaaggacgcctatgtaggtgacgaggcacagtcaaaaagaggtatcttgaccttgaagtaccccattgagcacggtatcgtgaacaactgggatgatatggagaaaatctggcaccacaccttctacaatgaactgcgtgttgctcctgaagagcacccagttctgctgacagaagcacctctgaacccaaaggcaaacagagagaagatgacccaaattatgttcgagacattcaatgcaccagcaatgtatgttgctatccaagctgtcctttccctgtatgccagcggtcgcactacaggtattgtgctcgattctggtgatggtgtgacccacaccgtgccaatctacgagggatacgcgctccctcatgccattcttaggctggatcttgctggccgtgatctgactgactgcctaatgaagatcctcacggaaaggggttattccttcaccacgacggcagaacgggaaatcgtgagagacataaaggagaagctggcctttgtggccctagactacgagcaggagctggagaccgctaagagcagctcctccgtcgagaagagctacgagctgcccgatgggcaggtcatcacgatcggcgcggagaggttcagatgcccagaggtgcttttgcagccgtcgctgatcgggatggaagctcccggcatccacgagaccacctacaactcgatcatgaaatgtgacgttgatatcaggaaggacctgtacgggaacatcgtcctcagtggagggacgaccatgttccctggcatcgctgacaggatgagcaaggagattactgccctcgcgccgagcagcatgaagatcaaggtcgtggcgcctcctgagagaaaatacagtgtttggattggtggctcgatccttgcgtcgctcagtacgttccagcagatgtggatatccaaggatgagtacgatgagtctggccctgctatcgtccaccgaaaatgcttctgagctagctatctgccgcgcctttcatagcgtgtcaagctgttgagatctgcgttgttgagttgagtgtctctatggagtatcacatactttctgcatgaggggggaagagtatacccaactaagcgcatgcctttcggatgccctgcttcgtgattcagatgctgctttctttcaagtgatatgtcgatgtagtgtgcgagcaatgtatttggtttggctacagctgttcctgtcgtctgtgcgtaaaacattagctatgtatctatccatatctgcatatttgaatgtatggtcgttttctcatatggtgtcaagttaaaattcttatgttctcttattaaattttagttacccatatgtggccataatagccatgatatcttgtgaaagggtctttagctgggttggttggttggtctaataagtataatattttgtgaaaggggatttagctgtggtggttggatgatctgaataacacttctcctgtcctgagtttaaaaatatcttgtctgttattctagggacttttttttaatataataccaatgagctatcttatgagtttgttttgcacaaaaaatgaatcaaatttgacaaaagtact

SEQ ID NO: 1436 - DNA, 1930 bp, Zea mays
ctccacccgtgagccgctcccccttccgtcccggccctcccgcttccccgaatcccggagaaaccgccgccatggacaaggccgcgctggtggctgagaacagcacggacgccggcgggtcgtcgtcgtcgttctcgggcctgcgcgcgtacgggcgcgcgctggcgcagacgccgcggcgcctggcgcggcgcgcgtgcgccgccacggcgccccgcgaggagatgagccgcgtgcgcgcgcggtcgggcccgcgcatggcgcgcgcgctgcggtggtgggacctggtggggctcgggctcggcggcatggtgggcgccggcgtgttcgtgaccacgggccgcgccgcccgcatctacgcggggcccggcctcgtcgtgtcctacgccattgccggcctctgcgcgctgctctccgccttctgctacaccgagttcgccgtcgacatgcccgtcgccggcggcgccttcagctacctccgcgtcaccttcggggaattcgcggcattcctgacgggggcgaacctgatcatggagtacgtcttctccaacgccgccgtggcgcgcagcttcacggcgtacctcggcacggcggtgggtgtggacgcgcccagcaagtggaggattcctgtgccgggcctgccccaggggttcaaccaggtggacctcgtcgccgtcggcgtcatcctcctgctctctgtctgcatctgctacagcacaaaggagagctcggtggtgaacctggtgctgacgggcgtgcacgtggtgttcatcctcttcatcatcgtcatggggttcgcgcacggcgacgcgcgcaacctgagcaggcccgccgacccggcccacagccccggcggcttcttcccgcacggcgccgcgggcgtgttcaacggcgcggccgcggtgtacctgagctacatcggctacgacgccgtgtccaccatggccgaggaggtggagcggcctgaccgcgacatccccgccggcgtctccggctccgtcgtcctcgtcaccgtgctctactgcctcatggccacctccatgtccatgctcctcccgtacgacgcgatcgacccggaggcgccgttctcgggggcgttcaaggggcgggacgggatggcgtgggtgtccaacgtcatcggcgccggcgcgagcctcggcatcctcacgtcactgatggtggccatgctggggcaggcccggtacctgtgcgtcatcggccgctccggcgtcgtgcccgcctggctcgccagggtcgacccccgcaccgccacccccatcaacgcctccgccttcctcggcctgctgacggcggcgctggcgctgttcacggagctggacgtgctcctgaacctcgtctccatcggcacgctcttcgttttctacatggtggccaacgccgtcgtgtaccgccgctacgtgggcgacccgtgccccggctccggccagaagaggagggcctggccggcgctggccttcatcgcggccttctccctcattgcgatctccttcacgctgctgtggcagttcgcgccggggggcgccgccaaggtcgggctcctgtccgggaccgcggcggtcgcagtcgccgcggttgtcgcgttccaggcgctggtgccgcaggcgcgcgagcccgagctgtggggcgtgcccgggatgccctgggtgcccgccgcgtccgtcttcctcaacgtattcctgctcggctcgcttgaccgcccgtcgtacgtccggttcggcttcttctcggccttcgcagtgctgttctacgtgttctacagcgtgcacgccagctacgacgccgaggagggcggcgcggtggacggaggcggcggcggcgacaagctgcaggaccaaggatgcgatgtgtaggcgtgtagcagagtggctgacgtaggcagacagctcagccttccttgatctaccttttg

SEQ ID NO: 1437 - DNA, 1501 bp, Zea mays
cctccgactgaccactgaccaccagttctgctcttgcgtgacatgatgatgaggggtttagtcggttgtgggcggcaaattatatgcataaaaacctctaaccagaagctaaaacccttaccccttgctaaattagtattttgtaatcaagcggccgctaagcaaataaaccatatcaaggcgtcctcccgcggcccatatatatacacacacacacatcggctttcccatctccggcctcacaccgcaaccgcaagcaagcgaagcgcagagcctgcctgaccagagctagctgagctacagccaacagcagctggtctgactgacatggcgaaggacatcgaggcatcggggcccgaggcgggcgagttctcggccaaggactacaccgaccctccgccggcgccgctgatcgacgcggaggagctcacccagtggtcactgtaccgcgcggtcatcgccgagttcatcgccacgctgctcttcctctacatcaccgtggccaccgtgatcgggtacaagcaccagacggacgcgtcggcgtcgggccccgacgcggcgtgcggcggcgtcggcatcctcggcatcgcttgggccttcggcggcatgatcttcatcctcgtctactgcaccgccggcatctcaggtgggcacatcaacccggccgtgaccttcggcctgttcctggccaggaaggtgtccctcgtccgcgcgctgctctacatcatcgcgcagtgcctgggcgccatctgcggcgtgggcctcgtcaagggcttccagagcgcctactacgtgcgctacggcggcggcgccaacgagctcagcgacggctactccaagggcaccggcctcgccgccgagatcatcggcacgttcgtgctcgtctacaccgtcttctccgccaccgaccccaagcgcagtgcccgtgactcccacgttccggtgctagctcctctcccaattgggttcgccgtgttcatggtgcacctggccaccatccccatcaccggcaccggcatcaacccggcgaggagcctgggagccgcggtcatctacaacaaggacaaggcctgggacgaccaatggatcttctgggtgggcccactgattggcgccgccatcgccgccgcctaccaccagtacgtgctgagggccagcgccaccaagctcgggtcctaccggagcaacgcctaagttccgcccggacgcgccaggagctgggcaccgttccgattctgttcctccacatgacgccctgttctgtttccgtgtggccaggactccgctcgctcgctgctgttttctacttcggaccaaagtgtgacatatctttgctttctgtatatgtatgtaggaatgcatcatgtaaggagaatttggaatacaattgcgtgagtttttatccgatcacaatctattgagtagtggaataaaaaaaaagtcatgtcctttctttaaaagaatgaacttatgaaagtaaagaaaagaacctcacgaggaa

SEQ ID NO: 1438 - DNA, 2446 bp, Zea mays
caagtcgtgagccgtgacggcctctgaattcgtcgatggctacgcctctgcctgtccggtgggccatacgaccacatgcaccgcgcgggactagggctgccatcgtggcgccgacacgcgtcaccatatcattgggccgcgggactcggcgacaggccttttgtagaccgcagccggcaccatctcttgccgcaccccccattcgaacgccggagctcgacaaggacgaccgacgacgcacgcggaggttacctctcgccccccctctcctccgtccctcggagtctcctcctgtcttgatttcgggtcgctgctgtttcgatcccctttcctccctgacgatttgcttatttttgcgttggatttgtaacctaaacatctcgtttccgcaccgttttggggccgcgtctactggtggttgggtccctttagatcgagtaggcgcgaggatggggacacatccccgattgatctgacgtgatacgcgtacggatccgtcaaagcctctactccagtttaaccagatgattatgtgtcatgcttattaagcggcgtgttttttaccgctggaagttcgtacataggtactcagatctgtcccttttcaaggttagaggaagtgttggaagctaggatacatggtttcagctaggtttagtttgtggtttattgcaggcaaaattcgccaagcaaatactctagtactcttttttcatacagttaatgataaattgccgttacctgaccatgaatttccgtgatttatgctgagaattttgcattacccctggaaatcccccgtctgaatttgactagctagtacctattcgtgccacagatcaataaagtgttgtcccatatattgatgtatatttgcagatccggcgtactgcaaattttgaaaactgaactgtaagatggcatcagcagagctttcccgtgaggaaaatgtgtacatggcgaagctcgctgagcaggcggagaggtacgaggagatggttgagttcatggagaaggtagccaagactgttgactcggaggagctcactgtggaggagcgaaacctcttgtctgttgcatacaagaacgtcattggagcccgccgcgcctcatggcgcatcatctcctccatcgagcagaaggaggagggccgaggcaatgaggaccgagtaacactcatcaaggattatcgtggcaagattgagactgagctgaccaagatctgtgatggcatcctcaagctgcttgagacccatcttgtgccgtcttccactgcccccgagtccaaggtcttctatctcaagatgaagggtgattactacagataccttgctgagttcaagactggagctgagagaaaggacgccgctgagaacacgatggtggcatacaaggctgcccaggacattgctctggctgagcttgctccaactcaccctattaggcttggactggcacttaacttctcagtgttctactatgagattctgaactcacctgatcgcgcctgcagtcttgcaaagcaggcttttgacgaggccatctcggaactggacaccctgagcgaggagtcctacaaggacagcactttgatcatgcagctccttcgtgataacttgaccctatggacctctgacatctcggtgagacccatgtccctaacactaagttttcttcgcactcttgaattggatcttcctgaaatcagcctcccccctgaacaattgtatttctggtgcttggctgcaggaggaccctgctgaagagattagggaggcgcccaagcgggactcgagtgaggggcagtaaagccggctttatgtgcctagaaactagtagctagtgtttgctgctgtcgaatgacactatgcaatgtgatctggaacctggtttcttgggtgcgacgcttgtagccgtgttatgactgtcgtccgtaaaatttgggggctccccgtaagggatgctgcctggcaaggcctcggtgtcccacctcgtctgtggcgtggggcgctggagcccggtctggttgggttgggaagccctttaaactgttgtcacttgcattttaccttttccatcgctgtttattgtgagtggtcctatatcaatggctggtctcagtggtctatacgtatgctttttggttctcttgattcctcacagggtgagtgggggcatgagcatttctctgtctcatctcaatgatgtaagttttctgtttggtgtctcgttccaagatgacttcagaatccgtaaatctctgaagtctaaacgctctatctaaacctttggattcgattacaattgtagatatagaaatctgtagaagggtgcaattcagaatactttgccatgaaatgaatatccttcttgtgagactctgtattaagactaaaacagctcaaattgatagagattctgtgattccttccctacacgatgagag

SEQ ID NO: 1439 - DNA, 1898 bp, Zea mays
cgccatcgacggtcccgtataaacccgcctccctgcgcttgggcagcttccctcccctcccctcccctccccacctaacgttaccggccggtcagcctctagtccacccgagcgcggccggccggtccgtccgtccgccgcagcagagcctctagcctgtagccagttggttccccgcccgcggccggcgacagatcgatgcggcgtgcgtggacgcccgccgacgagcgagcagcgacgacgacgagcgagcaccggcggcggaggcggatggggaagtacgagatggggcggacgctcggggagggccacttcgggaaggtgaggctggcgcgggacgcgggcacgggccggtccttcgccatcaagatcctcgaccggcagcgcatcctcgccatgaagatcgacgagcagatcaagagggagatcgcgacgctgaagctgctcaagcaccccaacgtcgtccgcctgtacgaggtttcagctagcaagaccaagatatacatggtcctcgagtacgtgaacggaggagagctatttgacaaaatcgcactcaagggtaagctgacggagaaggaagggaggaaactgttccagcagctgatagacgccgtgggatactgccacgagaagggggtttgtcacagggacctcaagcctgagaatgtcctcgttgatgcaaagggaaacataaaggtttctgattttggactaagcgcccttccgcaaaaccaacgaaaagatggtttgttgcataccacatgtggcagccctaactacatagccccggaggtccttctgaacaaaggttacgatggctcggtatctgacgtgtggtcctgtggtgttattctatatgtaatgcttacagggagtcttccatttgacgaccaaaatatggttgtcctctatcagaagattctgaaagggaatgctcacattccaaagtggctctctcaaggtgcccaagatctactgcgaaagatcctggatcctaacccgatcacgcgcgtagatgtggatgggataagggcacacgattggttcaagcaaggctacgctccttctgcgccgtttaatgatgacgaagaagatatcaacgtggatgaagaagacagcctaaatatgactgagcagaatggcattcaagacaagatagcaatcaaccaaatcaatgctttccagctcattgggatgtcctcctgccttgatctatccggattttttgagaaagaggatgcttctgaaaggaaaatcagattcgcatcaaattatcccccagcttacttgtttgagaagatcgagagcattgtcagaaaaatgggtttccaggtacacaagagcaacggcaagctaaaagtgatccaagattgtaagggactagcaaatttaagagggaaagagtcattattaatttctgctgaggtgtttgagattaatgaatccctttacgttgtcgagctaaaaaagtcatctggagactgctccctgtacagaaagttgtgtgagacgctctcggaggacttgggcacatgcaaaagccagcaatttttaaagcaggattctatcagacaagagataggtagacataacagtagcttttaactaagagcccccttgttaaataggctatagacacaaactaacacaaacaatatactgaatttaaaacagtatattgggcatgcacctattacagatgtgctctctcatgccttttgtcatgaaaccttaagagacttagactatgaaaaattggcaactgacaatgtatcgaactccaaagggataatatgatgatgtaaacaagtaaaatacgcatataagtgattcagagctacctggtctctatgtttctcttatatattgattgatattggaacgtaagattgtttgct

SEQ ID NO: 1440 - DNA, 2437 bp, Zea mays
tgcactgcatgggccggccagctatttccggtgcccgcacgggaagcgtaacgcgacaccgacgcgccctcgccaccccgtcacccgttgcgctgcctccctccctagtccctatctctctctgccgtctgccccgaaagaggcggcaacccctccgcgcggggttcttctctcggtgctctgacaggcggcgcggcagcgagacgtcgctctctctctcactccccgcatcctccttttcttacccgcgccggagagaccgatcgagaggccgagaccccccccccccccccccccccacaacactaaatgagctcgccgacgccattacgtcccgccggcggcggcagttactacccgctccaccggcggcgcgggcgaccgggcccaggcccgggcgcgggtttaagaaggccgcgggtgcgccggtgcaagatgaagctgatgtacttcctcatggacagggacgagcagcgcgagaagcggctggagctcgagttcgaggtgtcggagctggagacggtgctcgagaaggagcagcagctgggcagggtcctgcagtgctcgctccaggggcgcgtcgtgtgccattgctgcctctccgcgctggttcctaccaacgttaggggccttttagcggagctagcggtggtggaggacgagatattctacttggagaagaaggtggacgacctgcgcctgaggctgcgccgggagcagaagtggacggaccactgcatcctccaccaccagcagcagcagcagcagcacaaccgccagcaacggcactccgtgtccgtgtccaggagggagctccagctccaacaagcaggcgcccagcagctacccaggctaccgtgtccgggtccgggcagcgacgaggctcccgaacgcgagagcaaggcttccgtcggatccgcctccgccaaaggagatgagacagagcacgtcgtcggcaggaggagcagccactgccactcgtcgtcgtcgtcgtcggagaacccgtaccggccgacgcctcccgagcggaagacgtactgcatggcgagcagccccaacaggctctcggaggagctcgtcaggctgacggtgaccatcttccacaagctcaacaagacggcgacggcgacggcggcggacgcgggggagctggatctggagctggagccgagcggcggcggcgcgtcgtcgtccaagctcaacatctcgtgcatcggccccaggagcctcgtccccagggtctccgcgtccgtgaacggcgccgcggcggcgatgagcccgctcaagagccggagagcggcggccaagggcggcggcgcggagaccgggtctgccgccgggtgccagaggaggttcgtcgagttcaccagaggctccgtcgacgtcagccgcatctcactgtgcctcgtcgacatcaagaacctgagaggcctgatgcagaagctctgcgccgtcgaccccagccttatgacgaacaagcagaagctggcgttttggatcaacgtctacaacttctgcgtgatgcatgcgtttctccagcacggtttgcctccgtctccggagaagcttcttgcgctgctgaatcaggcttcggtgaacgtcggcggaacagtgctgaacgttgtgtcgatcgagcacctcatcctgaggcactctcctgacgccaagcaaggtatgtatgttgatgatgataagggcattatgggcgacgacggacagacggatctgctgcactcgtacgggctagggtatcccgagcccaacgtcgtcttcgcgctgtgcagaggcagccgctcctcgccagcactgcgcgtgtacacggcggaggacgtgtcgaacgagctggagcgggccaaggtggagtacctggagtcttcggtgcgcgtcgccggcaggaagcagcgcgccgtcgtggtgcccaagctgctgcactggcacatgcgcgacttcgccgacgacgccgcgtcgctgctggagtgggtgcacagccagctgcccagggcgtcggggccgctccgccgggccatcagggaggtcctgggcgccaacatgggcagcggcagcagggcgcccacgccggcgccggcggccaagatgctggaggtcgagccgtacgacgccgacttctgctacctgctgcccgtctggtgagcgtcagcgaccgtccgtgtccatgtaagcaaggcattgctagctgcgcgccgcgcgggtcaagttctgctgtgaccattgctgcagtgcgaggtggtgacgatgtcgtgcatgtgaagcgtgaactacttccgccgtatgatagttttactacgtacatttttttgtgcgttgtgttgacgtgcagaagtatcaatcaataaggccttgttcatattctatatggattcgaaaaattgcgaagaattttgacttgctatgaattttaacacatccaattctgtcc

SEQ ID NO: 1441 - DNA, 2344 bp, Zea mays
taattgatgacctgctgcacttcgctttcatccgcgtcaccaacatttattttcgtatgtatctgctataatgcatgcaatgcatcgtggcacaacaacgatcaattcgcaacgttaacatgcatgcaagacgcgcgcggatcaatagttacaagaaagggaccatcgatcacctcacgtcgacaccttctatatatctctgcacacagcacacaccttcactcgcagctcggcagctataggaggaggaggaggaggaggagatcgagatagcaatcgccgggtggggggagggagagagacaagaacggaagaagaagccagccgcacagcacgcgcccgcgcggccatgtgcaccgagaactacgacgcgtgctacccagaccagccggtggtcgaccgctacctccccgtgtgggccaagctgccggcgttcgccgccaagccggccttcgtctgggccgacgacgacgcggcgtcgacgcgcaccgcgctgacttacgcgcagctcgacgccaccgccgcatgcatggcgcgcaacctcctcgccggcaccggcaccggcagcctccgccggggcgacgccgtcctcgtgctcgcctcgccgggcctccgcctcgtcaagctgctcttcgcgtgccagcgcgcggggctcacggcggtacccgtcgtgccccccgacgacccggccacgctcagcggccccgcgcacgcgcacctcctgcgcgccgtgtcgcaggccaggccggctgccgctgtcgccgacgccggttacatagacgccgtcgccaaggcggtcgcttcttccgtcgccgggggcgagaacgcccgcctggctgccatgctggggagcctgcgctggctggccgtcgacgagctggagcgcgtgtgtgatgggccgcagacgccgtacgtgggctgtgggccggacgacgtgtacctgatccagtatacctccggagcgacgggcgtcccgaggcccgtggtggtcaccgcgggctcggcggcccacaacgtgcgggccgcgaggaaggcctacgacctgcaccccggcagcgtcgtcgtgtcgtggctgccgcagtaccacgactgcggcctcatgttcctgctcctcaccgtcgtcgccggcgccacctgcgtgcttgccgccccgggcgcattcgtccggcgccctgacctctggctcgaactcgtctccgagttcggggccacgtgcacgcccgtgccgtccttcgcgctgccgctcgtcctccggcgcggccagcggcggcggccgcttcagctcggcagcctgcgcaacctcatcctcatcaacgagcccatctacgagtcgcgcgtcggcgagttcgtggaggcgttccgctgccacggcctgcgcgccgcctccgtctcgccgtcctacggcctcgcggagaactgcaccttcgtgtccaccgcgtggcggccgagcgcgtgctctgaatctgatcgcctcccgtcctacatgaagctcctgccgtcggcgaggctatctccggccgcggcgaacgaggtgccggctgagatcgagatcgccgtcgtggacgagggcacaggcgaaccggtggaggacggcgtggagggtgagatatgggtgtcctcgccgagcaacgcgtcggggtacctcggccacccgtcggcgagccgcgaggtgttctgcgcgcgggtgccggggcggacaggcgcgtgcttcgtgcgcacgggcgaccgcggcgtagtcaggggggctgagcggtacctgtacgtcgtcggccggagcgccgacgtcctcgcgctcgacgcaggacggcgccacgtgcacacgcattacgtagagacggcggccttcggcagcgcgtcgggtcgcctgagaggcggctgcgtcgcagctttcgcgacgtcgtcgtcgacgccgtggtcacgttcgcagatcggcgtcgtggccgtcgtcgcggagctacagaagggaagcgccggcgtcggcgatcacaggggcctgtgcgacggcataagggcagcggtgtggcgggaagaaggcgtcagggttggtttggtcgcgctggttgacggtggggtggtgcccaagacgacgtcgggcaagttacgccgtggggcggcgagggagatgctggccgccggaaagctctcactggtctttgaaacacgatacgacgactgtgatggatcggtggctggggtgagaggcgaagaggaggagacagcggcgaagtccggagctagttggctggaaggagagggcggagagaccggcatggctaccgaagccttcgggagcgcgagccgtcgtcttcgcttgcagtcatttctttagcatgagtgttgggta

SEQ ID NO: 1442 - DNA, 1790 bp, Zea mays
taagataaagagagtacaaaataaaaaaacatttttccaatgtatactaaggagctaggtaccattaggcagtagctcaacaagtagatgaaaacgatgaagcccccggctcataaactggacaacatttttcaggaaacattaactgaacaagaatttatttgatacatgaatccataacaatgaaatgacagataatatatgcataatacaatatagatgacgcatattgctactcttcgatacttttcaactttatcagtaaacataatcctcacattgggggttgttgcgtaggaaaaggaagactggaataaagaggtgtgcatgcatgtgacgctagaaggactgcctcagctaactggccaatacgatgccatggcatgctagcagtagcaggggtagctctagcttggcaccagccgcacctggaacctctcatagatactagctagtatatgcaatgcccaagagagatttgtggcagtcaaagaatctttagcaggctgctggtcttactcaagctcgtgattcgtgaatacggttgggctttagtttaatgtgttgcatttgcatgcagtatatagagtactagtatcatgtaatgaatctttagctttgcttcttcttttcctgacaaaactaaaatacacgtattaaggcaaagctaaactcacaacttcttagaactagagcacacgtttcgatcataagaagagatcagggaaaggtacatatatgggatcgaagctagaagatgcacatatatgtgtatttcatgttgttcttctgatctaaatactattagatcatatctctctagaaaacagctagctgggatagttatgggccgtatatattcggatcatgaatcaatcatgaaacacacacacacagcgtcaaacgctcagctcaaagaagaaatccacatatctaatgaaatagtattacatgaaccaaactccggatcaaagagtggtgtcaaaacaaatcaatcaaagacagacgagtattgatgtctgcacaaaccatatgtagcgacagatcgaccaagaacatgtaggaataacatatagcgtagcatgcatgacatactcttgcacaagtacgtagatcctagctaggaaaagaagacggatttcttcggaccaaggcgcttgattcccccaaagccatggcggcgcagcgttacagagaagctgataaagaggagctggaaggaggaggaggaggaggaggagggaggactgcaccgatctgatgatggcttcttgactcgaatgatagaagtgctagatcgaagagatcaaccacgccatcatcatgctccatcatgcatctctctctagctttctgtcacctcccccggccctctctctcctccgccggcccctcctacaccgccgcccctccgcttgatttcttcacggactatagcttctccggcctcttcctcttggaagtaggtggaggcgactcttgagaggcggtgaggcaatcatggcggccgagggcccgaggagcttggggcagcatgattgcatcttggaagaagtagggggatgagaggcggaacagcaggctcctcccgcatcacatggtgtgctatgatggaggcacatctcactagtagccggccgcgcgcacatctcccttggtggtctattgggctcgcgcgacctgcttgctggtcttctttctaggggtctcgggtctcctctcgatccggcagtggattatgatggactttggccaatctccgaagctagctctagggcatttgtattttt

SEQ ID NO: 1443 - DNA, 896 bp, Zea mays
atggccgaccggcgccggcatgggcatggccagcgcgtagcggtgtggtgtgcctcccgcgtctcggcgcgtgcctcgttctcggactctcctatcctctatcctttccaggagctcactgctcagcatcacgcgttgatagacagcagcgctgggtgcgggggtggggagtatcatgagccaggtggcgtggcggcccacggtgtctgggaggacggggcacgaccgaagccacggggaacgggggcggggggatcggggcgtaccttgtcgaactcttcacccatggtgcttctccaccaccggcggcctcctgaaatgtgggatctaggcgtcggggtagctgcaaactccaagagcttcaccaccaccgtcggcctcgtgggagctcttgcctgtcttggctctaccgtagatgctggtgccgcgcgggaggttgtaggggaaggcgaggacgacgaggtcagtggtggtgagaagcacgcaggggaggaggaggtaggtgacgtgccagggtatcttaccggtcttagtagtgcatgcgaaggatgggagggcggagcaacatttggagtgcggatggcgagcgcggctcctgttgatgttgggcgagccgggattagggcgaggttaggcgcgtccgagtggtggcgaggaaggcaagagcgcgcagtcggcgccggaaatttggatggtctggtggcgaggagggtgcgcgttcgagtggtggcgaagaaggcaagagcatgcagtcggcgccggtaattacaacggcgtagtggcgaggaagacaagagcgcgcaatggatccgggcttggatggggcgggcacgggtgagattggcaggggagagggagagggagagagcggtgcgagacgaacccgtcatcagcgg

SEQ ID NO: 1444 - DNA, 632 bp, Zea mays
gacagaggctggcctcttcgcctatcaccccgaaggcccgaaacaagattagattagagatagcaaaaggcgaagcgacggtaaccgccaccaccaaatcgctaccgccaatccgccatgatgctcccgacggccaccgcgacggccgtcttcctcaccgcggcgccttcctctttctccacccgccgtcggcgcagtcgcgccatcttcgcatccctttcgccgtccttctcctcctcggaggagccgctgctggtgcgcgcggcgcggggcgaggacggcctcccacgcccgcccgcgtggatgatgcggcaggcagggcggtacatggcggagtaccaggcgctggccaagcgccacccctcgttccgggagcgctccgagaacacggacctcatcgtcgagatcacgctgcagccgtggcgtgccttcgcgcccgacggcgtcatcctgttctcggacatactcacgcccctgccggccatcggggtgccgttcgatatctcggactccaaggggcccgtgatccaatcgccagtacggtccaaagagcaggtgagggagctcgtccccatcgaccttgatatgctccagttcgtcggggagtcactaaagattctgcgaaatgaggt

SEQ ID NO: 1445 - DNA, 471 bp, Zea mays
atgtcccccgcatccgccgcggatctcgccccccccccccccccccccgcggatctcgcgctagcccacaaccgcgtgccctcccacgcgcgatggaatgcccctcccaccacaaccgcgcagcaccatcctgggcacggcgccccgcgcggggcctcgacgaagaggggctcggcggaggctgcggaggggagcggcgagaaggagatgagcagcgcaggggaggaggagaaggagagcgacgcggagatgaggagcgacgagagcaggaccgatagcagcggcgccgcccaccgccggtcgcccccgccctcgccctcgcccatcggccatgtcgtcgccgacggcctgcgagtcgagcagcgcggcgggcggccccgccctggccgcggcgaaggccgcctcggcgtccctggcgcggtgcgcggcggcgtcctcgggggagttgagcttggtgcggcggcgtcatag

SEQ ID NO: 1446 - DNA, 1640 bp, Zea mays
cttcaccacccccaaccccaaacgcccccagctcccaccgccggcccaccacccccactccaccgcagccaaagcggactcgcgcgactgtgcctcccgcccacacacgcacgcacgtcgcacgggcgtgtgggcatgcagatcctacgcctgctcgcggcgcggcgtttccgccgccgccgccgccgcccggtgtccacgatcactgcgacggcgaccgcgccagtcacccctcgcggcggtgccgccggaggctgcatgtacgggtacggcgaggaggaggatgagggcccgttcttcgacctggacctgacctgctgctccgcgcccgcgtccagcgcgggcagccaggcggccgagtcgggctccgagtccgaggacacctcgtcctgcggcgccgccgccgacggcggcgccgccgcgcgcagcgacctggacttcgtcatatcgctgcaccgtagccgcccgtcgtcgccctcgtacgaggagcgcctcttctgccgcggcgccgcgccggcgcggcccccgccgctcatgttctgcgcgtccgagccgagcgacgccgcgtcgcgctcgcgcgcccgcgacagcagcggcggcggccggctgcggctccggacgctcagcttcgggtccgccaaggctgccttctccggcgggcgcgccagcttctcccggagcaccagcggcgcgcgctcggcgaggctcttcgccgcgtacgaccaggacctgccggacgagggaagggcgctcaggccgccctccggcgacgtcatccgccgctacctgagcaagatctcgagccggctgcggcgcgtgggcgtgggcgttggcgtgtctcatcccgctgccgctacggacctccggctgaggaagagccgctcggcctccgccgcgcaggcgtcctcgacggcccagtcgccgccgccccgacgcgacgactcgctagccgagaagcaggacggcatcgccagcgccatcgcgcactgcaaggagtccctccaccgagcgtccgtgtcggaggcggtggacacgtcgctggcgcgatcgcggagcgacccagggccgtaatctgtaaagcttcgtcgtggacgaggacgctgggttttctcatccggcgccacgccatgctcgccactccgctccgggacggcggcggcggccgaagcttcgcgctgaatctcctcgcgaaggacgcgacgaaaagacgacgaacttgccgccgcaagtacgggttgctaaaggctcgtgacgaacatgcagcgggcggagcgcctttagcccgccgtaggcttgtttatgtgtgcgaaggagctcttttcgtggttttaggcgtgggaaaagagctccttttaggatcctttagccactaccttccctccctccccccatgtacaagcgtggatctgtgtcgcttcattaccttttcttcttttttttttcccgttcagttttctctctttttttcggttcgacgctttgtacgagagacttgcaacaggacgtgtaattagtacgtactagtagctaggtgctcatccttatgcaaacttaacatgttgggttcgttgtgtcaaccttgcggtgcatgattttaaaatttttttccacaccaactcaacgctttcaattcgtcgccg

SEQ ID NO: 1447 - DNA, 1998 bp, Zea mays
atggagattatgcaccgtggttggaattatgcacttgctggtggtagaaatctcttcagcaatagcactatagcagaacgcgacctgtcaaattcatctctccaaggattcttggcaccagagatcgggtccttgagatctttgcagactctcgtgttggatcgcaacacattcatgggctcaataccaaaaggcatcggcatgctacagaacctgatcgagctgaacctcagctccaaccagctcgcggggcctattcccagtgagatcggtgacatggcgaagatcacaaaaatagaccttcacgcgaatcggctggacggcactatccctcctgagcttggcaagctgggaagcctccttgagctacggctgagcaacaactgccttacaggcattgttcctgcaagtaatgattccgacgtggaatccgccagcacctctgatcaaactggattgtgtcagctatctcagctaaccaatattgatctctcgtataacttcttggttggagatgttcccgcatgcttacagcaaatccaaagatcaagcttggtagggaattgcttccagaacaacacatcaaaccgcccacttcaacaatgtgaaactaatcaggacagaggcaaagacaatgatgctgatgagaatgtgcagaaaggcctgccagagccactttggcttctcattctggaagtcatcgcagcagtttcattgctttgcttcttaacactttgtaccatgactggcctccgaaggtgcagagccagatcctctgggtctgagaccagtgttccatggacaagagctgtaagctggaaggagaacaccgtaatctcaatcgatgatgacctcctggtaaatgtgccaaagataagccggcaggagctggcagaggcttgcgaggacttcagcaacataattggatcgtctcaggagacagttgtgtacaagggaactctgaaggatggccgggaaatcgctgttgtgtcgctgtctgttccggtgcattactggaatgactatgtcgaacttcactttcacaaggaggtgatagaaatgtccagaccgagtcacgaaaatgtcgcaaagatggtgggatactgcaaggagtctgatccattttcgagaatgctagtctttcagtacccaccaaatgggacactctacgagcatctgcacgatggagatgggtggcagctatcttggcctagacggatgaaattagcactcgccatctcgagggctctcagatacttgcacactgagctgcaacctccgtttgcagttgctgcactgacgtctagttcagtctacctaactgaagacttctccccaaagataatcgatttcgagaggtggagatatcttgcgaccaaaccaggatttggctcactaaatggcgggtcagtcaacagcgttacagattctcggcataagcgcttcatggacgtccaggccaacacttacgcgtttggcgtgatcctgctggagctggtcagtggcagagcctcggtttccaaagatacaggaggcttggtggattgggcaagaaagcacctggagcatcccgaggagttcggcaagctggtggacccgaggctgcagagcgtgaaccaggagagcctgggcatcgtctgcaacgtggtgaacctgtgcatcgacctggagccgtcgcggcggccctccatgagcatgatcgcggccatcctggaggaaggcatcgaagcgtcggcggccaccttgctcaggaattcgtctctggcctgggccgaagccgagctggccatctcctagaacctagataccctctttgcatgttttgctgcacttgctagactgtatgtttggacagtgacgatggtttaacccgttgttactccgtttggcattgttatttctctcccttttttggagagagaaatggctcacagatctgaattcaaaatgactcaagttttgatttcatcagcgcgaggagatgcatttttatctttt

SEQ ID NO: 1448 - DNA, 3387 bp, Zea mays
ccgcgaccccaggtcagtcgggactacccgctgagtttaagcatataaataagcggaggagaagaaacttacgaggattcccctagtaacggcgagcgaaccgggagcagcccagcttgagaatcgggcggcctcgccgcccgaattgtagtctggagaggcgtcctcagcgacggaccgggcccaagttctctggaaagggacgcctgggagggtgagagccccgtccggcccggaccctgtcgcaccacgaggcgccgtcaacgagtcgggttgtttgggaatgcagcccaaatcgggcggtaaactccgtccaaggctaaatacaggcgagagaccgatagcgaacaagtaccgcgagggaaagatgaaaaggactttgaaaagagagtcaaagagtgcttgaaattgccgggagggaagcggatgggggctggcgacgcgcaccggccgtatgcggaacggctcctgctggtccgccgatcggctcggggcgtggaccgttgtcgcccgcgccggcggccaaagcccgggggccctaggcgcccccggcagccgtcgtcggcgcggacggtatccgcgcgcctctggcgcgcccctcggggcgctgcgccgcaacggcctgcgagctccccatccgacccgtcttgaaacacggaccaaggagtctgacatgcgtgcgagtcgacgggttcagaaacctgagatgcgcaaggaagctgacgagcgggaggccctcacgggccgcaccgctggccgaccctgatcttctgtgaagggttcgagttggagcacgcctgtcgggacccgaaagatggtgaactatgcctgagcggggcgaagccagaggaaactctggtggaggctcgaagcgatactgacgtgcaaatcgttcgtctgacttgggtataggggcgaaagactaatcgaaccatctagtagctggttccctccgaagtttccctcaggatagctggagcccacacgagttctatcgggtaaagccaatgattagaggcatcgggggcgcaacgccctcgacctattctcaaactttaaataggtaggacggcgcggctgcttcggtgagccgtgccacggaatcgggagctccaagtgggccatttttggtaagcagaactggcgatgcgggatgaaccggaagccgggttacggtgccaaactgcgcgctaacctagaacccacaaagggtgttggtcgattaagacagcaggacggtggtcatggaagtcgaaatccgctaaggagtgtgtaacaactcacctgccgaatcaactagccccgaaaatggatggcgctgaagcgcgcgacccacacccggccatctgggcgagcgacatgccccgatgagtaggagggcgcggcggccgccgcaaaacccggggcgcgagcccgggcggagcggccgtcggtgcagatcttggtggtagtagcaaatattcaaatgagaactttgaaggccgaagaggagaaaggttccatgtgaacggcacttgcacatgggtaagccgatcctaagggacgggggaaacccggcagatagcgcgatcacgcgcgtcacccgaaagggaatcgggttaagatttcccgagccgggacgtggcggcagacggcgacgttaggaagtccggagacgccggcgggggcctcgggaagagttatcttttctgcttaacggcccgccaaccctggaatcggttcagccggaggtagggtccagcggccggaagagcaccgcacatcgcgcggtgtccggtgcgcccccggcggcccttgaaaatccggaggaccgaattccgtccacgcccggtcgtactcataaccgcatcaggtctccaaggtgaacagcctctggccaatggaacaatgtaggcaagggaagtcggcaaaacggatccgtaacttcgggaaaaggattggctctgagggttgggctcgggggtcccggccccgaacccgtcggctgctggcggaatgctcgagctgctcgcgcggcgagagcgggccgccgcgtgccggccgggggacggaccgggaacggccccctcgggggccttccccggggcgtcgaacaaccgactcagaactggtacggacaaggggaatccgactgtttaattaaaacaaagcattgcgacggtcctcgaggatgctgacgcaatgtgatttctgcccagtgctctgaatgtcaaagtgaagaaattcaaccaagcgcgggtaaacggcgggagtaactatgactctcttaaggtagccaaatgcctcgtcatctaattagtgacgcgcatgaatggattaacgagattcccactgtccctgtctactatccagcgaaaccacagccaagggaacgggcttggcggaatcagcggggaaagaagaccctgttgagcttgactctagtccgactttgtgaaatgacttgagaggtgtaggataagtgggagcctccgggcgcaagtgaaataccactacttttaacgttattttacttattccgtgggtcggaagcggggcaccgcccctccttttggctccaaggcccggcctcgccgggccgatccgggcggaagacattgtcaggtggggagtttggctggggcggcacatctgttaaaagataacgcaggtgtcctaagatgagctcaacgagaacagaaatctcgtgtggaacaaaagggtaaaagctcgtttgattctgatttccagtacgaatacgaaccgtgaaagcgtggcctatcgatcctttagaccttcggagtttgaagctagaggtgtcagaaaagttaccacagggataactggcttgtggcagccaagcgttcatagcgacgttgctttttgatccttcgatgtcggctcttcctatcattgtgaagcagaattcaccaagtgttggattgttcacccaccaatagggaacgtgagctgggtttagaccgtcgtgagacaggttagttttaccctactgatgaccgcgccgcgatagtaattcaacctagtacgagaggaaccgttgattcacacaattggtcatcgcgcttggttgaaaagccagtggcgcgaagctaccgtgtgccggattatgactgaacgcctctaagtcagaatccaagctagcaaccggcgcctctgctcgccgcccgccccgacccacgttagggcgttcgcgccccaagggcccgtgccattggctcagcccgcccggccgacgcgccgcggcgggccgcctcgaagctcccttcccaacgggcggcgtgctgaatcctttgcagacgacttaaaacgcgacggggcattgtaagtggcagagtggccttgctgccacgatccactgagatccagccccgcgtcgcacggattcgt

SEQ ID NO: 1449 - DNA, 455 bp, Zea mays
ttgttaaaaaatatgtttatccgtacccctaggtgaaggccattttttgtgatgttcatttgtctgataatatttgggatgatcaatgcttctaagatctaattagggtccccttgcccaatggtgtgcgtgcctccgatgctcacaaggtttggagcagtgacttttcaaattcctatggtgtggtgcttcattctacacttggcttttgtatcttaatatatcttattataatatattgactccatagcaacacactgacatacacataacacacatcattgtaaaagtttggaacatgtttgaataattatcttattttaaaaagtatgtatatatgatatatagaaaccatagcaacacatgtgcaattaactaggcgtgcacatctgcgatactatggatatcatattaagactcaaaagtatgagtgcacacccacgataccgtgcccc

SEQ ID NO: 1450 - DNA, 1841 bp, Zea mays
ccgtttagattggtctccggatgcatttcctgtatggacgattagttgggatcgtagctcagcaactgcttccttcttccgttgcccgcaatggattcagcgaggagctggttcaccaagctccaaacgagggagaaatccattggcaagaagaaggaattgcctcccaatggcaaggagcccggcgacgatgcgccgtcgagcgcaaccaagcagagggttgcggcggccaagcagtacatcgagaaacactacaaggagcagatgaagcatctgcaggacaggaaagaaagacggtgtagtctagaaaagaaactagcggacgctgatgtgtccgaagaggaggtcaacaacatcctgaagcagttcgagaagaaagagacggagtacatgcggttgcaaaggcacaaaatgagcgtcgaggatttcgagctgctaacaatgatagggaagggagcttttggcgaggtcagagtctgcagagagaagaccacaggaaacgtgtatgcgatgaagaagcttaaaaagtcagaaatgcttcgtcgaggtcaggttgagcatgtgagagccgaacggaaccttcttgccgaggtggaccaccactgcatcgtcaagctgtactgctcgttccaggacagcgagtacctgtacctgatcatggagtacctcccaggaggcgacatgatgacgctgctcatgaggaaagacacgctgacggaagacgaggccaggttctacgtcggcgagacggttcttgcgatcgaatcgatccacaggcacaactacatccatagagacatcaagcctgacaacctgctactggacaagcacgggcacctgaggctgtcggatttcgggctgtgcaaaccgctggactactccaacttcccggacctgaacgagaaggacgtgacgccgcctacgaagtcgtcggcgatgcatggggacgggaagcagcagtcgatgccgaagcgctcgcagcaagaacagctggagcactggcagaagaacagaagaaccctggcttactcgaccgtcggaacaccagactacatcgctccagaagttcttctgaagaaaggctacgggatggaatgtgactggtggtcccttggttctatcatgtatgagatgctagtgggttatcctccattctattctgacgagcctatgactacttgccgaaagatcgtgaattggagaacacacctgaaatttcccgaagaagcgaggctaacggcagacgccaaagatcttataagcaagctgctctgcaacgtcgaccagcgcctcgggacaaagggcgcagaagagataaaggagcacccctggttcagtggactagaatggggaaagctatatgagatagaagccgcgtacctgcctcaggtcacagacgagttggacacccagaactttgagaagtttgaggagtcctcggacggtagtagcgttcagggttcagcaaaggcgggcccttggagaaagatgctttcttcaaaggacctgaactttgtgggctatacctacaagaactttgaacttgtgaacgatcacgatgtccccggcatggctgagctgaagaagaaggagaaggcaaagagaccaagcgtcaagtctctgttcggcgcagattcacctgaaggagacggagggagaggggagccgcagcctgaagtcgacgacgaaacagcctccgcggaaggaagcgcccggaaaccagcagagcctgaactgaccagaagcctcagctcgccatccacgtgaaacaaatgtgtgcgtcatgttgtatgtactctttgttaattgattcacgagctaatagcgatcgtaccgtgctg

SEQ ID NO: 1451 - DNA, 2961 bp, Zea mays
gcaatatgtgtggctaaaatgtgagcagtataatattactacaggtgttggtgtgcactaacattcactccacacacctctgactactaaaaagggttcacatcacaggtagtagcaagcaagagggatccagtccagccaggcacctgctgctgcacgttgctcccaaatcgcaatcgttgcagagggcgtacatctcgccaaaccctgcagcagcaagcaagcgcaggatgcgagccggcggctgcgcggtgcagcaggcgctggccgcggaggcggcggccgtggtgcggcaggccgtggccctggcccggcggcgcggccacgcgcaggtgaccccgctccacgtggccagcgccatgctctcggcggcggggctcctccgcgccgcctgcctccgctcccactcccacccgctgcagtgcaaggccctggagctctgtttcaacgtggcgcttaaccgcctccccaccgccgccgcctctatgttccacccccatcaccacgccgggcagcagcacgcgcccgtgctgtccaacgcgctcgtcgccgcgttcaagcgcgcgcaggcgcaccagcgccggggctccgtggatggagcacagggacaaccgccacagccggtgctcgccggcaaggtcgacatcgaccagctcatcatctccatcctcgacgaccccagcgtgagccgcgtcatgcgcgaggccggcttctccagctcccaggtcaaggccaacgtcgagaaggccgtctcggcgtcgtcttcaccggagcatcagcagcagaacacgacgataccacccaccagccgcgcccacgcggcgatctctccaggcggagcagcttccggcgacgccatgcgcgtgctcgactgcatggcgagcggaagcaagcggagcgtggtggtcgttggcgagagcgcggccaccgcggaggtggtggtgaaggcggtgatgaacagggtgagcaaaggggagctgcagcagcggcacgagcggctcaagaacgtccagttcgtgcccctctcggccgcgtccttccagcggatgccgagggaggaggtggaggccaaggccgccgacctgcgcgcgctcgtccgccagggctgcgccgccgggaagggcgtcgtgctcgtcctcgaggacctcgcgtacgccgccgaggcctgggccgccgtgtcagagacgagaaggaggagcagcggcagtggcggccgtgatcacggccagggctgctactgccccgtcgagcacgccgtcatggaagtgggcagcttggtgtccgctgctgccggaggcggcggcagaggcctggacaggttctggttgctagggtttgggaacaaccaggcttatttgaagtccagagcagggcagccatctcttgaggctgtctgggagctgcaccccatcgtcgtgccggacggcggcctcgcgctgagcctcaggtgcaacagtgacgccgaacaagctagagcaacaaggccttggcccttcgctaacggcactgcagcaaccggcgacagtgagctcatcactttgtcctgcgccaaggtggcggcgacaactccaaatgtgccgccatggcttcagggctaccaagttcaagatacgaccagactggcgagccgcagcaccagttttcagatgcaagattgggaccccaactctaatggagcagcttaccacacgtcggagatcacactgagcttctccccacaggctactaactctccagacgcttcttcaatctccggctcctttgcccccagcttgatgatgagctccgaaccatggcaattcaagctgatgcaaccgtgcccaaactatggacgtggcgatccatttgccaggtcctctgatcgtcaacaactgcttccaaggccgactagtccagaaaaatcttactccgtgtccaactcatccgaaggtgcccctgcagccgagtcgccaaaattcacggagctcaccgctgagaatctcaagatcctctccaacgcgcttgagaaccgagctccacgtcacaaggatgtggttacagagatcgcaagtgtcgtgctccagtgccgctcgggcatgacaagaaagaggaggagatggtgctgccaagagaagccaagtgcagtgacatggctgctcttccaaggagcgggcaatgatggcaagaaagccgtgtctaaggagctcgcaaggctcgtcttcggttcctacagcaagttcaccgccatctcactatccgagttcacccacgtccactccgattccagctccggcgagatcacgttgaagaggcaaagatcactggacactgggcgtagctacgttcagagattgtatgatgcaatactcgaaaaccctcatcgggtgataatgatcgacggtgttgagcaactggactacgagtcagagatcggcatcaggaatgcgatcacaaatggaagaattaggggttgcaacggcgacgagatcagtctgggggataccatcatagtactgaattgtgaagcactccgttcaatgtctaacgcttcctcccctcggctcaagcaaagggtcatcgagaaggatggaaaggaaggaaatgacatgaacatggagaatgggatggagtcatctggttttaccttggatttgaatgcatgtgccgaggattgtgaagggaactatgaagagagtgtttcagataatgcgaggatcgttaatattgtggatggcgtgttcttcttccaattaatggagcactcatgacattgtattattgcttcatttgcatcttcaagttagcctagaattcttagttattagttgtttttctttgtatttgtcctttatttgtcctagatctgtagctgatccttatatttattggtaatttgtgttatgtatagttaattatatgtgatcagcaacaaacttatttgtggaaatcaggagttagggaagaaagggacggtgttcattg

SEQ ID NO: 1452 - DNA, 1229 bp, Zea mays
ccagttcgttgttcctatccattaggaggctgttcttcccttctagttttcactgcaaccacttcaatcaccacaacagtcaagaaatacagaatgtgaattaagtacagtttcagcagcggtacagcaaagaagccatatggagctagaaaatgtggaagtaaagaccaaggctctgaagttataggtccaaacaagttgaacattgactaagagattaggtgcatggagaattgcacttgtacaagacttggtcggagtactatatacacagcgcaaaattgaccaggatgttcacccttcaaaattagcacaaaaaatccagatgaaaacagtgtatcaacaatagggtatgcaattgaaccaatcatagggctaacgcaaaataacatactgcaaaagacgaaggaaatggtccgaatgcacccccaatctctcccaaaaaggggaggaagggatagaaattatcaacagatgcaattcaacttccatctcaagagcaattgcgccccgctgcaaacgattcgtgcgaaaagccccaggttccgccactaaaatgccaccgatctcccacgaaaaaaaacacagcagacgacgaaacccacagagagtaaccgcgttccgaacatgagaaacaagcgaacagggcggcgaatcagcagcgagactgcgagagggaagcgaacgaaaccaagcccgtcaccggagcacgactcctctgccgccctttggttcggggggattcgagaattttcgtggggtagcagcgagggcaaggaagcgaagcgagcgggaggaaggaatgataccagacgtgtaggtggcgatcgagaaagcggtcgaaatttccaaggggaacggcgcgtggagcagtcagaaaaaactctattgcataataataggaggattcgaggctctcagtcgttaaaaagaaaattattgcatagaattaggaggacgctctcttaggcgctgggacaacgacgagcccaaccagacctaccatcccatccgaggagccgtggattcgcgaggaaatgtcacatccgttggaacgcgaagacgtgcgaggaagaggagcggggaggggggctgccgagtgagaagtcagcacctgcggactcgaagatgcagctaccgtcgccggtctatgccgagagggcgagggaggcggcgctggcgccgtcggcgaggaggagccgcacccgcacgtcaaggggagagggagg

SEQ ID NO: 1453 - DNA, 2415 bp, Zea mays
aaaagcccacagaacgagtgaggccaggcgacttcatactgctcgcctcgccgtctttcccccaatctgttgctcctccaagctgcgggcgatcgccgtaccccggccgccgcagggaaccccctcgccatggccttgcaggggaagaagctcatcaacaaccccgacgatgtggtgacggagttcatcgaagggttggtggagacttacccgggtctgcagtacctcgacgggttccctcagattaaggtcgttcttcgtgctgatgtcgagcgcggttcctatgacaaagttgcagtcatctcgggtggtggaagtggccatgaaccttcccatgctggatttgttgggccagggatgttgacagctgctgtttctggagatgttttcgcctctccacctgttgattctattttagctgctattcgagctgtaactggtcccatggggtgccttctaatagtaaagaactacactggtgatagactcaattttggattagctgctgagcaggcaaaatctgaaggctataagatggagatggtcattgttggagacgattgtgcccttcctccacctagagggatagctggtagaagaggtttagctggaacaattcttgtgcataaggttgctggggccgcagcagatgctggtttatctcttgcagaggttgccgcagaagcaaaacatgcatctgaggttgttggtacgatgggagttgcactttctgtttgcacattgcctgggcaaataacttctgatcgtctaggtccaaggcaaatggagcttggccttggaattcatggagaacctggagttgctgttgttgaactccagccagttgacgtagtggtagaacatgtccttaaacagatattgtcacaggaaactcagtatcttcctgtcacaagaggttgcaatgctgttctcctagtgaatggattaggagccactcctatcatggaacttatgattgcagcgagaaaagcagttcctgagttgcaattggtgtatggcattgctgttgacagagtctacactggcacacttatgacatcacttgatatggcaggattatctattaccattatgaagtccggcgaaagcattttgaagagacttgatgctcccactaaagctccagcttggcctgttggttctgaaggaaaccgtccaccagcaaagtttcctgttcctctaccaccatcaccttcaatgaaggatgacgagattcttgctccatctcaggagctgagcaagcaagggtgtatcctggaggctgttattgaagcaagtgctactgaaattatcaatctcatggatagcctaaatgaatgggacagtaaagtgggcgatggtgactgtggaagcacaatgtatagaggtgcaacagctattcttgaagatatgaaaaagcgtgcattttttctctattccagttaccctatgaatgatgcagcgggaacaataaatgaaattggggcaacaatccgaagggtgatgggtggaacaagtggaatcttgtatgccatactctgcaaggctgcgtatgcaagcttaaagcagagctcaactgtcactgcgaataaatgggctgatgctttagaggcctccattgctgctgttagcaaatatggtggtgccagcgcaggataccgcacaatgttggatgccctaattcctgcttctgctgttctgaaacagagacttgaggctggggatgatcccgtgactgctttcatcgcgtcttctgaagcagcatcagctggcgctgaatccaccaaacaaatgcaagcgaaggctggacggtcatcatacatcgctccagatctcctggcctcaatccctgatcctggtgcaatggctgcagctgcatggtacagagctgctgcccttgcagtgaagaacaaagtgcacggttcaaagagctagtagcatacgcaatgcttcattgctagacccaaaatagactgacaggaaaaatcactggggcattttctcactccccttagatttggtttccgcttgtgcttttgcatgggccgagaaaaaaaatgacttccatattgtctcacccttctcacatcatacaaagagatgttcaaagagttcgtcgtccgtacaagttaagggaagctatgcttttgcactgccgtgatatctcagcatgctgtcagtgttggaatgaccattgtttaatttgcccgagtttcgttttaatggctgagcccatgctgtcagtggtgggaatgatcgttgtttattctgcccgagtcccgtttcaattgtgcgcatttcggtaggatgtttaacaaaaaaacgttgtctttgaccgaggggtagtttgcactactgttgacttgtaatgttttttatcttgatcaatggcttgctgcatggtttctttctttc

SEQ ID NO: 1454 - DNA, 1943 bp, Zea mays
ttgtttccaggagtaggaactctgtactgctacacggcacggcccctccctgctccctcgggtcaaaactcaaaagccttcattttgatcacggccagccggtcagatcgcccggctcgatcgatcgcagccatggtgctctccaaggccgtctccgagagtgacatgtccgtgcactccacgttcgcgtcgcgctacgtccgctcgtctctcccaaggtaccgcatgccggagaactccatccccaaggaggcggcgtaccagatcatcaacgacgagctcatgctcgacgggaacccgcgcctcaacctggcgtccttcgtcaccacctggatggagcccgagtgcgacaagctcatcatggccgccatcaacaagaactacgtcgacatggacgagtaccccgtcaccaccgagctccagaaccggtgcgtgaacatgatcgcgcatctcttcaacgcgccgttgggcgagtccgagacggcggtgggcgtcggcacggtgggctcgtcggaggccatcatgcttgccgggctggccttcaagcgcaggtggcagaacaagcgcagggccgagggcaagccgttcgacaagcccaacattgtcaccggcgccaacgtccaggtttgctgggagaagttcgcgaggtacttcgaggtggagctcagggaggtgaagctgcgcgacggctactacgtgatggaccccgagaaggcggtggagatggtggacgagaacaccatctgcgtcgccgcgatcctgggctccacgctcaacggcgagttcgaggacgtgaagctgctcaacgacctgctccaagccaagaacagggagacccggtgggagacgcccatccacgtggacgcggcgagcggcggcttcatcgcgcccttcctgtacccggacctggagtgggacttccgcctgccgctggtcaagagcatcaacgtcagcggccacaagtacggcctcgtctacgccggcatcggctggtgcatctggcgcagcaaggaggacctgccggaggaactcatcttccacatcaactacctcggcgccgaccagcccacgttcacgctcaacttctccaagggctccagccaagtcatcgcgcagtactaccagctcatccgccacggcttcgaggggtacaggaacatcatggagaactgccacgagaacgccatggtgctcaaggagggcctggagaagacgggccgcttcgacatcgtgtccaaggacgaaggcgtcccgctggtggccttctccctcaaggaccgcagccggcacgacgagttcgagatctcggacatgctgcgccgcttcggctggatcgtgccggcatacaccatgccccccgacgcgcagcacgtcacggtgctccgcgtcgtcatccgggaggagttcagccgcaccctcgccgagcgcctcgttctcgacatcgagaaggtgatgtaccagctggacgcgctcccgtccaggctcccgccccctcccccggcggcgccgctgctcaggaaaaagacggagctggagacgcagaggtcggtcacggaggcgtggaagaagtttgtgctcgccaagaagaccaacggcgtctgctagtgacgcttccaccgctacacacaacactaccatggtcaacgggccttcttccgtgctgatttgagtgagcaccgcgatatctaggtagtctaatatgcttcgtgtctttccgtaatttgtgcatgcagttgctatgcaccgagtgagttgctatatatgttcgatagcaacagtttttttctccccaatgcaaggaagagagtaatagttgaggctggtgtcgattattgttatccatgcccatgcgcgtgcagttattacctccattctaaactgtaatctattttaatttcttcagagagtcaaagcacctcaagatttattaaaactataagaat

SEQ ID NO: 1455 - DNA, 2670 bp, Zea mays
ctcaaacacacacaaaagaaaaaaatgccagcacaaataaaatactcccatctggatattcctgctctcccttcttctccagtccacccactatagcttggactagatctcaaattctcccacagtttcccactccccgtctcccactctcccccaccccccgcacccgccgtcttcccctccctcccccgtcagatactcagatcttccccatatctctgtgttgcatcactcgccgcaatccactcccaatcctaaacccgaaagctctcagctccgcctccctgttcgttcgtccgccttttgactcccccctagctagcagctgttgcggagcaaccccgcaattccaagaaaagcaactggtcaagaaagagtggaagaaaggaggatggtggtgatgatggcgttaagtcaccccatgattcgccccatcattccgtcgcctccagggcctgcgtgctgctaaaagggtctcgccgtccgtcgtggtggtggtgtgcgtgggcggggggagtcgtcgctgcgccgccacaatgccgcagtaccaggagctgccctgcggcgggcaggtgctcgacatcgacacggcgctcaaggatggcatcctcgggggcgcgctggagcccgaggatgccgcggcgggggacgccgggaagcagcctgtggagctgcgcaagatgatggacgagctggacgcggccggggacggcggcggcgacgaggcggtgccggcggtcttcatctgcccgatctccctcgagcccatggtggatccggtgacgctctgcacggggcagacgtacgagcgggccaacatctcgcggtggctcgccctgggccaccggacctgcccgaccacgatgcaggagctctgggatgacgcgctcacccccaacgccactctccgacagctcatcgccgcctggttctcccgccggtacacgaggtttaagaagcgctccgcggacttccacggccgcgccgccgatctcgtccacggcctccggggcacggcgatgcccaggagacaggccctcaagggccaggcccgcgtcgcggcgctgcgggagctgcgcgccctcgccaccgcccaccaatccgtcaccaaggccatcgccgaggccggcggcgtggtcctgctgacgtcgctgctcggccccttcacgtcccacgccgtggggaccgaggcggtcgccattcttgtcagcggggtgccgcttgacgctgacacgaaggccgcgctcatgcagccggcgaaggtgtcgctcgtggtcgacatgctcaacgagggcgcggcggacaccaagatcaactgtgtccgcctcatccgcatcctcatggatgagaggggtttccggccggagacggtggcgagcctgagcctcttggttggtgtcatgcgcctcatccgggacaagcggcatccagacggtgtggtcgcggggctcgagctgcttaattcgatctgtgcggtgcacaggccagcgaggagtatggttgttagcatcggtgcggtgccgcagctggtggaattgttgccggagctagcaacggagtgtgttgagccggccttggacatcttggatgccctgtctgcggttccagagggtaggacggctcttaaggattgtccgcggacgatacccaatgccgtccgcgtgctgatgagagtttcagaggcatgcactcgacgggcgctgtcgatgctgtggacggtgtgtcggatggcacctgaagagtgtgcacctgccgccgtcgaagctgggctggcggcaaagcttctacttgtcatccaaagtggctgtgcaccggagctgaagcagaaagcgtcggagctgcttaagctgtgccgcctcaactgcactgacaccctcttcatctccaagtgcaaactcacaaggacgattcagtgaggagatgcaagtggtgtgatttgattcgatgatgcgtggtttgtcgattgaccttgctgagttcagagttccaaggaaatggaatttgccaaattgacgaatggtaataatgagcatgtatagaaacctgcagatttagccctgtcatcttatccgaagagatcagggtggttgagcagatggcgagactggtggttaccataacaattccaggggagaaaagaagcaagcaatgcagcatgattactggcaagcaggcgggtgtacatgcaaattgatgtggatttgatcagctcaataaacacctgaggctgggtggtaagtacagccagttttgccattaggagtagctagcattaagcaaaaccagcaaattttagatttttggcaatgtgggtgtcccagggctgtagatgttgctccctcccttgtaattacacagtactgttgcttctacactggaatatacattgccattgcttcgagatttttttttttgaattgtcatctggatcgactactgccctagtcaaactgggaaagtgtgctctttccctgtagcccacgctaaaaagctcgatgctgcgttactcctgctaaagttgaggctctgtactgcttgagcagtgttctcatttctcaatgttgtttagctcctggagtttcagtatctgatttattagtgtaccaaattatctgattgcgtggggcttctgtttcagtattaccaccataactgcaatccgagcatctc

SEQ ID NO: 1456 - DNA, 1966 bp, Zea mays
cagcaagtgtcaaagcgtgggctcgcgtacgtacgtgcacgtgatgtgcgcgtgcatccgcgcgcttgtccgttgccggctccgctcctcctcaaatattctcgcctgccctcctcatttcctcctcaaccatttcattccttccttccttcccctcgctcgccttcctggcttcttcctccccagcacgcacacgcacacgcacacacccagccttttggctgccctgccggccgtcagagagagaaaccgagctctaactaactgaagtggcggccacatagctagctactcttctgatcctgagcgcgcacgcgccatggctcaggaggacgtgcacctggacgacgcaggcctcgcgctgggcctgtccctcggcagcggcagcggcggcgcctctggtgcggcgcgccacggtggtatcagccgccggctgagcagggaggtgcggctgccgtcgccgcacccgctggagccgtcgctgacgctgagcttgccggacgaagcgaccgcgaccgggtccggcgggggcggggccgcgcacagcgtgtcgtcgctgtcagtggcgggcgtgaagagggagcgcgtggatgacgccgagggagagcgggcgtcgtctacggccgcgttgccgcgggcctgcgccggcgccgaggacgacgacgacgacgggagcacgcggaagaagctgaggctgaccaaggagcagtccgcgctcctggaggaccgcttcaaggagcacagcaccctgaacccgaagcagaaagtcgcgttggcgaagcaactgaagctgaggccacggcaggtggaggtgtggttccaaaacaggcgagcaaggacgaagctgaagcagacggaggtggactgcgagctgctgaagcgctgctgcgagtcgctgacggaggagaaccggcggctgcagcgggagctgcaggagctccgcgcgctcaagttcgccccacacccacaggcgccgccgtcgtccgcgacgcaggccggcgcggcggcgggcgtcgttccggcgccgccgccgccgttgtacatgcagatgcagatgccggccgccgccacgctgagcctgtgcccgtcctgcgaccgcctggccgggcccggcgccgccgccaaggccgagcccaggcccaaggcagccgccacccaccacttcttcaaccccttcacccactccgccgcctgctgatgatgagggcagggcagcacgcagccacgcaacgcagcggcagtaaacagagcaccgccccgtgcagataataccacgtctgtacgtgtcacaagtaattaacaaacgtatggtcctcctctctatctattttcttgatccggagggctaagttagttgttttcgtgtcgatcccaaatgcatcagctaatccatcaatcataggcttgatagagtagtcgaaaaaaatagccgtagctttcctagcactccctccgccccccccccccccccccatccatgtatatttctgttgtaattctgtccctctctcgcggtctacttgctcccttttcgattggagtacgtagctcctttgcctttttgtttttggttttttgtttctgtttctgtttgagacaggttaatataatcgccgtcgtccgagggtgtagtgtcagggattgatatccctgtacaccgattattggattgagatgcttctagctagtcttcgtactgataagcgtgcgtgcgtacgtcagagcaccacagtgctggaatggatgatgacatgagagacaggtagagaagcccagctgcgtggctcttggacctttctgcaggtgtacgtggtgtgtacacacgcacacccttttttatagtacatatatacggctcaatgattgtgcgtgccggggctctcgactctccaaattgctgtcgcttttgctcgttttaattattgggagcgcgagcgcggcagcccgctcttgtcttgagcatgcc

SEQ ID NO: 1457 - DNA, 440 bp, Zea mays
tgtgtgtgtataatatacctagaatgatacattcatttccttaatgccaatacatacatattaacatatgctaatgcatggtgtgtgtgtagatttctgccgcaaacaacacaaatgcagaaccaaggctccgtatatcccttgcaatcataacaaaggcagaaaactgtcgacgaatttaaacgcgcacgcatctaatcctgcttccttaatcatcatcggcctggaagctacgtgagggcaccatcgtcgttacctatcgccaatcacatactctactattagagtagtactggatcgatcgtcggctgcataaaagcctgggatccaggccacgcgatgctgttggaaggtcagcctcgcagatgcccggctagctccaagccctgtgctttgattgcgaatagagatggccaaaacgggcggcccggcccggccct

SEQ ID NO: 1458 - DNA, 420 bp, Zea mays
atggcgcggacctcctctggtccgagctcgagcagtgaactctccgtggcgccttcccctgcaattttccccttcctcccctctacttctgtggcgctcagcactcctgccacaggtccggctgcagcaagcgctcttttttcccatggccgagcaggcgctcccaacagccgtgatgcctggtttctctccctagccactacgccgtcatgctccctctacccctgctttttttcaggacgccgagcaccctccccacaggtcgctttttccagctgcgccggacactgtgatttggccgcgtcgcgtccaggactcccatggctgcctccctggcgtacctcgcgcagcagtcgcgacgccagttcgcgcagccacgtgaatctcctttgcgtcacgccctcggcgtgctcgacataa

SEQ ID NO: 1459 - DNA, 1428 bp, Zea mays
ctgctctacttctccgttattctcgttcttattctctgtggagtgatcggagttgctaacaccctcacatggacgcgccccctgctcgtgatctccccaggaccgagcgcccctccccaactctcctacaccctcaagtcgagtgggctctctccatgggtgaagcttaggcgccgatgctctccttctctggttcgacatgtcagcttggtgccctctctcccatgcccgatcctgaggtccctgcctcgacctccacatcggcctccatggcgctcttctccctgggcacccagacgtgtgcgcccccttccctgctcttgccgcggcgagctccttccctccaagcaccagccctggacgccaggccgcaggccatagttcccgtgcacttgtccgcagccagaaaaactccccgtgggctctggaagtgcccagctcgcgccggagcgtggcgaggcttgactaacgcccagccatggtggctgtaggctgagcagacccctctgctccagccatggcgcggacctcctctggtccgagctcgagcagtgaactctccgtggcgccttcccctgcaatttttccccttcctcccctctacttctgtggcgctcagcactcctgccacaggtccggctgcagcaagcgctcttttttcccatggccgagcaggcgctcccaacagccgcgatgcctggtttctctccctagccactacgccgtcatgctccctctgcccctgctttttttcaggacgccgagcaccctccccacagatcgctttttccagctgcgccggacactctgtgatttggccgcgtcgcgtccaggacttccatggctgcctccctggcgtacctcgcgcagcagccgcgacgccagttcgcgcagccacgtgaatctcctttgcgtcacgccctcggcgtgctcgacataatgccgcagcaagcctgcagcagcagccccggatcccctccgcatcgagagcagccgcgtcgtcgatccgtgcaaccccgacgtctccgtgtcttgcttcgccgtcaatctgcgcagtccccgtcgcgatgccgtcgaaacccgcgccccttgtcattgtcgcgcttcgcgcgtcgtttctcgacagaaagccaaaccaacatgcacgcatgcacaacaccaatcggatttcggccaggttgttcgatttagaaaaattgtgttttttgttttatttacgattcaatcgatggcgtgaatatgtgtgtgaaaatataattgtatgaatgaacgcgtgtagagaagaaactgaagtagaaaagaactcggacatttttatattttgataggaaaattatgcgatgcgttgtttgatgtgaaaaactaagttacaaaatgtggattatgttttgggaaatgcatcgatatgtgtttatgtgaaaagtataa

SEQ ID NO: 1460 - DNA, 910 bp, Zea mays
acttcgtctgtattgtatttatatacgaagtaaataacagcattgacctcccctctcccctacctcccctactatataacaggcccctggaatccatggaagccccacaataaccaggagcgagctacctgcgaagccacatctctccttccacttcatcgatagtacgcatctccatattcagaggcacaagctaagccatgagcaacggtggtaaccgcagcaggggcggcgcgaggttcgagctgcagctgcacctgtcgccgccgccgccggctaggagggtggaggtggacggcggaggcgacggcagcgactcgtcgtcgtccccgagctcgtgcgtgtcgtcggacggcagcccagggagcaagtcgccgatggtgatcggcgcctgcacgcggtgcatgatgtactgcatggtggccaagaaggacttccccacctgcatcaactgcaagcagccctgcctcgtggacctcctccactgctctggcgccggcggcagcggcggcaaggccaagtgaaaggacggtcagcgtgtcgtaccgtaccccggccgtcggtccagttgatgctcatacggatggttagctcagaccttagcttgtgggctttgtgcgctcatctcgaggcgcggtgggggagtgaccgccgttggatcatccactggatggacatggcctacttggtttagtaataggctagtgtagtactccccctattagctagctgctgatgctattagcttatcttcgtttatgatgttgttgcttctttaaccgcggcatcggtatgtgatcgccggcgtggttcactgcctattattgttgctggcaatggtttttagctgtaacaatgctatgtttaaatggagaatgtcatctttcgatggttgtttctagaaacaaga

SEQ ID NO: 1461 - DNA, 2893 bp, Zea mays
tgttagagacgttcttttaataaaatgctgtctcttatatttttttattattctcttataatagtccttttaagatacaagacatttacgtacatgccctgataacgtgaagcgagcaagcctgggctgcagccgatgggctgtatcacgcagctgcagcccaaacagctgaccgattgccgcggacccgggaggccgggacgagagagacgagcgggagcagccagcacgacgcctgtccgtctcccactctccctccattcccctctctctccttctgcctgtgcccgcgtggccgcgtctgtacctgtacggccaccaccatttccatctccgatccccgcgaccccccacccagccccaggcgcccgggctagatccggcccacgcgtctactcgccccctccggctccccttctccctaatcgccgtcgccgggggtgcaggcacagcggctgcttccgctcccgctcccgaggggggaggcggcaggcaatggcgcggcgggtgcggccgtcgcacctggtgctggcgctggcggcagcctacctcctcctcatctccctcaagttccgccgcgtgctggacctggccgccaccgacctcgcggacgaccctgccgccgccgccgccgccgccttctcttctccgtcctccgccgaccacctgcccccgcccgggtccgcttccgccacctcctcctcctcctcgcccccgttcccggtccgccccttctggcaccgctacgaccgtgtgtccctccccgacctcgcgtcccgcaaccgctccgcgctcgaccgcatggccgacgacgcctgggcgctcggcctcaccgcctgggaggacgccgccgccttcgcaggggacccctgggcgctgctcgccgccgccacctcccgcgcctccgacgccgccaagtgcccctccgcggtctcccagcgcgcgcggggccgggtcgtcttcctcccctgcggcctcgccgcgggctcgtccatcaccgtcgtcggcacgccgcgcgcctcgcacagggagtacgtgccgcagctcgcgcggatgcgccagggggacggcaccgtcatggtgtcccagttcatggtcgagctccagggcctgcgcgccgtcgacggcgaggacccgcccaggatactccacctcaaccccaggctcaggggggattggagccagcaccctatcctcgagcacaacacctgctacaggatgcagtggggcgccgcgcagcgctgtgacggcacaccacccgacgacaatgacgacaaagtcgatggattccccaaatgtgagaagtggatacgcaatgacattgttgacaccaaggagtccaagacgacatcatggttgaagagattcatcgggcgtgcgaagaagcctgcaatgacatggccattcccctttgtagaggagaggctatttgttctgactatacaagctggagttgaaggtttccacatttatgttggtggtcgacatgtgacatcttttccttatcggccggggttcactcttgaagatgcaacagggttatttgtcaagggtgatgtagatatacattcagtttatgccactgcacttccttcgtcgcatcctagtttttctcttcaacaagtccttgagatgtcagaaaagtggaggtctcggccactaccaaaaggccccgtttcccttttcattggaatactgtctgcatcaaatcatttcgctgagcgcatggctgtgaggaaaacatggatgcaggctccagaaataaagtcttctgaagccgtggctcgattctttgttgcactgaattcaaggaaagaggtcaatgtaatgttgaagaaagaagcagaatactttggagacattgtcattttgccatttatagaccgctatgagctggttgttcttaagacaattgctatctgtgagtatggggtccagaacttgactgctgcaaacatcatgaaatgtgacgatgatacatttgtgagagtagatgtagttctgagacgcatcaagttgaacaatggtgacaaaccattatatatggggaaccttaacctcctgcacagaccattgaggactggaaaatgggcagttacagacgaggagtggcctgaggatatctacccgccatatgcaaacggaccaggctatgtgatttctggtgacatagcaaaattcatcgtgtcacagcatgccaatcagagtttaagactgtttaagatggaagatgtaagcatgggcctatgggtcgagaagttcaattcaacaaatcctgtccaatattcccacagctggaagttctgccagtacggttgcctggagaactactacacggcccactatcagtcacccaggcagatgctgtgcttgtgggataagttggttcgtggtcaggcatcctgctgtaactacagatagcagagtgaagctaaggattgctggacgctgtcctctcttcatcataccccagccaggtttaggtcggttggctggtattttctttttcgacacaatcgtagtgtagtaggtgttgttgctcctccgtcgctggctcaaatatgagctaaatgcatgggtgtgcggtaggagattgaagatttaggaagccccaaccagttggttattgttttttacacgatctgtattggtccaattgtggcgttggcgtccttgttcttgtaattgatccaattttgatgtagtaggccagattagagggaatattccagatcagatgtacgtctccgttcttttcttatagtaataactagacacaatttgccctgatctttgcaggatcctgctgctgaagatcttcagcattcctttgttttagtcactttgtgttgactttagttttagtaatcttgtggcaggactgaaatacaga

SEQ ID NO: 1462 - DNA, 1500 bp, Zea mays
aagagctaagagggaagaacaatcgagctactaataaggtcgtatacatatcttctatatactcctctgaaagttgtgaactccggtcgagcttaaaaacagcagcaatggcgaagctttggacattgctgctggctgcagtggtggtcctctcactcctagtgagccccattgcttgcacccgaaagctcaacaaacccaagccgaagccgggcagctacaggcggccggtcaagccgaagccaaaaccggtcacgggcagctacaagccggcgcctgtggccgccagaagaaaccacacagctacacccacgccatcgccgactgtctacggccccggtggctggctgtcaggcgccggcgccacgtactacggcgcgaccaacggcgacgggagcgacggcggcgcgtgcggctaccagacggccgtcggaaagaagccattcgactcgatgatcgccgccgggagcacgccactgtacaggggaggcgagggctgcggcgcctgctacgaggtgaaatgcacgaccaacgccgcgtgctccggccagcccgtgaccatcgtaatcaccgaccagtcccctggcgggctgttccccggcgaggtcgagcactttgacatgagcggcaccgccatgggcgccatggcccggcccggcatggccgacaagctccgcgctggcggcgtgctcaggatcctgtacaggagggtgccgtgcaagtacaccggcgtcaacatcgcgttcaaggtggatcagggcgcgaacccgtactacttcgacgtgctcatcgagttcgaggacgacgacggcgacctcagcgccgtggacctcatggaggccggcagcggcgtctggactcctatggcgcacaactggggcgccacgtggcgcctcaacaacggcaggaagctcaaagcgccgttcgggctccggctcacctccgactcccgcagggtgctcgtcgccaacaacgccatcccggccgcgtggaagcccggcaagacctaccgctccttggtcaactacccctgaaaagagaaataccgacaagtggatggcgtgtattgtgcgtccgggtgttgcgagtggcggcggtgtactactggtgtcggaaaacagaagagaatgaaagaggaggttgaagaagagaataatgtccttcttccctccctggacggtctctgcagtccccaaaagtgatgtgtgacggtgttagtcaaatcatgccggtaatttgatacttcatctcgatttgagttttactgctatactactgtgattgaggtaagacagaatcttatttcttgaccacgtagtacataaactacaaagcatgcccgttgcgttggtaattagactcttgtagtggtttttgccaatatcaagatgtatgtagaatgtgtgtgcatgcgttcacagtgatgagaatatacatgcgtgtatctgatcctctacatctccacttcgtaaaagaaacaactacatactatgtttatat

SEQ ID NO: 1463 - DNA, 1005 bp, Zea mays
tgagagacttgactaacttgttgacggcggcgatcgatgtgtgcgctcactctgggttgggccgggtgcagtgctgcatttttcgctaacgtccaatgcaaaaggaccacggcagggtgtccgattttccatgcatatcatccttaattagattagatttgtgctataaaaaatcctgtttttgttagccgccacacacatcataattaatagtgttaattactcttgtagctagctaggtagatcgagttttatttgctaactgctgctgctgctgcttgcactcttatggaagagagcaagaagggcgaactggactactggtgagtcgctgctgggttttcatgtgcagctagcgtcactcagctaaccctgtcatcgtctcaggcaagatgacatttttcacgggccatgcatgcatgtatacacgcgcgtgagtccacagaagtttgtggatacgcgcacagaaggtttacggtcaatttaattaatttgtgctagttacgcatatatataatatatatgtgtagtatgcatcgtcttattaaatgattcaatatgcaactattaattagctagctacctatgagcttgctcattttaatcttctctgttttggtcccttcccttccctttctctctcccggccatgcatatatcatcatcatcatcatcatatcatcatcatcatcatcattgacctgttctcttcacccgtaccaagcaaagccagacatggttaggccaagccaagcttctgatagatcattcatcatcatcatcagatgaacgattacgtactagtacgtccttatgatgacagacatattatcatttacttactgttcgtgaacgattcatgtaatagacgctatatatgaagtgatttggcttcctgcaaaaaaaaaaaaaaataattaatgtaccatacatatctatctcttgagtatcgcttggcatatgcagtattaattgattacgtgcgtaaaaaaaaaaaaaaaaaaa

SEQ ID NO: 1464 - DNA, 1307 bp, Zea mays
cccgggctttggaaatgggctcgcggtttcctcgtaccttcctccggcggccgcggtccagacgtccagtccagcacgcgggcgtctttccccgtcaatatatataataaccaaaccaagttcacccagttcatccggatatcagaaatttcgccgtagtaataacagtataacacacaccgccgagacagaagagagagcagcagggcccggtcgagggccgaggcgaccaaggacctccaccgtcgcggcgagcagcagcagaggacgaacgatgcttccgggcgtggagctcgcgcggcggcggcgcgtgcactaccacggcgacgtggcgtcggcggcgggcacgggggagcacgtccaccaccactacgcgcacgcgcccgcgcccgcggcggggcccgcgctcgcggcgcgcatccggctcgaggagaagctgcgcggcgccgcgctgccgtcgacggcgccgtccaggtggagcaggctgatgcgcgacgggagatcggcccgaggcaacaacagccctcgaagcagcaggcgatacgagcaggacgccgtcgcgagcggcaccgagccctggcggccgccggcccccgccgacccgacggcggccctgctgcaggtggcgtcggcgactgtgccggcgtcggcgtcgacgcggcgccggcgcgcggagctgacgcggacactgtccaaggtggacgtgtgcgcggtgtgcctggacgaggtccgggagcggtgccagcgggtgacccggctgccgtgctcccacaagtaccactccgagtgcgtcctgccgtggctcgccatccacccggactgcccctgctgccgcgcgctcgtgccgtccctcgacacgctcgtccaagtctagcggtgctcgtggtggttggcgatggcgtggcgcctgccgttggtctcgtctcttgctctgctcgcggcgggtgacggaaaatgtttggatgtttgttaggccgcagctggaactggaatgcatgtttaggacgtagtactagcatagaggaggacttgtatagatggcttggtagccagtagactactggactaggagacgagctctggaactctggtgctgtgtttgtattcaaaaccatgtgaattgcacgagttttggcaagcgatatttgcatttgcctacgcggaaaaagctttcacagttttttgggggttcacatgccattcctgctctcctgctcttccatcatttgttagtacttgtgaactacgagcaaatgtggtactccaggactactgtatctgtgtttcttttcaatctttgttccccg

SEQ ID NO: 1465 - DNA, 1353 bp, Zea mays
ggcgcgtgcaaaatttttaatccctcctccccccctagtgtctactactactctactagcgacggaacggaaactcggaaaggcaccccatgcgcgttggatggaggagccctggagagtggagatggtgtttataaatccgctcctcctgccaccccaaggtttcagaaacccaccaccgcaacacctgcgctccggcctgctctctctttcaaacagcttcgtgtgtcgttgcgccgcgcatagttccagcgccagctcggcactgaagaatctggtgaccggccgggatcgagagccaagctcgagcaggaacggagagcgcgcggatatatatagctatgatgatgatgatgatggacaggcagctcgtcaggcaatgcgacatggaggtcatgaggatggccatgctcaagcacgaagagaccttccggcagcaggttcacgagctgcaccgcctgtaccgcatacagagggagctgatgagcgacctaataacgacccgatacgacgacgagccgctgctgctgacgaccgccggccggcgcagcaagcagccgcgccgggcgctggacctgcagctgccagccgacgagtacatcgtcagcgccgacgaggagtcggacgccgccggcgcggagctggagctgacgctggccgtcggcgggcgctgcgcagccggcggcggccggcgcaagagcaacaggcgccggaggcaattagcagagcggcagcagcgcgacaacaacgacgccgccgccgccggcggcggctcctcgccgttcgggtccgactgctccggcgcgagcgccctgtcgtcgccgccgccttcgtcggccgagtactactccgacgacgggccggcggcggcggcgtgccagagggccgttgcgttcgaccttggaggagaaggcgacggcgtgatgaggcagcagcacgcgccgtggctggcgcagtgccagcagtacctcagcctgaggatgacatgagtgaagctgcaggcctgcagcgcgctgctcgccgccgtccatgtcgatgtccatgtcgctagctgtaccaggttgcgtttgtgttgtagcttgtaggagcagcagtacgtactagccactagtgttttttttatctatctattccttttttttttgccctttgtgtttgctatatgtcctagccgtggccaatggagtccgggaagaaggcctgcagttaatgagtgcatcctaatcctgattcctgatccaaagatgttaattgatcatggctatatagctaatgagttcatcctgattgattaatgatgctcatcagactagtgctaattcaatgagtaataatactgccgccatctgctca

SEQ ID NO: 1466 - DNA, 1095 bp, Zea mays
cttgtgactggggtggggtattgatactcattgcctgcctgcccgggctcggctcattgaacgctagctgctgctttgggcgctcgcttttcctcgagggctttctgaaaagttcgggtacgtgtgcccccacattctcttcggacaggcctttcggctatgtatagaggaggaacccctgtgctccgctgcccaattccaaccccagctttgactgccctcgcttggtgctcagttctttcctctgctcctccgcctcttctcgcacctcggcaccttcttcggcaactgcgagcgagatggaggcgcaagacgactgcaagtggcggcagatcccggcgttcggcgactggaacgtgtgggacggcgacatgcccgtcacccagtacttccaggcaggggccttcttcttcgcggcgccggcggagaagggcgacgcggatctcttcaaggtgccccagttgcctgccaagccctacggctacaagaagtgcgttgttcgagtgaagggggagaaagaaaccgctgtgccgccggcggcgaggaagggacgcaggaggcgctgcgtgagcgagcagcacaagtggaagcccaagggagctgtggacgaggacctgtacaagatctccccgcagcttctctgcaaggtgaagaagaagaagctgctgaggaatttgcttggagggtgcctcggcttgggctgcatcgcctgatagtgagagatgcagagcttaataagtttcttgaaagttcgcttgcttggtgctctggagagagttgtatagttgtctacgctaatatgagattaatggaaacttactactgcttctgcactcgtttgaatgtaacactagcttgcattccatctttcctacggttgcttcagtgcctgactaagggctgtttgattctgaaaatgtataaattcagccttattgtctttcacaggtacgaattggaccttcattaactaatgtgttcagcaagacttgttagcccaagttgaatggttcaggcaagcttgtctgtaaccaagggcacccctgtctgtaaacccctattcaagctagtcatcaatgtacgacaactttcctg

SEQ ID NO: 1467 - DNA, 1552 bp, Zea mays
gccatttctgccgcgcccgctgctcgctccccctgcttcctctttctccccctcctcgactcctcgtcaagctcccctgaatcgcggcagcagcaccggggcagcaaggcgaggattttcctgctccgaatctacccggctcggcccgatgggctcgctgatgtcctgcctctccgacccaatcccgtcggggaacaggtccccgccgccgcagccgaagcggcgctcgtccacctcttcccgcggccgtggcggcggcgggagggactccgctaaggcctccgtgtccatagacgaggaggcgcttactgcagcagcggcgctcgtgctggggcagaggggcgcgtccggtggcctgggcgcgttcgagcggtccgcgtcggtgcggtacgcggccaagcggcagagccagggcccgccgctgccccgaagttgcagcacgcggccgaggtcgctcgctgaccccgagctccagccacagcaactcctagccaaggatttgaatactaaggatttggaaaccaacgtcattgttcttgttcatggtggtggattcggcgcttggtgttggtacaagactatatcacttctcgaagatagtgggttcaaagttaacgccattgacttaacaggctcagggattcaccattacgacacaaacaagattagcagtctttcagagtatgctgaaccacttacgtcttaccttaaaggcttaggcgatgctgaaaaggtaattttggtcgctcatgatcttggcggtgcctgtgtatcctacgcaatggagatgttcccatccagagttgccaaggcggttttcctttgtgcagcgatgctggcaaacgggaacagtgccctcgacatgttccaaaagcagatggacacgaacggtactctccaaaaggcgcaggaatttgtctactccaacggcaaggaccggcctcccaccgccatcaacatcgacagggcatcgcttagggacctgttgttcaaccagagcccttccaaggacgtgtcgctggcctcggtgtccatgaggcccatccccttcgcccctgtgctggagaagcttgtgctcacggccgagaactacggctcggtgcggcggttctacgtggagaccacggaggacaacacgattcctctgcccctccagcagagcatgtgtggtgccaacccaccggagaaggtgctgcggctgaagggggcagaccacgcgcccttcttctccaagccgcaggcgctgcacaagacgctggtcgagatcgccaccatgccgcatgtccgggcttcgtgagaacgtgtttgttcagcttcaggtttttgccggccggtgagcttacatggctgttgtacatgctgaggatgatggtatggcttgtggcggtgtggcagcgacagcgagtaggggatctagaatttcggcgtcgccttgacgaaggcatacccctccattatacactcacatctggcatcactttttttagaaaaaaaaaacaaaatcttattccagcctctatggctctagagttttagaatcaaccatttcatt

SEQ ID NO: 1468 - DNA, 3812 bp, Zea mays
caagcccactcttttttctcctctccacttcgttacgcggacagtgggaggagccacagccattataatagcacgccatacgccaaaagctccactggagccgagcagctactcctcccagtcccaggctcactgtcgctcctcccaagaacccgcccaaagaatcctagaaatccaagaaagggagcaaccaaaacaggaggaggtctgcaggaggaggagcaggtcagcaggaggaggtggtgctgaaggggaagatctcacaagtgtgtgaagaccacacagtctcgcgcactcgcaaacccagtgcgcgctgcggtcttcctcttcgcccaccttcttggagcggggaggttggccatgaggaggtggtggccggctgccctgctgggctgcgcagtggcggtgtccgttctggtggccgccgtggaatgcgctgtgacttacgacaagaaggcggtgctgattgatgggcagaggcggattctcttctccggatccatacactaccccaggagcacccctgatatgtgggaagggctgattcagaaagctaaagacggaggcttggatgtcattcagacctatgtcttttggaacggacatgagcctacgcctggaaattactatttcgaggagaggtacgatttagtcaggttcataaagacggtccagaaggctggcctgtttgtacatctccgcatcggtccctacatttgtggcgagtggaacttcggcggcttcccagtttggttgaagtatgtaccgggcatcagcttcaggacagacaacgaacctttcaagacggccatgcagggtttcactgagaaaattgtgggaatgatgaagagcgaaaacctctttgcatcccaaggtggcccaattatcctctctcagattgagaatgagtatgggccagaaggcagggagtttggtgccgcaggtcaggcatatatcaactgggcagcaaagatggcagtcggattgggtactggtgtgccgtgggtgatgtgcaaggaggaggatgcacctgatccagtgatcaatgcatgcaatggtttctactgtgatgcattttctcctaacaaaccttacaagcccacaatgtggactgaagcttggagtggctggttcacggaatttggtgggaccatccgccaacgaccggttgaagatcttgcatttgctgttgctagatttgtacaaaagggtggttcttttatcaattactacatgtatcatggaggaacaaattttgggcgcactgctgggggtcccttcatcacaacaagctatgattatgatgctccaattgatgaatatggacttgttagagaaccaaagcacagtcatcttaaagaactccacagagctgttaagttatgcgagcaggctttggtttctgttgacccagcaattactacccttggtaccatgcaagaggcccgcgtcttccaatctccatctggttgtgcagctttccttgcaaactacaattctaactcctatgcgaaagttgtgttcaacaatgagcaatacagcctaccaccttggtcgattagcatccttcctgattgcaaaaatgttgtttttaacagtgccacagttggtgttcagacatctcagatgcaaatgtggggagatggtgcctcatcaatgacgtgggagaggtatgatgaggaggttgattctctggcagctgctccattgctcaccacaactggtttgcttgagcagcttaatgtcacgagagacagcagtgattatttgtggtacatcaccagtgttgacataagctcatctgaaaactttctacaaggtggcggcaagcctctgtctctcagtgtgcagtctgctggtcatgccttgcatgtctttgtcaatggacaacttcaaggttctgcttatggtaccagggaagatcgaagaatcaaatataatggcaatgctagccttcgagctggtactaacaaaattgcactgctgagtgttgcctgtggattgccgaatgttggagtgcattatgagacgtggaacactggtgttggtggtcctgttgtgcttcatgggctggatgaaggttcacgagaccttacttggcagacttggtcctatcaggttggcctgaaaggcgaacagatgaatctgaactccatagaaggctcaagctcagttgaatggatgcaagggtcattgatagctcaaaaccagcagccattggcctggtatagggcttactttgagactcccagcggggacgagccattggctttggatatgggtagcatgggcaagggccaaatctggataaatggacaaagcattggacgctactggacagcatatgcagatggggactgcaaagaatgcagttacacgggaaccttccgggcacccaaatgtcaatcaggctgtggtcagcccacgcaacgatggtatcatgtgccaaagtcctggctgcagcccaccagaaacctgctggtagtcttcgaggaacttggtggggattcatcgaagatcgccctagtgaagaggtcagtctcaagtgtctgtgctgatgtatctgaggatcacccaaacatcaagaactggcagatcgaaagctacggcgagcgcgagtaccacagggcccaaagtgcacttaagatgtgcacgtgggcagtccatttccgcaatcaaattcgcaagctttgggacacctacgggaacctgtggagatttccagcaaggagattgccactcagctaactctcacacagtcctagagaagaaatgcattgggctccaaagatgcgtcgtcgccatctcccccgagagctttggaggagacccctgcccgagcgtgacgaaaagggtggcggtccaggcagtatgttctcccgtcgcgtagccttacttctccaagcaatggatttggaaggcggtcgacaaaaaaaaaaaaataaaaaatggtcgaaaccagtgcagggtgagtggaactgtaagtatcgtcgactttgattattagatgtggctggcttgagaggttagcagcattcgttgtcggattccagattaggatttgtagtctgctgcatctccatgaattgttcaaagcggccggctggataatgttgtagctggtccaggaatgcagctgtagagagagagagagagagagagagagagagagagagagagagagagagagagagagagagagagagagagagagagagagagagagagagagagagagagaggagtggaggcagaagagtgactgattatgcattcttttgctgtggtgttagtagctgtgtacccgtgacacatgtcgtctttcttggaacggagaaagatgcaggtgaagtgtgcattgtgcccttttgttctactgctactgctagtggtaaggcaggagccttgcaattgtggggggagaacagtgccttctttttctgaaggaaaatcccgtgtggaattgcttggaattagtcttggctcgtgataacaacatactagtagtatgggtgcggtggccgtggggaattggtgaagggaaacaaaagcctgagccctgaggaattgatttccacgctgatttgtatgtatatataaagaaacgtgtggtggcatattgatgcagtcggcattggatgcgcttcctgctgccgagccatcattctcgcagaaatctgtgtcaggcaggacaggaccagcgctggagatgtttccctctgccaatccaaccggacctataattatcgaaggaactgtggctgtgagaaccgtagggccaagcatgtgttactccgtgaagagactggact

SEQ ID NO: 1469 - DNA, 1468 bp, Zea mays
aaccaccgctggcctgtagtgccgtccgtgcctgttgcctgccaacgcgcgtcgcggccggaatcatcgccaacctgccggtcggtacgttacaattacttacgtactgtaccctactactacacgcgcctcgcaaaaagtcgccctcttcctccactcgccgacacacacggcgcaaatccccacaaccccaagcgggcgggcggacttccacccaccttctcgcgcggcgacgtgctcggctcgcttccagccacctcgctcgccgcccgcctcggaatccccgccgcgagatcttgttccccggaggatggaggtgaaaacagtaaaagttagcaatctttcattaaatgctttgaaaagagagatcacagagttcttcagtttctcgggagatatagaatatgttgaaatgcaaagtgaatctgaatggtcacagcttgcttatgtcacatttaaagactcacagggagcagacactgctgttcttctctcgggggcaacaattgtggatcgtgctgtcattataactcctgctgagaactatcagctgcctcctgaagcacacaaacaattatcgggagcaaacgtctctactgaatcagcagtgaggaaggcagaagatgttgtgagcagcatgctggccaagggcttcgtcctcagcaaagacgcactcaacttggcgagatcatttgacgagcgtcacaacatcctatccaacgccactgccactgttgcatccctagaccgccagtatggcctgagcgaaaagatcagtctcggaagggccattgtcggcagcaaggtcaaggaggtggacgagcggtaccaggtctcagaactcaccaagtccgccttggctgccgccgagcagaaagccagcgtcgcgggctccgctatactgagcaaccagtatgtctcggctggtgcctcgtggctaacaagcgcgttcgatatggtaacgaaggcagcgggcgacatgacctcgatggccaaagataaggtggagagggccgaggaggagaggaaagccatcatgtgggaggagaggagtgggctggtcagcgagtacgcgaagatccatcttgacgagccctcttcgtgggagcccgcggttctgcctctggaatcagtggacgagcagaagctccaagctgtctgacacgcacagaccgagtgtctcgcacgaaattcttttgcagctcgtcctatatatagattgttctttttcgttgatgcactggattaaaacaagtgcgcttgtcggccagtgccgtgtaaatttctgagagttggtcttgtgttattaccaggttttgttcgtttcttttgttttggagagagtggtgctaccagcattactacactagactactctgtgtgaacggaatactactgtactttgtctcttctactactactacagaaacagaatacaacttccttcgttagattcagattaatacaa

SEQ ID NO: 1470 - DNA, 2715 bp, Zea mays
aaaaacacccactccatatgtctcctaggcgggcggctagacaaaaacacccacttgtgttggctattcattggctcgcgctcggcagtcggcacgacggtacttggacttggctattcccaacgccaccccgcaaccgcaacgtctctctagcgtctagcctctgcctgcgctcccacaccagaacaccacaccgctccgcgtgcgtcgcccgcactcctcgcctctgcccgtctgcctaccgtgccgtgccgtgccgtgctccccacccgatgcagccgccgacgcgggccgtgccgagccacagccggagatgagctccaggaaccgttccgccgccgcctcgtccgctgccccggctctccggacaccgcgccgcctgaagcggcggccagttaaggcgtcggcgccggggccgggcagcgggcggcggagcgggcccgcgacgccgctgctgaaatgggacgtcggtggcggcggcgggcgcggtgaggggaggaaggctggcgccgacgaagcgggggacgccgcgcgggcgcgggagaccaaggcgaaggcgacggaggtgtcggtgcggaggctcgcggccggggtttggcggctgcgcccgccggaggccgtggccggcggcgggagcggggtccgcgtgggcgtcgagcatatcccaaggcatctacaagtccagcttctgaagcagaacacttcaggtcatcaccagagttcgaagaatgaggtttcaagccccatatctgttttggagcggaagagtggagagctccacaagggacaacttcatgctacttctgctatgctgcctgtcgctaccatggagaaggcaacgaaatgggagcctggggacataaagggaatggaatcgcatgatgcgtatctgatagccagccagctgaatcttcttgatgaacacagagacaccgcgtatgttgctgacctccagatggagcttcagcaagcacgtgataggataagtgcgatggaaactgagcgacggtcagctaagaagaggcttgaccacttgttcaagaaacttgcggaggagaaagcggcttggaggaacagagagcatgaaaaggtgcgtgctatcctcgaagatatgaaggcagaccttgaccacgagaagaaaaaccggaggcggctggagatgattaacatgaaactcgtcaacgagctgaaggaggccaagatgtcagcaaaacagctgttacaagagtatgagacagagaggaaagcacgtgagctcactgaggaggtgtgcaacgagctagcaagagaggtggatgaagacaaagctgagatcgaggccctgaaacgggactcccagaggttgcgagaggaggtagacgaggagcggaagatgctgcagatggcggaggtgtggcgtgaagaacgggtgcagatgaagcttgttgatgcaaaacttactctcgacgcaaaatacacacagctgagcaaactgcaacaggatgttgaggcgtttattgctgcatgcagtactgctaatggagacgtcacggtagtagagcaagcagagagcataatacaggcaatcaagtcagtcagagcccaagatgctgagttcaggtacgagccaccggccgcatcagaagacatattttccatttttgaagagctgcgtccaagtgaggagcctgtcatcaaggagatcgagccatgttacaagaatagctctgccaaatgtgaaccagaaattcaagaggttagcccaatgaccgatatattcctcgaaaagaaagccaaggcaaactcgaacaaaagccctaaagatgaaagcgacactgaagatggcagcagctgggagacaataagccacgaagatgtccagggttcaagcggttcacctgatggaagcgagccttcggtcagcaacaaggtctgcgacggaagcattccttggaagagcagaaatggattcgagcgtatggagagtgagaagctgaaggatgagtcagctgatgcctgcctgacaaacatgaaccagcccaagaagaaagaatcggccatttcaaagctctggaagtcgtcccgcccaaagaacagcgagatatgcaagaaagacgcagttgaaacggtaaatgcaagatcgtcaaacgtgcggctctcagtcgggacctattccactgttgaaagtggcatccaagaaatagggctcagtccaccgtgtgttgagcagtggagctcaccagactcgatgaacgtccaattcaaccggggattcaagggctgtatagagtacccgcggatgtcccagaagcacagcttgaaggcgaagctcatggaggcacggttggagagccataaggtccagctccgccaggtgctcaagcagaagatctagtgcaggccagaaccagaaggcgaaacattgtaaacctagcattcaatccaaggaataatgtaaaggagtacctagatgcttcgtttttcatgttttagagtaacctgtattgcatgtacaacaaggactagaaaaaaaaaggacagggctggtctttgaggtctatctggagcctttttctgcttctgtatctcactttagctttggtgttattgtttgatctgataggctatggtgagatccatcatgatgtataatacagacataaacaagtagcaacgttgagacaaattgcatacctttgtatgcagtttccctatgtttttctgtatcatttccag

SEQ ID NO: 1471 - DNA, 1111 bp, Zea mays
atcatcgcagctccgcttcgtctcttctgctcaccacccgactccgtacgtgcgtcttggatccatcaccaccgtaccatggcgataccggtagcacgcgtccacctcgccgtggcacacgcagcactcccggcgctcgtcccgaccccgcccaagtgcgagatgctgccgctgctcccgacgccgtgcgtcgccgttgtcctcccgaagccgctcgccaagcccagccgcgccgactccgacgagaggtgggacgcgcgcaagaccatgaccggcttggccgccagcacagatcagtcctcaacatcgtcaagccctcgttccaccgccggcagcgtctggagcagcgcccgacgacgcggatctgcctcccgcaagatcgcgacaacgccgcctaagcccggccgcgccgactccgacgagaggtgggacgtgcgcaagacaatgaccggcttggccgccagcacagatcagtcctcagcatcgtcaacgtcaagccctcgttccaccgccgacagcgtctggagcagcgcccaacgacgcggatcctcctgcaaaagcgcgacagcgctgccccccaagcccggccgagctgactccgctgtgcgatgggacgcgcacaagaagacggcaatcccagcttcgtcgtcgtcgtcgtcgtcttcaggcacgtcttcccacgtaagcagcggcaagtggacgatgagccgcgcgtcgtcgtctgcagagcgctgggacgtgcacaagaaatatcgcccgccgcaggccgccgtggcgctggacgacggcgagagcagtactgcttccagcaacgacattgacacggataaggaggagattgtatggaagccacgggccatctacgctgaaccgtgcttcatctccgccgcgccagcacccagcatgcttcccatgccgacagcgttcttgcttcgcgttgcatagcgctgcactgctgcacctagtccatggatcggctcagaactcaaggtcgctggtttctttagctaccgaagcaagtgcgattttgtacacgtaggggctactgcgactactgtttatggatcatgcacaagtactttacgcggcttatggttaaatgttttctata

SEQ ID NO: 1472 - DNA, 522 bp, Zea mays
atggcgataccggtagcacgcgtccacctcgccgtggcacacgcagcactcccggcgctcgtcccgaccccgcccaagtgcgagatgctgccgctgctcccgacgccgtgcgtcgccgttgtcctcccgaagccgctcgccaagcccagccgcgccgactccgacgagaggtgggacgcgcgcaagaccatgaccggcttggccgccagcacagatcagtcctcaacatcgtcaagccctcgttccaccgccggcagcgtctggagcagcgcccgacgacgcggatctgcctcccgcaagatcgcgacaacgccgcctaagcccggccgcgccgactccgacgagaggtgggacgtgcgcaagacaatgaccggcttggccgccagcacagatcagtcctcagcatcgtcaacgtcaagccctcgttccaccgccgacagcgtctggagcagcgcccaacgacgcggatcctcctgcaaaagcgcgacagcgccgcgcgccccccaagcccggccgagctga

SEQ ID NO: 1473 - DNA, 444 bp, Zea mays
atggagcgctccctgaccttcaccaccgtcgatggcgtggcacaatccgaggaaggcgacgacatggagaccgtccggatcttaatagaccgtgtccggatcttaatagaccgtgtccggagtttcattgatgtcgacttgcaagtcatgttagctcgtgcccgagcaggagaaggaccgcacgacggcgtccccccacgtccaacgcggcagtcaccgggctggagaagcgtgtcttccacccccacggtggaggcagagcgcgacggcaacagaggttgtgccatctgcttggatgattttgtggatggcgtggaggtcgccgtcgtgccgtgctccggcggccaccagttccaccccggctgcatcgcgagttggttggggcgaagtaacacgtgccccttatgccgccacgctctgtagatccaaggctcgtgaaaaggg

SEQ ID NO: 1474 - DNA, 3388 bp, Zea mays
ccgcgaccccaggtcagtcgggactacccgctgagtttaagcatataaataagcggaggagaagaaacttacgaggattcccctagtaacggcgagcgaaccgggagcagcccagcttgagaatcgggcggcctcgccgcccgaattgtagtctggagaggcgtcctcagcgacggaccgggcccaagttctctggaaagggacgcctgggagggtgagagccccgtccggcccggaccctgtcgcaccacgaggcgccgtcaacgagtcgggttgtttgggaatgcagcccaaatcgggcggtaaactccgtccaaggctaaatacaggcgagagaccgatagcgaacaagtaccgcgagggaaagatgaaaaaggactttgaaaagagagtcaaagagtgcttgaaatttgccgggagggaagcggatgggggctggcgacgcgcaccggccgtatgcggaacggctcctgctggtccgccgatcggctcggggcgtggaccgttgtcgcccgcgccggcggccaaagcccgggggccctaggcgcccccggcagccgtcgtcggcgcggacggtatccgcgcgcctctggcgcgcccctcggggcgctgcgctgcaacggcctgcgagctccccatccgacccgtcttgaaacacggaccaaggagtctgacatgcgtgcgagtcgacgggttcagaaacctgagatgcgcaaggaagctgacgagcgggaggccctcacgggccgcaccgctggccgaccctgatcttctgtgaagggttcgagttggagcacgcctgtcgggacccgaaagatggtgaactatgcctgagcggggcgaagccagaggaaactctggtggaggcttgaagcgatactgacgtgcaaatcgttcgtctgacttgggtataggggcgaaagactaatcgaaccatctagtagctggttccctccgaagtttccctcaggatagctggagcccacacgagttctatcgggtaaagccaatgattagaggcatcgggggcgcaacgccctcgacctattctcaaactttaaataggtaggacggcgcggctgcttcggtgagccgtgccacggaatcgggagctccaagtgggccatttttggtaagcagaactggcgatgcgggatgaaccggaagccgggttacggtgccaaactgcgcgctaacctagaacccacaaagggtgttggtcgattaagacagcaggacggtggtcatggaagtcgaaatccgctaaggagtgtgtaacaactcacctgccgaatcaactagccccgaaaatggatggcgctgaagcgcgcgacccacacccggccatctgggcgagcgacatgccccgatgagtaggagggcgcggcggccgccgcaaaacccggggcgcgagcccgggcggagcggccgtcggtgcagatcttggtggtagtagcaaatattcaaatgagaactttgaaggccgaagaggagaaaggttccatgtgaacggcacttgcacatgggtaagccgatcctaagggacgggggaaacccggcagatagcgcgatcacgcgcgtcacccgaaagggaatcgggttaagatttcccgagccgggacgtggcggcagacggcgacgttaggaagtccggagacgccggcgggggcctcgggaagagttatcttttctgcttaacggcccgccaaccctggaatcggttcagccggaggtagggtccagcggccggaagagcaccgcacatcgcgcggtgtccggtgcgcccccggcggcccttgaaaatccggaggaccgaattccgtccacgcccggtcgtactcataaccgcatcaggtctccaaggtgaacagcctctggccaatggaacaatgtaggcaagggaagtcggcaaaacggatccgtaacttcgggaaaaggattggctctgagggttgggctcgggggtcccggccccgaacccgtcggctgctggcggaatgctcgagctgctcgcgcggcgagagcgggccgccgcgtgccggccgggggacggaccgggaacggccccctcgggggccttccccgggcgtcgaacaaccgactcagaactggtacggacaaggggaatccgactgtttaattaaaacaaagcattgcgacggtcctcgaggatgctgacgcaatgtgatttctgcccagtgctctgaatgtcaaagtgaagaaattcaaccaagcgcgggtaaacggcgggagtaactatgactctcttaaggtagccaaatgcctcgtcatctaattagtgacgcgcatgaatggattaacgagattcccactgtccctgtctactatccagcgaaaccacagccaagggaacgggcttggcggaatcagcggggaaagaagaccctgttgagcttgactctagtccgactttgtgaaatgacttgagaggtgtaggataagtgggagcctccgggcgcaagtgaaataccactacttttaacgttattttacttattccgtgggtcggaagcggggcaccgcccctccttttggctccaaggcccggcctcgccgggccgatccgggcggaagacattgttaggtggggagtttggctggggcggcacatctgttaaaagataacgcaggtgtcctaagatgagctcaacgagaacagaaatctcgtgtggaacaaaagggtaaaagctcgtttgattctgatttccagtacgaatacgaaccgtgaaagcgtggcctatcgatcctttagaccttcggagtttgaagctagaggtgtcagaaaagttaccacagggataactggcttgtggcagccaagcgttcatagcgacgttgctttttgatccttcgatgtcggctcttcctatcattgtgaagcagaattcaccaagtgttggattgttcacccaccaatagggaacgtgagctgggtttagaccgtcgtgagacaggttagttttaccctactgatgaccgcgccgcgatagtaattcaacctagtacgagaggaaccgttgattcacacaattggtcatcgcgcttggttgaaaagccagtggcgcgaagctaccgtgtgccggattatgactgaacgcctctaagtcagaatccaagctagcaaccggcgcctctgctcgccgcccgccccgacccacgttagggcgttcgcgccccaagggcccgtgccattggctcagcccgcccggccgacgcgccgcggcgggccgcctcgaagctcccttcccaacgggcggcgtgctgaatcctttgcagacgacttaaaacgcgacggggcattgtaagtggcagagtggccttgctgccacgatccactgagatccagccccgcgtcgcacggattcgt

SEQ ID NO: 1475 - DNA, 1813 bp, Zea mays
tacctggttgatcctgccagtagtcatatgcttgtctcaaagattaagccatgcatgtgcaagtatgaactaattcgaactgtgaaactgcgaatggctcattaaatcagttatagtttgtttgatggtacgtgctactcggataaccgtagtaattctagagctaatacgtgcaacaaaccccgacttccgggaggggcgcatttattagataaaaggctgacgcgggctctgcccgccgatccgatgattcatgataacttgacggatcgcacggccttcgtgccggcgacgcatcattcaaatttctgccctatcaactttcgatggtaggataggggcctaccatggtggtgacgggtgacggagaattagggttcgattccggagagggagcctgagaaacggctaccacatccaaggaaggcagcaggcgcgcaaattacccaatcctgacacggggaggtagtgacaataaataacaataccgggcgcgttagtgtctggtaattggaatgagtacaatctaaatcccttaacgaggatccattggagggcaagtctggtgccagcagccgcggtaattccagctccaatagcgtatatttaagttgttgcagttaaaaagctcgtagttggaccttgggccgggccggccggtccgcctcacggcgagaaccgaccggctcgacccttctgccggcgatgcgctcctggccttaactggccgggtcgtgcctccggcgccgttactttgaagaaattagagtgctcaaagcaagccatcgctctggatacattagcatgggataacatcataggattccggtcctattgtgttggccttcgggatcggagtaatgattaatagggacagtcgggggcattcgtatttcatagtcagaggtgaaattcttggatttatgaaagacgaacaactgcgaaagcatttgccaaggatgttttcattaatcaagaacgaaagttgggggctcgaagacgatcagataccgtcctagtctcaaccataaacgatgccgaccagggatcagcgggtgttactaataggaccccgctggcaccttatgagaaatcaaagtctttgggttccggggggagtatggtcgcaagggctgaaacttaaaggaattgacggaagggcaccacccaggcgtggagcctgcggcttaatttgactcaacacggggaaacttaccaggtccagacatagcaaggattgacagactgagagctctttcttgattctatgggtggtggtgcatggccgttcttagttggtggagcgatttgtctggttaattccgttaacgaacgagacctcagcctgctaactagctatgcggagccatccctccgtagttagcttcttagagggactatggccgtttaggccacggaagtttgaggcaataacaggtctgtgatgcccttagatgttctgggccgcacgcgcgctacactgatgtatccaacgagtatatagccttggccgacaggcccgggtaatcttgggaaatttcatcgtgatggggatagatcattgcaattgttggtcttcaacgaggaatgcctagtaagcgcgagtcatcagctcgcgttgactacgtccctgccctttgtacacaccgcccgtcgctcctaccgattgaatggtccggtgaagtgttcggatcgcggcgacgggggcggttcgccgcccccgacgtcgcgagaagtccattgaaccttatcatttagaggaaggagaagtcgtaacaaggtttccgtaggtgaacctgcggaaggatcattg

SEQ ID NO: 1476 - DNA, 3391 bp, Zea mays
ccgcgaccccaggtcagtcgggactacccgctgagtttaagcatataaataagcggaggagaagaaacttacgaggattcccctagtaacggcgagcgaaccgggagcagcccagcttgagaatcgggcggcctcgccgcccgaattgtagtctggagaggcgtcctcagcgacggaccgggcccaagttctctggaaagggacgcctgggagggtgagagccccgtccggcccggaccctgtcgcaccacgaggcgccgtcaacgagtcgggttgtttgggaatgcagcccaaatcgggcggtaaactccgtccaaggctaaatacaggcgagagaccgatagcgaacaagtaccgcgagggaaagatgaaaaggactttgaaaagagagtcaaagagtgcttgaaattgccgggagggaagcggatgggggctggcgacgcgcaccggccgtatgcggaacggctcctgctggtccgccgatcggctcggggcgtggaccgttgtcgcccgcgccggcggccaaagcccgggggccctaggcgcccccggcagccgtcgtcggcgcggacggtatccgcgcgcctctggcgcgcccctcgggggcgctgcgctgcaacggcctgcgagctccccatccgacccgtcttgaaacacggaccaaggagtctgacatgcgtgcgagtcgacgggttcagaaacctgagatgcgcaaggaagctgacgagcgggaggccctcacgggccgcaccgctggccgaccctgatcttctgtgaagggttcgagttggagcacgcctgtcgggacccgaaaagatggtgaactatgcctgagcggggcgaagccagaggaaactctggtggaggctcgaagcgatactgacgtgcaaatcgttcgtctgacttgggtataggggcgaaagactaatcgaaccatctagtagctggttccctccgaagtttccctcaggatagctggagcccacacgagttctatcgggtaaagccaatgattagaggcatcgggggcgcaacgccctcgacctattctcaaactttaaataggtaggacggcgcggctgcttcggtgagccgtgccacggaatcgggagctccaagtgggccatttttggtaagcagaactggcgatgcgggatgaaccggaagccgggttacggtgccaaactgcgcgctaacctagaacccacaaagggtgttggtcgattaagacagcaggacggtggtcatggaagtcgaaatccgctaaggagtgtgtaacaactcacctgccgaatcaactagccccgaaaatggatggcgctgaagcgcgcgacccacacccggccatctgggcgagcgacatgccccgatgagtaggagggcgcggcggccgccgcaaaacccggggcgcgagcccgggcggagcggccgtcggtgcagatcttggtggtagtagcaaatattcaaatgagaactttgaaggccgaagaggagaaaggttccatgtgaacggcacttgcacatgggtaagccgatcctaagggacgggggaaacccggcagatagcgcgatcacgcgcgtcacccgaaagggaatcgggttaagatttcccgagccgggacgtggcggcagacggcgacgttaggaagtccggagacgccggcgggggcctcgggaagagttatcttttctgcttaacggcccgccaaccctggaatcggttcagccggaggtagggtccagcggccggaagagcaccgcacatcgcgcggtgtccggtgcgcccccggcggcccttgaaaatccggaggaccgaattccgtccacgcccggtcgtactcataaccgcatcaggtctccaaggtgaacagcctctggccaatggaacaatgtaggcaagggaagtcggcaaaacggatccgtaacttcgggaaaaggattggctctgagggttgggctcgggggtcccggccccgaacccgtcggctgctggcggaatgctcgagctgctcgcgcggcgagagcgggccgccgcgtgccggccgggggacggaccgggaacggccccctttggggggccttccccgggcgtcgaacaaccgactcagaactggtacggacaagggggaatccgactgtttaattaaaacaaagcattgcgacggtcctcgaggatgctgacgcaatgtgatttctgcccagtgctctgaatgtcaaagtgaagaaattcaaccaagcgcgggtaaacggcgggagtaactatgactctcttaaggtagccaaatgcctcgtcatctaattagtgacgcgcatgaatggattaacgagattcccactgtccctgtctactatccagcgaaaccacagccaagggaacgggcttggcggaatcagcggggaaagaagaccctgttgagcttgactctagtccgactttgtgaaatgacttgagaggtgtaggataagtgggagcctccgggcgcaagtgaaataccactacttttaacgttattttacttattccgtgggtcggaagcggggcaccgcccctccttttggctccaaggcccggcctcgccgggccgatccgggcggaagacattgtcaggtggggagtttggctggggcggcacatctgttaaaagataacgcaggtgtcctaagatgagctcaacgagaacagaaatctcgtgtggaacaaaagggtaaaagctcgtttgattctgatttccagtacgaatacgaaccgtgaaagcgtggcctatcgatcctttagaccttcggagtttgaagctagaggtgtcagaaaagttaccacagggataactggcttgtggcagccaagcgttcatagcgacgttgctttttgatccttcgatgtcggctcttcctatcattgtgaagcagaattcaccaagtgttggattgttcacccaccaatagggaacgtgagctgggtttagaccgtcgtgagacaggttagttttaccctactgatgaccgcgccgcgatagtaattcaacctagtacgagaggaaccgttgattcacacaattggtcatcgcgcttggttgaaaagccagtggcgcgaagctaccgtgtgccggattatgactgaacgcctctaagtcagaatccaagctagcaaccggcgcctctgctcgccgcccgccccgacccacgttagggcgttcgcgccccaagggcccgtgccattggctcagcccgcccggccgacgcgccgcggcgggccgcctcgaagctcccttcccaacgggcggcgtgctgaatcctttgcagacgacttaaaacgcgacggggcattgtaagtggcagagtggccttgctgccacgatccactgagatccagccccgcgtcgcacggattcgt

SEQ ID NO: 1477 - DNA, 3390 bp, Zea mays
ccgcgaccccaggtcagtcgggactacccgctgagtttaagcatatatataagcggaggagaagaaacttacgaggattcccctagtaacggcgagcgaaccgggagcagcccagcttgagaatcgggcggcctcgccgcccgaattgtagtctggagaggcgtcctcagcgacggaccgggcccaagttctctggaaagggacgcctgggagggtgagagccccgtccggcccggaccctgtcgcaccacgaggcgccgtcaacgagtcgggttgtttgggaatgcagcccaaatcgggcggtaaactccgtccaaggctaaatacaggcgagagaccgatagcgaacaagtaccgcgagggaaagatgaaaaggactttgaaaagagagtcaaagagtgcttgaaattgccgggagggaagcggatgggggctggcgacgcgcaccggccgtatgcggaacggctcctgctggtccgccgatcggctcggggcgtggaccgttgtcgcccgcgccggcggccaaagcccgggggccctaggcgcccccggcagccgtcgtcggcgcggacggtatccgcgcgcctctggcgcgcccctcggggcgctgcgctgcaacggcctgcgagctccccatccgacccgtcttgaaacacggaccaaggagtctgacatgcgtgcgagtcgacgggttcagaaacctgagatgcgcaaggaagctgacgagcgggaggccctcacgggccgcaccgctggccgaccctgatcttctgtgaagggttcgagttggagcacgcctgtcgggacccgaaagatggtgaactatgcctgagcggggcgaagccagaggaaactctggtggaggctcgaagcgatactgacgtgcaaatcgttcgtctgacttgggtataggggcgaaagactaatcgaaccatctagtagctggttccctccgaagtttccctcaggatagctggagcccacacgagttctatcgggtaaagccaatgattagaggcatcgggggcgcaacgccctcgacctattctcaaactttaaataggtaggacggcgcggctgcttcggtgagccgtgccacggaatcgggagctccaagtgggccatttttggtaagcagaactggcgatgcgggatgaaccggaagccgggttacggtgccaaactgcgcgctaacctagaacccacaaagggtgttggtcgattaagacagcaggacggtggtcatggaagtcgaaatccgctaaggagtgtgtaacaactcacctgccgaatcaactagccccgaaaatggatggcgctgaagcgcgcgacccacacccggccatctgggcgagcgacatgccccgatgagtaggagggcgcggcggccgccgcaaaacccggggcgcgagcccgggcggagcggccgtcggtgcagatcttggtggtagtagcaaatattcaaatgagaactttgaaggccgaagaggagaaaggttccatgtgaacggcacttgcacatgggtaagccgatcctaagggacgggggaaacccggcagatagcgcgatcacgcgcgtcacccgaaagggaatcgggttaagatttcccgagccgggacgtggcggcagacggcgacgttaggaagtccggagacgccggcgggggcctcgggaagagttatcttttctgcttaacggcccgccaaccctggaatcggttcagccggaggtagggtccagcggccggaagagcaccgcacatcgcgcggtgtccggtgcgcccccggcggcccttgaaaatccggaggaccgaattccgtccacgcccggtcgtactcataaccgcatcaggtctccaaggtgaacagcctctggccaatggaacaatgtaggcaagggaagtcggcaaaacggatccgtaacttcgggaaaaggattggctctgagggttgggctcgggggtcccggccccgaacccgtcggctgctggcggaatgctcgagctgctcgcgcggcgagagcgggccgccgcgtgccggccgggggacggaccgggaacggccccctcgggggccttccccgggcgtcgaacaaccgactcagaactggtacggacaaggggaatccgactgtttaattaaaacaaagcattgcgacggtcctcgaggatgctgacgcaatgtgatttctgcccagtgctctgaatgtcaaagtgaagaaattcaaccaagcgcgggtaaacggcgggagtaactatgactctcttaaggtagccaaatgcctcgtcatctaattagtgacgcgcatgaatggattaacgagattcccactgtccctgtctactatccagcgaaaccacagccaagggaacgggcttggcggaatcagcggggaaagaagaccctgttgagcttgactctagtccgactttgtgaaatgacttgagaggtgtaggataagtgggagcctccgggcgcaagtgaaataccactacttttaacgttattttacttattccgtgggtcggaagcggggcaccgcccctccttttggctccaaggcccggcctcgccgggccgatccgggcggaagacattgtcaggtggggagtttggctggggcggcacatctgttaaaagataacgcaggtgtcctaagatgagctcaacgagaacagaaatctcgtgtggaacaaaagggtaaaagctcgtttgattctgatttccagtacgaatacgaaccgtgaaagcgtggcctatcgatcctttagaccttcggagtttgaagctagaggtgtcagaaaagttaccacagggataactggcttgtggcagccaagcgttcatagcgacgttgctttttgatccttcgatgtcggctcttcctatcattgtgaagcagaattcaccaagtgttggattgttcacccaccaatagggaacgtgagctgggtttagaccgtcgtgagacaggttagttttaccctactgatgaccgcgccgcgatagtaattcaacctagtacgagaggaaaccgttgattcacacaattggtcatcgcgcttggttgaaaagccagtgggcgcgaagcttaccgtgtgccggatttatgactgaacgcctctaagtcagaatccaagctagcaaccggcgcctctgctcgccgcccgccccgacccacgttagggcgttcgcgccccaagggcccgtgccattggctcagcccgcccggccgacgcgccgcggcgggccgcctcgaagctcccttcccaacgggcggcgtgctgaatcctttgcagacgacttaaaacgcgacggggcattgtaagtggcagagtggccttgctgccacgatccactgagatccagccccgcgtcgcacggattcgt

SEQ ID NO: 1478 - DNA, 1179 bp, Zea mays
atgaatttgaatgatgacttacgtcagttatctattggaagcgtaactgccaaaagctatggacgttacgacgtcaatggatatcgctttcgttcaagcattttcgaatcaagtcatcctatggccgccactcaaaatagtggagtcgttactagggcaaccgacatggaaggacacgaagcctgctattacgggaaaatcaaaaatataatcgagattacatttgctggaaataagcctttagcgctagttttctttgagtgtaaatggtatgacccgaagtattataggaccgaatttgggatgacacagatccaacctgagaaattgcttcaaggacacgacacgatgccgccaaaatcaaagaagtcagtgaaggggttgttcaagggcctgggcctttttcagggcagttcttcgagcagcagcagacgtcgagagctgttgagcgtggtacatggagatgaggatgagcagcacactgaggagcagcacattgaggaggaggagcacaatgaggctgagcagcacaatgaggaggtggagcacaatgaggaggtggaccacgtgacatgggaccaggccgcacagcatcaccagccatgggaccagtgggaccaccagagagagcagcaacaagcatgggaccagtggggccaacagggcgaaccggctgacaacccaatggatgatggctcgggaggctcttcagcgacacgcacacgtcgctcaagaaaaagccactcagtaaagcctcgtcacgcgatagagcgagaggctgataggactttaatcatgccacatggagatcgtacctgggatgagtacaagtttaaaaaggaacgaaaccacaccgacagacagggacttgtgcgtaatgacttttggcttcgatatcggttgcctgacggagaggattacatggggcacgctgaacgtgtcttgcaaaacaatgcaaagaagctggtgaaggatgccatatactatgcgagaattcaggctacaaacctatattttcaaaagcatccggaagaagcgggccccttgaataaaaaggaagggtcctcaaagatatatttgactgaggatcaatatcgtgaggtgatggttccatggatggcgcccgtgcctgatgcgtactatgcttggtgtcgatattgggcttccgaaggcttctag

SEQ ID NO: 1479 - DNA, 219 bp, Zea mays
atggaggtgaaagtcgtcgtctcgctcaaggtgcccgcgacgggtcgaaggggcatgaggagccggaagccgagggttgacgtggacgtcgtacctcggtccagcaccaagcgccgagcccgtgagccaacctttactaccactaaggcggtgaagtgcggcattgggacgtcggccggggccacgtcctgctcccacgcatggctcgacaccgcctag

SEQ ID NO: 1480 - DNA, 1385 bp, Zea mays
aacacggaatggtcgccacgtcggaggccgctccgctccgcgtctccgcttcggtggggagcaagcaccacggcggcgcagggacgcgggggccagcgacgcgccgccgcgcgcgcgacgttgtcgtgttcgcggccggcgtcgcggcgaccctgctcgcgcttgtgggcacggcgtcggtcctcgaccccggcgggcgcggcggcctggtcgccttgcgcgtccccgtccccgttcccggccctgaggacgggccgcgcacgttctacgacgacccggaggtgtcgtacgccgtggcggcgggccggcgcctcaccggctgggacgccaaacgcgcggagtggctgcgctcgcgcgggctcggccgccggagcgcgccggagcgcgtggtgatggtgtccgggtcgcagccggagccgtgccccggcggcgcgggcgaccacctcatgctgcggttcctcaagaacaagctcgactactgccgcctgcacgggatcgagctgctctacaacagggagttcctgcacccggccatgggaggctactgggccaagatccccatcgtccgcgccgccatgctcgcccacccggacgcggagtgggtctggtgggtggactccgacgccgtcttcaccgacatggacttctccctgcccctcgccaagtacggcggccgcaacttcgtcgtgtatggctggcccgacaagttcttcgtgaggaagtcgtggctggggctgaacgccggcgtgttcctcatccgcaactgccagtggtcgctcgacttcatggacgagtgggcgcgcatgggccccgcgtacccggaggaccacgcccggtggggggaggtgctcagagccacgctcagcgacaaggactccgacgtggcgtgcgaccagtccgcgctcgtgtacctgctcctcaacaactgggagaggccggggaagaagaccttcgtcgagacggagtacttcttccagggctactggaaggaggtcgtggaccgcctcgatggcgtcgccgcgcggtacgaggccgtcgagcggcgctcgccggggctccggcggcggcacgcggagcaggagcacctgcgctacgcgggggcgcgaaacgcggccttgaggggcgtcgtaccggggccggccggtggcggggaggtggggtggcggcggccgctcatcacgcacttcgtcggctgccagccctgcagcggcggtcggaacccgatgtactcgagggagagctgcgacgacgggatgcgccacgcgctggggttcgcggacgaccaggtgctccgcgcgtacgggttccgccacgccgccccgctcaacgacagcgtgcgggggctgccgttcgattacccagctgcgcacgcgcgcaacgattga

SEQ ID NO: 1481 - DNA, 2372 bp, Zea mays
gcagtactgggccgctgctgccgcgcactgcctgctttggccgagacgagccccccgtttcgctcccatctcgcgacactctgcccacagctcactcgcctccgtctctccccgtcaaaaaagccacccccgtcccccgcgccgcgccacccgcctttggcctctggctggcaccctttcccccgcctagaaacccgagctctccctctagccttctgccgcacacttccgagttccgagttccttccgccacaacatccacacgcaaacctcgcgatggccgcgtcggaatccgtgccgttctgcgtcaaagggggcgggggcggcggcggcggcgcgcccaggccgcacggccacctggtgctcccggcggggcgggtccgcgaggggcttgcgttcgcggcgggcgccgtggtggccgctctcgtgctcctctcctcggcctccgtcctcgcgccgccgcccgtgcccaacatcgtctccctccccctgtcgtcgtcgtcgcccgccaacgccaacgccaaagccgccatctcttcctcccctgccgtggccgtcggcgagggcccgcgcacgttctacgacgacagggagctgtcgtacgccgtcggggggcggcgcgtcacgggctgggacgcgaagcgcgcggcgtggctgcggacacggggcctggacggcgcggcggtcgcggggcgggtggtgatggtgaccgggtcgcagccggagccatgcaaggggccggggggcgaccacgcgctgctgcggttcctcaagaacaagctggactactgccgcctccacgggatcgagctcctgtacaacaccgcgctgctggagccgtccatggtggcgtactgggccaagatccccagcgtgcgcgccgcgatgctggcgcacccggacgccgagtgggtgtggtgggtggacgccgacgccgtgttcacggacatggacttctccctcccgctggagcggtaccgcgagagcagcctggtggtgtacgggtgggagcgggaggtgtacgaggagcggtcgtgggtggggctcaacgccggcgtcttcctcatccgcaactgccagtggtcgctggacctcatggacgcgtgggcgcgcatgggcccggcctcgccggagtacgcgcggtgggggaagacgctgcgcgaggagctggaggggaaacccaacgacgagtcggacgaccagtcggcgctcgtgtacctcctgtccaggcacctggagcgggagcggtgggcgaacgccacgttcctcgagtccgggtactacttccaggggtactgggcggagatcgtggacaggctcgacggcgtggccacgcggtacgaggccgtggagcgcggccgcgcagggggccgggccgggctccgccgccgccacgcggagcgggagcacctcctgtacgcggcggcgcggcgtcaggcggtgcggcagcagcgagggaccggcggaggcgtgcccgggccggacggcggcgggcagaagggctggcgccgccccttcgtgacgcacttcacggggtgccagccctgcggcggcgcgcccaaccggatgtacacgcggaggcggtgcgccgaggggatccgccgcgcgctggcgttcgcggacgatcaggtgctccgctcctacggcttccgacacgccgcgccgctcagcgacagcgtcacgccgctgccgttcgactaccccgccgcgcactgatgggcggccgcttcggtgggcggtgggttcggcaactggctatggctaggttaattaaatgagacaaaaccatgaatgcaatgcaatgtgtcaagtcacagtgtgtgtactatacattttggatttgggtgtcatccatattcgtccaaagactgaaacagtgaaaccactgtgtggtcttcgtgttcgtcggtacttttaggaaatgtacagcgtgtcttgtcttttccctacactctctcgctgttgttgtcgtcatgtatcaacccaacttgtcatctctatcttcgcctccctcaccaaggttatttctcaccatatagaggacatccacctttgctcctcggcgatcctcttgacccgctgttacaactctctgctggcatgcacctctgcagacaccagagcaaaacatccgagaaagaggagccactgccgccggtgatgtatgcagccatggagaagagaaagaggaggtgatctagaactcgagtttcgtttgcatatagtatgtgcttgtgtggctcggctttttcagataacctttttttgagaatttgggtgtgacgagaagaggagaatctaagtattctggagattacgtgtggagaaagttaaaagagtttatagaattctactatcgcaacgattcaacc

SEQ ID NO: 1482 - DNA, 2296 bp, Zea mays
tgacgactgacacccggccgcctctccatccctttccaccgtgtggcagatcagataacaagcaagcgccgcaacgcacgcgacgggccggccggggaggcgtataagtacgggcgcgtcttcttccgccgctgccccgacatctccctctctcgctggtgcgagagcgcgcgcgcaagcaagcaaggagcgtcgtgtctagctagctgagcacctggttttggagcatggaggacaacggtgccgccgccgccgccgccgctcccgcgacgagcatgcctgccgagaagcgtgtggcggtcatccagggggacgcgccgccggagccggcggcggggctactgccctgcgggccgaggaagacggggctccacctcttcgtcatgaacatcaggagcgtcttcaagctggacgggcttgggtcggaggtgctgcgcatcgcggtgcccgcgtcgcttgcgttggcggcggatccgctcgcctctttggtggacacggcgttcatcggccgtttaggttcggtggagatcgccgccgttggcgtttcgatcgccatatttaaccaagtctccaaggtctgcatctaccctctcgttagcgtcacaacgtcgttcgtcgcggaggaagacgcgatcatcagtaaggccgtccgaggaaacagcagccaggaggaggacgtggagaaagcctcccacgtgggctttgatccggagaccagcaatctgcatgcatctggccctgcaggtatggcagaatgcgtgaactcgtgtatccctacggagtgcgcagcagatccctctggcaggcaagggcggtgcgagaagaggtacgtgccgtcggtcacgtcggcgctaatagtcggttccattctcggcctgcttcaggccgtcttcctggtcctttcggccagattcgtgctcaacatcatgggtgttaagtccggatccccgatgcaagggcctgcggtgcgctacctaacgataaggtcccttggtgcccccgctgtgctgctgtctctggccatgcaaggggttttccgggggttcaaggacaccaagacaccgttatacgctactgtggttggcgacgcggcgaacatcatactggacccgattttgatgtttgtttgccatatgggcgtcactggtgcggctattgctcatgttgtttctcagtacatgataacgttgatactgctgtgccggctcgtccagcgagttcacgttatcccacccagcattaaatctctgaaatttgggaggtttcttggatgtggattcctgctgctcgcaagggttgtcgcggtgacgttctgcgtcacgctggcggcgtccctggccgctcgccatggacccaccgtcatggcaggcttccagatctgctgccagctctggctggccacgtctcttctcgccgatggattggccgtggcaggacaggcggtgcttgcaagcgcgttcgccaagaacgacagtaagaaggtcgctgccgcgacatcccgtgtgttgcagctgagcattgtcctgggcatgggtctcaccgtcgtgctgggacttgctatgaggttcggggctggcattttcacaagcgacgtgcccgtgatccaagtcattcacagaggcatcccgtttgtcgccgggacgcagaccatcaattccctggccttcgtgtttgatggcatcaactttggagcgtcagactacagatactctgcttactccatggttgctgttgcgtctgtgtcgataccatgcctgctgtacctttctgcgcataacggattcatcggtatatggatcgcattgacgatctacatgagtctgaggaccatagctagcacctggaggatgggggcagcgaggggaccatggacgtttctccggaactgatgatggattggcttggaactgatgatctgcggcacactgctgacagataaggctgcgccgcgctgcgcatgcgcctctcatgtagcatcagcgaagtatagtacgtgttctgctggtgtttaaagcttcggatatcggaggtagatgtagctatgggactatcccctcctgatcgtctgacttgtggccttgcgtggagagtttacgttgctccgttgatttatgttgtatcatgccaggatgtcagtttaataccatacatcggtaaagtgtctctctagtaactccattcttttctccttttccccccctttgtgcaagctatttttttagctgtttgatgagaccttgcaagaactgttttactgcgtggaagcagcaaaataacagcgataaaagagacgtgt

SEQ ID NO: 1483 - DNA, 1522 bp, Zea mays
gtcggccacgccgcaaacccgccgcctccgttccgaccgcggaccgtgaacggagccggctggttcacaggcagccacagccccccccccccccccccccccgtgctgcgcagatagcgtggcgccaaaccagcgccgtccaactgaaccagtggacagggctcgaggaggcagccccgcactacactactcgagggaagcagggaaccgtcgaaccgaggccccgtccgtcccaactcacgtgtacgtactcctcctgtcctgctgactgatccgcatgctgccggtcgtccaccgccgatcgtgaaacgcaaccgtcgccgtacgttcgtcgctagcttgccgccgatcgccgacctcgcgcgcggacactcacacacatggtcatggcgcctcagccttcgcgcgctctgagtccgaggctgagccgcgcccccggcgccggccacgcgtcgtgcaggtgctcggcagcgctcgcgccgctcttcgggaagcgcccggcgcccctcgtggtgtcgttcccgcgcgccggcagcggcggcgccgtcgcctcctgctcggccgtgccggtgcaggagtcgtccacctccaccgctgttagcaagaagaaggacggtgccaataaggaggccacagcggccaagccgaagaaggccgcggcgctgccgctgccggagatgatgcaggaggagatcatcccgccgctgaaggccgccttggaggcggaggaggacgtgtcccaggtccagctcgccttcgaaaacaacacgctagagggatccttcataaaggacgacgtcccttattgtttctgggccttctttccaaaaggagacctcacaggacccaagggcttcgcgctatcgtcctacagcaacgaggtgagcaccatcgagccgttcctgatcgacgagaagagggtaacggccaagtacgtggtgttctgggtttacaagaggctggctgggcaaggcatccttccggtctggaaggaagaggagggggaggatcatcaggacgccaagtagaacacacgcaggaggcaggagggtgctgctgtgaacctacacacagtcatcatgtctgaaactgttaaagttcgtctgctaatatatatacagatgctaagagctgctgagacacatgcatttcagcatttggcttctgctgcataggcgcatagccattcgcagtcgcaatcccttcgtaatcttgtgctgcagaagccagtcaaatttgttgaacaatcgaaaccttcgtgggccgggatcgacgacgagtcccgtctgaaagctatggtatctgaatattattatttgttatcgccagtcctgcgtgccgtactctatccgtccagcccttcgccatctgtttagaatagaataccttcatgtaaatcaagagatttcagagattattaatttaagcgaaaactgttatcttattgttcggttgcatggtattctgctccctcacaattttaaatggtaaaaaaaagtaaaaaaatatacataaataaaga

SEQ ID NO: 1484 - DNA, 5703 bp, Zea mays
atggagtcagtccttacctctcaccctctaacccagtccttcccacccagttctgatgccccctcccacctcagcccctcgccggcattctccccgaactcggcgtccacacccacttttagccaggcgtcagagcccagtcacagtggtgtatcttctcaggtaggacggtccaaattccagaggtggagcgacggaggtggtggtcctttttccggtgagcccggttcctataaagatgctacactcatccagttgagtgcagtgccatcctctccttctcggggatcacagttgaggtctgcaaaggaggtggtggtccggggtcacgtcgaggacctccggcaggcggtctctgggcgacgtcaagtaggtctggtgcgtcattccttgcccccgtctcctcggcggcaggaagtcgacgggtggcaaaccgttgaaaggcggcgtgggcggcggtttgagcaagctccgcgtcgtccggtggacctccgtgggaagtgtttcaactgtctgtccagcaaccacttcgttgctgtgtgcagacgccctactcgctgtttccgctgtcgtcttcttgggcatcaagcaaggaggtgtccctctcttctcccggtagagaaagggacgtctggaaagccaccaagggtgcaaggcgggcgtgttcaggtttggcagcggctaggtccaccggttccatcctctgtgctcaatcacaggatgtctgtgtggcaaagaattggccctcagctgccgccgtcgaagttttctcattctccggcagcagaggcaagcttggtggagagcaatatctcgagtcattctggtaagaagaagaggaggcgggctaaacgtcataaggaggtttcttggcagtccacagtgccggtgggtgccgcttcgaccttggagccctcgccaggtgtagggacgcagtcgagtgtgaagacctgcatgcttgagttctccactgctatggctcgggaggaggcggctcttcgccgggctttgttcgtctctattgttggcagcagaccggagatcagtggagctgaagtgcgggatgaagtggctcgggcttttggaattgacgttaattcaatatcgattcatcagtccttgccagaagatttcctattgttgttaccggatgaaagttcggctgatagagtcttcagcggaggaaaattgtttaggggccctcttttcaatcttcaattcagacggtggtcgcggttggctcatgctgaggcggctaggttgccagcactggtggaagtcgaggttcatggcattccagcccacgcatgggatcgttctacggtggagtatctgctccgtgactcttgcattatcacagacattcatccgagcacgtcattgaagaatgatctgtcttccttcaggcttcgtgcatggtgtttgaacacagatttgttccctcggccgatgaagctcctcattgttgagccggggacggatgtgcaggagaaaagatgcctttcctatgatattgaggtggctgttactgctgtgatggttccgacgaatttcgacccccctccagctcattcccctgcggctgatggacgggatcggcatgaggatggcggcgggaggcattcggacgactccaattctccacgtccggacggcgggcggcttcagcgcccaattttccagcgtctgggcccgaggggacagtcaacgtctggtggtcgtggtgctgcggtccagcgctgtgccctctcggcagcgggcccggctgcaggaatcgaggtggtggcctccccaacgcgcctgctggacggatctcctttatcgctgacgattggcgcaggagccgaggaggaccttgctgcggggatcgcggaggtgcgacggctgcattgccccctccctttactgctggttgctgcgggggtcgaggaggtgcctccccctgtgcggcggctggcggttaattctgtggcgggagtcgaggaggtggcctcttcaatgggacgtgcggtccattctccttcatggttggcggcaggcacaggaaccgaggcgcacagtgggagaatgctggcggccgacataggaaccgaggcgcactctgggggaatgctggcggtcagctcaggagccgttgcacacactgggagcatggtagccgttcctgccagggaggtgttggctgtccagatggaactcacggcagcagacatgggcacaggtcccgggacagtctgcgcaaaggttggccctgtgggctgtgctgttgatgctccagttgtgcaacagccgcagatggatgggcacggggggcccatgtggacaaggttggctgggtcgctgaaatcgcttgggtcgggctctccccgacagaggtttgtcgggttgcagaggctgaccaagaccgtttcgccccgcaacagtttcaatgtcgggatcgagttggtcccccggctgacctcaactcaatctttggttgggacgtcggaggcggacaggaactctcccgctggaatgtcacttgatgctcaggtccttgagagccccagactgaaggtgtactcaagattgaaaaagggcagacttcagatacctgcaccggtttcatcccagatggaggtgtcggcaccagttttggatctggtacctgctggtgtttcttctcagttggaggaggcgacccccgttatgaaactggtggctaatatcacaagagacattgactgcttgcttccgcaacctccaattcaaaaaagaagaactaaacagcttccgccagattttgtcccacgacgcagtagtcgcttgtcaaagaaaagggaaggcttaaattcaacagtcagacaagtccaggcggagctcatgttgaagttgaacgtcacaaactcacaggtggctgtgactgatgaaatgctggaggaatttggacagctgtttgacaaacccctttccaactctcacatcaaggccctagcagctttgtttggatggtcggtcccagataatgtgcaagaatgcttggatgttcctttgcttagggagttaagcattgaaactgaaattgttcgaatgtttcatcctccaattcgtaagagtgaggaagcaatagcaaccattgcgccaagatacacacattctgtgcgtgtcttggatgagaggttcattaggatcctgaagatattcaagtggggccctgatgctgagaaggcgctggaggttctcatgcttagagttgatcactggttggtacgagaggttatgaaaactgacgttggggtcaatgtgaagatgcagttcttcagatgggctgcaaagcggaggaattatgagcatgacacatccacttacatggcattgatacattgtttggaagtagtggagcagtatggtgagatgtggaagatgatccaagaaatggtacggaatcccatttgtgttgttaccccaacagaactttcagatgtagttcgaatgctggggaatgctaagatggtcagacaggcaattacaatcttctaccagatcaaaacgcggaagtgtcagccaattgcacaggcatataacagcatgataataatgttgatgcatgagggccaatatgagaaagtccatcaactatacaatgagatgagcactgagggtcattgcttcccagacactgtgacatatagtgcattgatttccgccttttgcaaattaggtcgacgtgattcagcaattcagttgttgaatgagatgaaggagatcggtatgcagccaactactaagatatatacaatgttaatagctttgttcttcaaattcaatgatgctcatggagcattgagtttgtttgaagaaatgaggcatcagtattgccgaccggatgtgtttacttacacagagctaatcagaggccttggtaaagctggtagaatagatgaagcatatcacttcttctgtgaaatgcagcgagaaggctgcaggccagacacagtttttatgaataatatgataaatttcttaggcaaggctggccgtttggatgatgctatgaagctgtttcaggagatggaaacattgaggtgcattcctagtgtggtgacatacaatactatcataaaagcactttttgaatcaaaatctcgtgcttctgaggttccatcttggtttgagagaatgaaggaaagtggaatatccccaagttcgttcacctattctatccttattgatggattctgcaaaaccaacaggatggagaaggccatgatgctactggaagagatggatgaaaagggtttccctccatgtccagcggcatattgtagcctgattgatgctcttggaaaagctaagcgttatgatcttgcttgcgagctttttcaggaactaaaggaaaattgtggctcgtctagtgctcgggtatacgcagttatgattaaacacttaggaaaggctggacggcttgatgatgctataaatatgtttgacgaaatgaacaaacttggttgtgctcctgatgtttatgcgtacaatgctctcatgtctggattagcaagaacaggcatgcttgatgaagctcttagtacgatgagaagaatgcaagagcatgggtgtattcctgatatcaattcatacaatattatccttaatgggctggcaaaaacgggaggacctcaccgtgcaatggaaatgctttctaacatgaaacaatctacagtaagacctgatgtagtctcgtataatactgtccttggtgccttgagtcatgctggcatgtttgaggaggcatcaaagctgatgaaagagatgaatacactggggtttgagtacgatcttattacatattcatctatacttgaggctattggaaaggttgatcatgaatatactgaccaaggttgatcatgaatgtgaccctcaaagttggaggcgtatcatgtgcaatcactcatttggtgcaagcatgcgatcaaaccatccagagcatccaatctagatccagcggtttcatatggaagagattaaaccaaaaatgggtactaggtttcagtaaatgtaaatagccgtcaccattggattttgattagatgcactacatcaatatgattgattgcactgtatatcttcccctcaaggttcgtgaggatcatcgtgtattttgaagagtgaaaggtgatattcatgttggtgctgtcctgaatgtgacacgggtaatttggtgcattttccaacaatctgttcattttgcaccctaagaatatagttaaaacgatgaagtgtccatatggtgctaaccacctttccatagtgctatgatgtgaacttcattctgatacatgaatacatcagcttgcaaaagaaagaaaagagaagaaaaggtttctttatgaccactcagacacccagcaatattcttacttcgatcacactggcttgatcaagtcactgctaccgacatggtgcttgggattttgtagctggaataatgctggaccgccctgcctgatgtgtaatcatgcacgtaaatgctatcagtcgtgcagggactcttgtagtacaactttgtggatcagggtgaccatgtaaagaacacacggtacctgtgtcaattcatgttttctgttgaggtttcagcttttaattaaggtaaactagtgtagtgtctggctaaactttgtccttgttcttgacgaatgatgtaactctgatcgctttttacat

SEQ ID NO: 1485 - DNA, 1878 bp, Zea mays
atgagaaaggcagcgtcgacggcgacggcgggggcgggggctaccttccgccgccgcgcgatggaggggctggcgaccgtgctgctcctgtacgcgctcctcgtgctcgccctcgagtcgccgctcgtctccacctcgccattcggtggcgccgcgggcggtacagcgcggaagctccacctctccttcggcgcaggcgagcgcgcggcgcccgcgcgccccgcgtcggcgtccgtccccggcgcgtcggcgcacgggcaggatcatcggctctcccgcttcgccaccggcctcgacgtccgcctcctcgactccgcccgctccggcgcgctccgccggtccatagcggacgccgtcgcggcgggtgcccgcgcgttctccgacctcgaggccctcgaccccgccgtcgtcgccgcgccctccggcgagagcgacgcggccaggtgcccgcactcgatcgcgctcaccgcggaggagctcggcgcgcggggccgcgtggtggagctgccctgcgggctcgcgctggggtcccacatcacggtcgccgcgacgccccgggcgccgcacgaggagcggaaccccgcgatcgtggtgctcagggacggggagcggcacgccatggtgtctcagttcatggtggagctgcaggggctcagggcggtcgacggcgaggacccgccccgcgtgctccacttcaacccgcgcctccgcggggactggagcggccacccggtgatcgagcggaacacctgctaccgcatgagctggggcgccgtgcagcgctgcgatggatggaggtcacgcccggatgaggagactgtggatgggttggtcaagtgcgagaagtggattagggacgatgatgacaggttggagaaatcgaagacaacatcaaagacggcatggtggctgaatcggctgatcgggcagaaagaggaggtcaatttcggttggccatttcctttcgtggagggcaggctctttgttcttactctcagtgctgggttggagggttaccatgtgagcgttgatgggcgacatgtcacttcgtttccttaccgcactgggtttgtgttggaggacgctacaggcctgtcactgaatggggacctagatgtgcattcagtgattgcagggtctttgcccactacacacccaagttttgtgccacagaattatctggagttttctactgtttggcaggctcctctgctgcctgatgagccagttgagattttcattggcattctgtcagcagccaatcattttgctgaacgtatgggtgtgaggaagacatggatgtctgttgtccacaagtcaccaaacatggtggctcgtttcttcgttgcactgcatggcagaacggaagtgaatgcggagttgaagaaggaagctgaattttttcgggacattgtttttgtgcccttcctagacaactatgatcttgttgttatgaagactcttgcaatatgcgagtatgggcttgcaaactttggtttagccagggtatttggaattcctgtccgtacatttactcatgaggtggtgacattatggtacagagctccagaaattcttctgggagaaagacagtattccatgccagttgatgtatgggtacttggtacaccaaatgaacaaagttggccaggagtcacctctttgcctgatttcaagtcggctttcccgaagtgccagtctcaggatcttgcagcagttgtcccaaatcttgaacccgctggtttggaccttctctctccaatttacgtatttattgctcatggtcagaaaatgcttcggtacgagccaagcaaaagaatcacagccaggcaggctcttgaacatgactacttcaaggaccttgagatggtacaatga

SEQ ID NO: 1486 - DNA, 2365 bp, Zea mays
cgacgcattaggctttaccggactccggacgcataacgagaggaaaacaaatcagaggaattcgacgagggcaccagccaccagcaccaccatggcggccgcctccaccgccaccgccgcctcgcactcagcctccttccccgcggcctccctccgccacgacgcgcgcaggccctcctgcgtagcccccgccgccgccgcggcgacgacggccgctgagacggggctcacggccgtcccggcgccgccgccgacgccgatgttgcgggtggtgccggagtcgctgcagcgggacagcgggtgcctcgtggcgggcttccgggagcgcggcgcgggcgcggcggatggggaagggttcggggacgccgtgggggaaggaggaggccccggtgcgatggagtacctcaccagcgtgctgtcgtccaaggtgtacgatgtggcaatcgagtcgccgctgcagctcgccaccaagctctccgatcgccttggggtcaacctctggatcaagcgcgaggacctgcagccggtattctcgttcaagttgcggggagcatacaacatgatggcaaagctctcccgtgagcagttagagaggggtgtcatctgctcctctgctggaaatcatgcccagggcgttgctctttccgctcagagactgggatgtgatgctgtcatcgtcatgcccgtgacaacaccagaaatcaagtggaaatcagtggagaggttgggtgcaacagtggtccttgagggggactcatatgatgaagctcagtcatatgcaaaattgcgttgccagcaggaaggccgcacatttgtacctccttttgaccatcctgatgtcatcactggacaaggaactatcggcatggaaattgttaggcagctgcaaggtccactgcatgcaatatttgtacctgttggaggtggtggattaattgctggaattgctgcctatgtaaaacgggttcgcccagaggtgaaaataattggagtggaaccctcagatgcaaatgcaatggcattatccttgtgtcatggtaagagggtcatgttggagcatgttggtgggtttgctgatggtgtagctgtcaaagctgttggggaagaaacatttcgcctgtgcagagagctagtagatggcattgttatggtcagtcgagatgctatttgtgcttcaataaaggatatgtttgaggagaaaagaagtatccttgaacctgctggtgcccttgcattggctggggctgaagcctactgcaaatactataacttgaaaggagaaactgtggttgcaataactagtggggcaaatatgaactttgatcgacttagactagtaaccgagctagctgatgttggccgaaaacgggaagcagtgttagctacatttctgccagagcggcagggaagcttcaaaaaattcacagaattggttggcaggatgaatattactgaattcaaatacagatacgattctaatgcaaaagatgcccttgttctttacagtgttggcatctacactgacaatgagcttggagcaatgatggatcgcatggaatctgcgaaactgaggactgttaaccttactgacaatgatttggcaaaggaccaccttagatactttattggaggaagatcagaaataaaagatgaactggtttaccggttcattttcccggaaaggcctggggcccttatgaaatttttggacacgtttagtcctcgttggaacatcagccttttccattaccgtgcacagggtgaagctggagcaaatgtattagttggtatacaagtgccgccagcagaatttgatgaattcaagagtcatgccaacaatcttgggtacgagtacatgtcagagcacaacaatgagatataccggttgctgttgcgtgacccaaaggtctaatgtatatgcctttgctcccataataagttggtgacacttttcaaggaagattttgctccaaggtagaagttgcgagtttcttcaagttgaaatgaagccatcaccaaatgtagcttcggtgtgccatctgtttactcagttagatcatgtagtgtatcagttgtgtatctttgttgttgtgcttcgtgatctcaatttattgctttgtgcacctagaggttgtcaaataatgataaccgatatgttatctaaatatctaataatgattatgtgattgtgatttgggccgcatcactgctgtaaagtgtaaacccttgtctctgcaacatgagttatcaacaaatttaagatttgaatgttctttctttgaattgtgtgtataacaagagtgtcaactaaaaaatagataaaggcgtgtttaacctcatttgcggttttgtgccgtttgctgtt

SEQ ID NO: 1487 - DNA, 887 bp, Zea mays
atgcatcagcaacagcaccaggagcggccgcgggaggtgtaccgcgagtgcatgcgcaaccacgcggcgaagctcgggacatacgcttctgacggatgctgcgagtacacccccgacgacggccagcccgcaccgatgctctgcgccgcctgcggctgccaccgcaacttccaccggaagacgttcctggacgccgcggcgggggcgcacggcgcgatgctgccctcccctgctggcgcctccccgggctacggcagtggcacgcaccacactgcgactactgcggccggcatgggcggtgacgccggcgcgcacggctccgggggcaggcggcggacgcggacaaagttcacggaggagcagaaggagtgcatggcgcggttcgcggagcggctcggctggcggatgcccaagcgggagcccggccgcgcgccgggggacgacgaggtgggccgcttctgccgagagatcggggtcaccaggcaagtcttcaaggtgtggatgcacaaccacaagtccggcggcggcagcggaggcgccggcgccggcgccggcggggccgctcagacgtcgtcgtccacgacgcgtggcggcgggagcggcgccgttggaggaggcgggagcatgtctccggcgatttgcgcggacgtcgaggacgacgaggaggtgatgaggggcagtggaatgtgcatgtagtcgcgcccgcgctgcatatgtggctcgcgcggcggcaatggcatggcctggctggctggctgcgaacctgcgaccgatcatcgatgattaaccaagccttttgctgctaattcctttcggtgattttgcttctatgagttgattaattgttgatgatatgaaatattcattgttataaaggctttgctaat

SEQ ID NO: 1488 - DNA, 3215 bp, Zea mays
atgggagaggccgtcaccgccgcggagctgctgtacggcatgccgttgatccggtcggtggccggggatggcgccggcgccggcgttgagaccgccggctgcggtgcgctgctcgtggagctcaagcaactgtggggggagatcgggaagagccgggaggagcgggagcggatggtgcgggagctggaggccgagtgcatgcgcgtgtaccgccgcaaggtcgacgaggccaccggcgagcgggccgctctgcaccagtcgctcgccgcgggggaggccgagatcgccgcgctcgccgccgcgctgggctccgacagcggccctcagctcaaggtacgcgccgtcgcgcgcgcggtctccttccttcaggtgaacaaatggaccatgtcgctgaccgagcgcgtgtcgtcggcaacagccctgctggaagagctgagggcggtgaaagcagagcggagcagacagttcgccgacgtccggtcagagatcgagaagatcaccgccgagatcgctgggaggagctacggctacgagggctccccccgggccagcgaggtgggagaacacgacctgacgatcaggaggctgaacgagtacagggcgcgcctcacgagcttccagaaggagaagtctgaccggctccacagggtcctggagcacgtgacggaggtgcactcgctgtgcgacgtgctcggcgaggacttcatcgcgatcgtgaacgaggtccacccggggctgcacgagacgtccgaccccggcaagcccaccagcatcagcgacagcacgctcgccaccctcgcccaggtcgtggcgacgctcgccgccgagaaagccaagcgagcgaccatgctgcgagaggccgtggtgcccttggtggagctgtgggagctgatggactcgtcggaggaggagcggcggagtttcaggaacgtggcggccgttctgaaccctgacaagctggatgctctgccctccggcgtcctgtcagtggcgacgataaagaagacggaggaggaggtggagaggctgacgaggctcaaggccggccggatgaaggagctcgtgctcaagaggcggctggagctggagagcatttgcaggagcatgcacgtggagcccgatgcgagcaccgtgccggagaaatccattgcgctgatcgactctggcctcgtgaacccttccgagctcatggccagcatcgacgaacagatagcgaaagccagggaggagctccagtccaggagagagatcatggagaagataaacaagtggctgctggcctgcgaggaagaggagtggctggaggagtacaatacggacgagaacagattcagtaccggcaggatcgcacgcctcaacttgaaacgcgcggagaaagcgaggcttatcatcaccaagattccggccgtgattgacagcctgatgagccgtacactcgcatgggagagcgaaagaaagaagccattcctgtacgacggggctcgcttggttgccgtcttggaggagcacaagcaagccaggctcaggcaggaagaggagaggaggcgactcagggagcagaagaagctgcgcaccctgctgagcgagaaggaggcgatgccgcacctgaagcggcccggcagcagcttcggcagggcggccgagccctgcaaagtgaaccggaaacgggttgacgcgggcaggctcgcgtcctccggtggcagtggcaccaccaccagcagcagcagcagcggtggtggtggtgcgagtgcaaccgagctcatcaggccgcgttcctcggcggcgggcgcgggacagtgcggcgagttcttcaaggattttttggagggttactcgtgtcgaaaatattctattgttattgttaaagaatatcttattcagagaattggtgagcttataccatctcttctcttcttctattctatctatctatcttccggcaccggcaggctacggtttgccgggcagggggcaggattcagatcttggagtggcgcgcctgccgtgcacgatttcgcatccgcgaccgcgcagagttgggttggacgggacgacggaggaggaggtggagaggctgacgaggctcaaggccggccggatgaaggagctcgtgctcaagaggcggctggagctggagagcatttgcaggagcatgcacgtggagcccgatgcgagcaccgtgccggagaaatccattgcgctgatcgactctggtaccagttcacagttcctgctttactgatcgactctggttcagatggcttcattttttctaacgctgacgaaattctaccaggcctcgtgaacccttccgagctcatggccagcatcgacgaacagatagcgaaagccagggaggagctccagtccaggaaagagatcatggagaagataaacaagtggctgctggcctgcgaggaagaggagtggctggaggagtacaatacggacgagaacagattcagtaccggcaggatcgcacgcctcaacttgaaacgcgcggagaaagcgaggcttatcatcaccaagattccggccgtggttgacagcctgatgagccgtacactcgcatgggagagcgaaagaaagaagccgttcctgtacgacggggctcgcttggttgccgtcttggaggagcacaagcaagccaggctcaggcaggaagaggagaggaggcgactcagggagcagaagaagctgcgcaccctgctgagcgagaaggaggcgatgccgcacctgaagcggcccggcagcagcttcggcagggcggccgagccctgcaaagtgaaccggaaacgggttgacgcgggcaggctcgcgtcctccggtggcagtggcaccaccagcggcagcagcagcagcagcggtggtggtgcgagtgcaaccgagctcatcaggccgcgttcctcggcggcgggctcgggacagtgcggcgagttcttcaagggcgtgaggcggctctcggcgccgccgttcaactacgtcgccgtgtccaagggccgcagcatgtcctcgtctctagctctgtcctaaactcgaaaccgcacaagtagcgaagacttgtcacgtgtgtgtatatagagtgccactgtaatttgtagccgtgttaccttttacacagatttttttggagggttattcgtctcaaaaaaattcctttgttattgttaaactatttcttgattagagaatttatgagtttatagtatctctac

SEQ ID NO: 1489 - DNA, 2628 bp, Zea mays
ttcgtagctgctctgttccggtcaaactcggcggcctccgaaatgggatcgaacccaacacggcaacacgccgaagcaacgcatgaaccaccagtcaccggcgacgcgggagggaaagtctccatttcgagaaccttcctgtacactctagaatccccaccctcacgaatggatccaagttccccacgacgtgcccgtgtcgacggccgtgacgtgccggaacattctagaacccctcccggccacacaaacctttaaatccagtcccacatcgtctccttcctcctcgtccacccattcctcgttcttccttaattcctcatttcctccacgtacgcgtgcatactctgcgagtccaggaggtattttcccccttcttcacgatactctcgacgagagcgtctccatggccggaaaaggagacgggccggcgatcggcatcgacctcggtacgacctactcgtgcgtcggggtgtggcagcatgaccgagtcgagatcatcgccaacgaccagggcaaccgtacaacgccgtcttatgtcgcgttcaccgattcggagaggctcgtcggcgacgccgccaagaaccaggtcgccatgaaccccatcaacaccgtcttcgacgcgaagcggctcatcggccggcgcttctctgacgcgtcggtgcagagtgacgccaagctatggcctttcaaggtgatcccgggctccggcgacaagcccatgatcggggtgcagttcaggggcgaggagaaacagttctcggccgaggagatcagctccatgatcctgaacaagatgaaggagacggccgaggcttacctcggcaccaccatcaagaacgctgtcgtcaccgtcccggcctacttcaacgactcccagcgccaggccaccaaggacgccggcgtcatctccggcctcaacgtcatgcgcatcatcaacgagcccaccgccgcggccatcgcatacgggctcgacaagaagtcgagcagcgacggcgagaagaacgtcctcatcttcgacctcggcggcggtacctttgacgtctcgctcctcaccatcgaggagggcatctttgaggtcaaggccaccgccggcgatacccacctgggaggcgaggacttcgacaaccggctcgtgaaccacttcgtccaggagttcaagaggaagaacaagaaggacatcactggcaaccccagggcgctccggcggctgaggaccgcctgcgagagggctaagaggacgctctcctccaccgcccaaaccaccatcgagatcgactcgctctatgagggcatcgacttctacacgaccatcacccgtgcccggttcgaggagctcaacatggacctcttccgcaagtgcatggagcccgtggagaagtgcctccgcgacgccaagatggacaagagcagcgtgcacgacgtcgttctcgtgggcggctccactcgcatcccccgcgtgcagcagctgctccaggacttcttcaacggcaaggagctgtgcaagagcatcaacccagacgaggctgtcgcgtacggcgcggccgtccaggccgccatcctcactggcgagggcaacgagaaggttcaggatctgctcctgctcgacgtctcgccgctctcgctcggcctggagacggccggaggcgtcatgactgtgctcatccccaggaacaccaccatcccgacaaagaaggagcaggtcttctccacttactccgacaaccagcccggcgtgctcatccaggtgtacgaaggtgagagggccaggaccaaagacaacaatctgctcggcaagttcgagctctctggcatccctccggcgcccaggggcgtcccccagatcaccgtgtgtttcgacatggacgcgaacggcatcctcaacgtgtcagctgaggacaagacaaccggccagaagaataagatcacgatcaccaacgataagggccggctaagtaaggaggagatcgagaagatggtgcaggaggcagagaagtacaaggccgaggacgaggaacaccagaagaaggtgaacgccaagaacacgctcgagaactacgcctacaatatgcgcaacaccatcagagacgacaagatcgcctccaagctaccggaggacgacaagaaaaagatcgatgacgccgtcgagggggccatcaattggctcgacaacaaccagctcgccgaggttgatgagtttgaggacaagatgaaggagctggagggcatctgcaaccccatcatcgcgaagatgtatcagggcgccgctggtcctgacatggccggtggcatggatcaggatgcttcgccggctggtggcagcggtgctggacccaagatcgaagaagtcgactaaatgaggaaattctgatatatgtattttttgcttaaataattgcgtcaattacaaagtggatcttattattatttttatgcagtttttttggccatacacagggccccaagttcatgtttaagttcatttttgctagtacgctggatataaacagtgattagccctgcatgtattggcggtattatatcttcgaaagctattttagatggctaaaaccctttattaacctatatgcaatacaatgaataactaggatttcagaaaaaaaaaaa

SEQ ID NO: 1490 - DNA, 2509 bp, Zea mays
cgacacgcaatactgttcactctctctggagtctggacctttctcgccaaaccggcgaatccgcccccggaacgccgtgcggagtggagccgccggcacccggcagcagtacaaaacaaaacgcttttaccacagactgcggggtggcgacggcgttggaaagcggagtggaggccagctgctcgctgaaacgccgcggatgaaacagatgtccgtccgtcggtttgcgtgctaggctactgtgccgcttgacagaagcgggcactcacctctctctctctccccgcacacgttgctgtcggcagcctcaccaatctcggcgccagactgggaccgcgaagggactggtggtcgccggttcctcccgctactccggctgcttttcctcctctctccgtcgccttccccttccgggctgcccatatttcattcggtgccaacaagtgccaagtgctcgtgtccggatgcgccagcgccgcctggtcaacagatttttgccctgcgctgtcactccaccacgctgcttgtactgaaagctttttcccagaataaaggctggggaggaggaagcggcggcggcggcgctctcagaagagagggtgagatgaagactcggagctcagcgagaggggagccgaggcgtctcggaaatgcggctcttctggcgctcatgctctgctccgtcgtcgcgctctccctcatccgggggagattcgccccaattgtcactaccgcaggagatgccatcaaatccgaggacgacgctgcggcggctgcgctcagtgtcagcaaggcggccgtcaacgttgacaccggcgacagcgccgacgaggccgccgccgaagctgctgctgaggagaaagagaaggaggaagtccagccgaagcccgctgacagttccggctccggttccggtggcagcgcagccaagccggtgtgctacgagacgagccgccgctccgacacctgcgaggcagctggcgacgtgcgcgtcgtggggagcacccagacggtgtacgtggactcgctggaccgggagtggaagaccaagccgtactgccggaagcacgacaacttcgcgctcgcccacgtcaaggagtggtccctgaagccgctcccctccggcgcggcgccgcagtgcacggtcaacagctcggccaccgcgttcgtgctgtccacgggcgggttcaccggcaacccgttccacgactacacggacgtgctcatcccggccttcatcacggcgcacccgctccgcggcgaggtccagttcctggtgagcagctacaagtcgtggtggatgaaccgctacatccagatcttccagcagatgagccggcacgaggtggtggacatcgacgcggacgacgaggtccggtgctaccgcagcgtggtggtgggggcgacgttccaccgggagctgggcgtggacgcgtccaaatcgccgccggggtactccacggccgacttccgcaagatgctgcgcgacgcgttcgggctggagcgtgccacggccacgcccagcggcgaccggtgggacatccggcgccgcccccggctgctcatcatctcgcgccgcccgtcccgcgggcgcgccttcatgaacgagcgcgccatggcggacatggcggccagcctggggttcgacgtgcggatcggggagccagacaccagcaccgacacgtccaagttcgcgcggctggtgaactcgtgcgacgtgatggtgggcgtccacggcgccgggctcaccaacatggtgttcctgcctgccggcgccgtggtggtgcaggtggtgccgtacgggcggctggagtggctggcgcggaacacgttcgcggagccgtcggcggggatggaggtccactacctggagtacgtggtgcagctggacgagacgacgctgagcgagcagtacccgagcgatcacccggtgctgagggaccccatggccatccacaagcaggggtggaacgcgctcaagaccacgtacctggacaagcagaacgtgcggccgcacctgggccgcctcaagaacaccttcctccaggcgctcaagatgctgccgcacggccgggacgattgataagtcaaattagttgattcacctggatctcagcctcagttatttagagggagtaaatgtataggttaatggtagctactacttttttcggcttatttgttttttttttgcctttatttgtttgtacgagtaagaggatgcaccagcgtagctgtgaatggcttcacagttctcagagacgaactagtagtgttaaccgttgatattttattattatatatgttgctttggtagcatggaacgtgattgcagtgatgtgctttgactaaggccctgtttgggtccgctagtttattagaaactggtttttaaaagttaaaagttcttcaaacaggtcaatttttttattcactttcctaaaatatagtttcagttttttattcaaaaacagaccagtttcttcagctaaaactagtttataagaaa

SEQ ID NO: 1491 - DNA, 1716 bp, Zea mays
ggagaggtgttccttggcgccacgtctctttctgctaaaaggacgccgtgccgttccagtatttaaaccgggaacctccaccctcgcattggtttctcttgatcgcttcgtcacttgaatccgtgcctgctctaataggtattaggtactactaggcaattggcaggactaattttccctctctgttataacaacgacttcttcagtgctagctctatctatctatctatctattggtctcgtgtattgattactctacttgtcggctgtggcgcacagaggctctgcaatggagcaggagccgcaccggcccatggagctgcccccgggcttccgcttccacccgaccgacgaggagctcatcacgcactacctggcccgcaaggccgccgacgcccgcttcgccgcgctcgccgtcgccgaggccgacctcaacaagtgcgagccctgggacctgccatcgctggcgaggatgggggagaaggagtggtacttcttctgcctcaaggaccgcaagtacccgacggggctgaggaccaaccgggccacggaggccgggtactggaaggccacgggcaaggacagggacgtcttcaggggcaaggcgctcgtcggctccaagaagacgctcgtcttctacacggggagggcgcccaggggagagaagtccggatgggtcatgcacgagtaccgcctccacgccaagctccacggccacggccacggccacggccaaggcgcagccgtcgtcgtcgtccccaaggccgccgggaccaagaacgagtgggtgctgtgcagggtgttcaagaagagcctcgtcgtaggtggtgcagctgcagcagcagcaccaaccgcaggcaagaggggcggcacggagacgtcgtccaactccaagacgggcgacgtagcggccatctcccacctccctccgctgatggacgtgtccggctccggctccggcgccgccgccgcggcggcggcacacgtgacctgcttctccgacgcgctggagggccagttcttggaccagacgacgaccacgccgccgccagaagccgccgccgccgccacggacgacgacggccacctcggcgccctcgccgccgcctcctcctcggccttccagctgcccggcttcgcgcactactactacggcgggggggcgccgcacctgcaccagcaccacggcgccgccagcctggtgcagctcctggagggcagcgttccgccgtgcaataagggcggcgagcgggagcgggagcgggagcggctgagcgcgtcgcaggacacggggctcacctccgacgtcaaccccgagatctcctcctcctccggccaacgcttcgaccacgaccacgaccaccacctctgctgctggggctactgatcgattcgatgagcctacgactaccgatccagcgcgcatcatgcatgcggtcgcgttattactagcgattagtgtatagcactgctgtaaataaaacacctactagtactacatctgcgtgaggtcgacgatcggccgtgtggtgcgtggcaattggcatgcatgcgtcgagctgcctacgttccattatttgctcgtgtgatttgttactgtagacgagtgtgggggtgtgtaattagcattgttgatgtattattattcacgatttggtggaatatctccatggttaaatgacgccgccaaagcatgcatgatatcattacctaaaa

SEQ ID NO: 1492 - DNA, 1814 bp, Zea mays
ctcacccacggcgcgcggcgccacgccctgtctcccctggtcgctccccgctgaccctccgtcccccgcatcccacgcgcgcaattcgcagccccgagcgagcgagcacctgctctgctcccggatcaagacaagcttcaactcgcgcacttgtttacgcccgcccgcacgggcacggccagccacgacgccgcggcggaagctgcccagcagccgcgcctcccctggcggtgccgagtgccgacccttaaaaaaccacagccgcgcgagcgctgatcggtgcctagcacagttggcacacacacacacacgcgtgcagtgacagtgagagagagagtgacaaaaacacagagacccggcgatggctggcccgccgccgctgaggctcaaggacctcctggagctggactgcgactcgtgcagcgccgcgggcttccgctgctacccgcgccgcctggccgagtcggcgccaatgcggcacctcctcgagtcgtcgccctccctgcggcgccgccgccgccccggcaagctgtcccacctctccaggagcctctcgcgccgcctcagcaggggcggcggcggcttctggaggcggagagacgtcgacgaggaggaggaggaggtcgccgacgccgcggtggcgacgacgacgacgacgacgggcccgcccgcttgctgcggctctagctccgaggagcaggagacgtcgtcgtcgtcggagtccagcgacaactcgtccgagaggaccagcaggaggtcacggtccgaatccgagtccgagtccgacttctcgtcggcgaccgaggagagcgcgcaccatcatccttcgcagcccgccgccgccgccgccgccgccggagacgagcacgaggtggcgatgaagagcgcgtccaaggaggggtccagctccgggtcggaggcgggcgacaaggagcagcagctcagcccggtgggcgtcatggacttccccttcgacgacgacgacgaggaggacgagtcgcgggacgccggcgtcgcgtgctccccttctttcagcctcgcgcgtctccagaggagaaagacgcacaagatccgacggctcgggagcggcggcggcgacgacgagctggcgcccctggatctcgaggcgctcctggccacgacgcaagactcggactcggaccccgaccgccccgccgacgagcagatgatccagtgccgtacgggaggcgcggcggcggccacgccgacatgcgcaagccgcggtcatggtcacggtcaccgccgcgtcgctggcgtttttggcgtgccagacgaggacgacgacgacgacggcctcgtctcgctgctcacgcgcacggtctcggctggcctggacggcgtgtcggaacggcttctgctcgacttcttcgtggaggtcacgaaacgccggcggtcggaagcgcacgccgagccgtgcaacaagctccctgggccggcggccggtctgctgcgacgggaggctgagcggctgctggtagacggcgaggctgtggcagcggccaggggctggctggagggaacggcgaatgggcggtggggcttgaaggacgtgctcagtggcggcggggcggacatcgtggcggagatggggcggggccgcaggtggatgcaggtcggcgaggaggagcgggaggtcgtcgcgttggtcacggggatgctggtggatcaactggtgggcgatgtggtgaggtgtttggctgtgtaggtttgttccttcagatatgaagttgatgtaagtaacgtgctaggaaatcgaacatattgcaaatgattagtaagaaaactagcttggc

SEQ ID NO: 1493 - DNA, 2195 bp, Zea mays
gctcttctcattactgacaggcgccagagagagagagagagagaccacaactcctctcgcctcgcctcgcctcgcctcccccggggaagaagaggaggagagggagctgagcagcagccggccgacgcgggaatgctcgtcggcggcgggcgggacgacgaggaggtgctccggaagctcaagagcatggacgtggacaagatggagaacggcggcggcggcggtgaggcggagagcccgcgccccgccgtcaagtaccacggctggaaggccatgcccttcatcatcgggaacgagacgttcgagaagctggggacgctgggcacgtcggccaacctgctggtgtacctgacgcaggtgttccacatgcggagcgtggacgcggccacgctgctcaacgggctcaacggcaccaccagcctcgcccccatcgtcggcgccttcctctccgacgcctacctcggccgctacctcgcgctcgccatcgcttccatagcctccctcatcggcatgttcctgctgacgcttacggccggcgcggacagccttcacccgccggagtgcagcgtgggggagacctgcgagaaggcaacgtcgtaccagttcgcggtgctcttcgtcgccttcgcgttcctggtgctgggctcggcggggatccgcccctgcagcatgcccttcggcgccgaccagttcgacccccacacggagtccggcaagcgcggcatcaacagcttcttcaactggtactacttcacgttcacggcggccatgatgatctccgccaccgtcatcatctacgtgcagagcaacgtgagctggcccatcgggctgggcatccccacggcgctcatgttcctggcctgcgtgctcttcttcatgggcacgcgcctctacgtgcgggtgaagcccgaggggagccccttcaccagcgtcgtgcaggtgctgtcggccgcgctcaagaagcggtcgctgaagcagcccaaggacccgaagcaggacctcttcgacccgccgcacaccagcgccatcgtcacccagctcgcgcacacggaccagttccgctgcctcgacaaggcggccatcgtggcgtcccaggacgagttgcgccccggcggcgccgcgcccgcggacccctggaggctctgcagcgtgcagcaggtggaggaggtcaagtgcctcatccgcatcgtgcccgtctggtccacggggatcatctactacgtcgccgtggtgcagcagtccacgtacgtggtgctctcggcgctgcagtccgaccgccacctcggcggcgccggcttccagatccccgccgcgtccttcaccgtcttcgccatgctcgcgcagacgctgtggatcccgttctacgaccgcctcctgctgcccaagctccggaagataaccggcaaggaagaggggttcacgctgctccagcgccagggcatcggcatcgcgctctccaccgtcgccatggtcatctctgccatcgtcgaggaccggcgccgtgccatcgcgctcagccagccgacgctcggaaccaccatcaccggcggggccatctcggccatgtccagcctgtggatggtgccgcagctcatgatcctgggcctatcggaggcattcaacctcatcagccagattgagttctactacaaggagatcccggagcacatgcggagcgtggcgggggcgctcgcattctgcaacctggcactcggcaactacctcagtggcttcctggtgaccatcgtgcaccggaccacggggtccgggcagaactggctggcgcaggacctcaacaagggccgcctcgacctcttctactggaccatcgcaggcatcggcgtctttaatctcatctacttcgtcatctgcgccaggtggtacaggttcaagggaaccagcaactgatccgccgaggtgaccatatatcgtctctctcatggttggacaggttggtggggttggataattatgttatggcctctctcttttttgtttattactttatacctttgttactggtcctttcatttgaatctataggatgatcaagtggctgatgaaagaggagaaagaaacaaaatagttggttttttgtaatttgtaagtggttaaactgaaatacaaatggatgtaagcttgaatgaaagtttagcacagttaccgaccagcttatgattacaagcatttactcc

SEQ ID NO: 1494 - DNA, 1959 bp, Zea mays
ccgctcgtgcttactttaaatatcgccctcgcctcgcctcgccgttctccccccatcctccccgccacctctcaccccccgcaagcgagtcagccaagccaagcgacgcccaacccccgcctccattcccgggccggagacgcgcctgcctggccgcgacgccgccagccatgggaatggggccgctcgacaacgccgcgtcggccgcgctggaggccgccgccgccgccgccgccgccccctcgcgggcgggctcgtacgcggtgctgcagtgcggcgaggactcggagtacgtgcggcagaagtacggcggctacttcgccgtcttccgcgcgctgctggaggaggacggcgagaggtggcgggtgtacagcgccgtccgcggggagctccccgccgacgccgaggcagccgggttcgacgggttcgtcatctccgggagctgcgccgacgcgcacggcgacgagccctggatcctcgcgctcgtcgacctcacccgccgcgtccacgccgccggcaagcgcgtcctcggcgtctgcttcggccaccagatcctgtgccgggcgctgggcgggcgcacggggcggtcggccaagggctgggacatcggggtgagctgcatccacccgacggcggcggcggcgcggctgttcgcgccgctgaagctgcccgtgcacatgccggtgatcgagttccaccaggacgaggtgtgggagctgccccccggcgccgaggcgctggcgcggtccgacaagacccgcgtcgagatgttccgcctcggcggccgcgccatgggcgtccagggccacccggagtacagcaaggacgtcctcatgagcatcgccgaccgcctcctccgccacaaccacatactggtaattaatcataatagtaacgacagcgtgccgagtgttcgtttgtctctctgtctgtctgtctgtctgtctgtctgtgacatggaaaaaaaatatctgtccttgttttgtttgttgttggcaggactgccaggtggaagtggccaagacgagcttcgacgtgcggcagccggacaaggagctgtggagcaaggtgtgcaggggcttcctcaagggaaggctccagtcgtcgcagcagcaaggtgtggcgctatagcaggaggaaattggggggcattggatgcctaggttaatccgtcatattgtttgttttttattatatgtgcttcagaactcaagagttgtacagaaactgctatcttcgtccgaagcattaataaaaaaaaaggagggaaaaaattgttcgttggtttggttccatctttccgtggcaccagttcattctcgtagtgcctttgcatccacttcttttctttttaacacaccttgcatatgctgctttcatcttcggctcatttgtggactcaaactaaacgactacgacagcgctgtccgcttaccgtcggggtatctgtcgttggagctgatttttacggaggacaaaaaaaaatatctgtccttgttttgtttgttgttggcaggactgccaggtggaagtggccaagacgagcttcgacgtgcggcagccggacaaggagctgtggagcaaggtgtgcaggggcttcctcaagggaaggctccagtcgtcgcagcagcaaggtgtggcgctatagcaggaggaaattgggggggcattggatgcctaggttaatccgtcatattgtttgttttttatatatcaagagttgtacagaaactgctatcgtcgtccgaagcattaataaaaaaaaggagggaaaaaatagttcgttggtttggttccatctttccgtggcaccagttcattctcgtagtgcctttgcatccacttcttttctttgtaacacacgttgcatatgctgcttgcatcttcggctcatttgtggactcaaacaaaacgactacgacagcgctgtccgcttaccgtcggggtatctgtcgttgg

SEQ ID NO: 1495 - DNA, 1250 bp, Zea mays
gtcatccgtgcatacatgctcattgctcaccaagggcaagggaggaggagaggacacacagcagtagcggcgaaatggcggcgatgatgatggatagtaccgcggagaaagacctcgccggcgacggcgctgcggtgagcgggcacgggcaggacttggagcggtcttgccatgaccaggagcccgccgctgcagatggtgcgagcagcagaggcctagccatcgggcgtttcgtacgggagctgatggtggagggcgtggcgtcgttcctgctggtgttctggtccgcggtggcggcgctgatgcaggagatgcacggcacgctgacgttccccatggtgtgcctcgtcgtcgcgctcaccgtcgtcttcgtgctctgctggctcggccccgcgcacttcaaccccgccgtcaccgtcaccttcaccgtattcggctacctctcctggaccaagctgccgttctacgtggcggcgcagctggcaggctcgttgctcgcctgcctgtcagcgaacggcgtcatggagccgcgggcggagcacttctacgggaccgtccccatggccggcggcgacacgaggctgccgttcctgctggagctggtcgcctccgcgctgctcatggtcgtcatcgccaccgctgccagaggctccaatcagacagcaggagggctggccatcggcgccgccgtcggcgccctgggcctcgtcatcgggccggtgtccggaggctcgatgaacccgatcaggaccctgggcccggccatcgtgctcggcaggtacacctccgtctggatctatctcgtcgcgcccgtcgccgggatgctcatcggcgccctctgcaaccgcctcgtcaggcgctccgacgccatcatcgccttcctctgcggcgccaagcccagagtggtggcgccaggccagaaccgcgccgcgcgccgttggagcacttgcgtctccgcgctactagcaggctagccgtcgggcgccgccatcgtggcctgcttgttgtaacagttatgagtcaaaccactcttttgtgatacacgctaacacgcctacacccaacgtttcgaattaaaactggctttttagattactgcagttataatttatatagataaaaatactgtagaattaatagaagacagtatatattaaaatcaaacaaacatgccatcaatctgactcaaactgaagaaaatactaccagttttttgctcctgcaatagaacgtcgcgtaattaatttgga

SEQ ID NO: 1496 - DNA, 2008 bp, Zea mays
cgatcgcgtagaggaaatcgaagtctgtcgcataggacagttcggctaggccggagacctgccggcttgacggagagttgatgcagatctgatctcgcagcaacgttgtggtagagcgtgctgataacgtgttgagaacaacgttaccacggatcactagatctgctcccttcccttccgtcagcagtagagacgcgagaagatgtagagaacccgtctcccttcctagaagcacgacagagaaacacacaagacacaggatatatagggttgggcctttggcctctttctcttcactgtattatgagggggtgtacaggttccttatatagagatgtgagacccctcagggataaagtaggtatttgcccacataaccctaactagggttacttaacacaaacttgcatggtgccatacatacgtctaaacagggcccactacaggcgctactaggacggcccccaagatctgcgttcagctgaacctccaggcccagagcaattgagcagcccggcccaaaccagtgccacgcaatgctgtaggacccggtagtaaccggtcgacggtcgtccgaggtggcagcgccgcagctccagaatccagtgctgcgccccgattgggcggaaccaaatccagaaatctccacctcacatccgccccctccaatcgccgctcgctccttccccggcaacaaaacacttgtgctacaaatacgtccacgtaacgcctttctccaagcctgagcactccatccactagacactactttactcaaagtctagagctagcttttgctttgctcaccagataaaccgcagcagatggcgtcgacgatcatggccgccacctcccgcatcgtcgcggccaagacgccgtttcttggccagggtcgcgccgccgccaatgccagccccctccgcgacgtcgccgccgccgctgctggcggccggatcaccatgggcaacgacctgtggtacggcccggaccgcgtcaagtacctgggccccttctccgcccagacgccctcgtacctgaccggcgagttccccggcgactacggctgggacaccgccgggctgtccgcggacccggaggcgttcgcgcggaacagggcgctggaggtgatccacgggcggtgggcgatgctgggtgcgctgggctgcatcaccccggaggtgctggagaagtgggtgcgcgtggacttcaaggagcccgtgtggttcaaggccggcgcgcagatcttctcggagggcgggctggactacctgggcaaccccaacctggtgcacgcgcagagcatcctggccgtgctcggcttccaggtcatcctcatgggcctcgtcgagggcttccgcatcaacggcctcgacggcgtcggcgagggcaacaacctctaccccggcggccagtacttcgacccgctgggcctcgccgacgaccccgtcaccttcgccgagctcaaggtcaaggagatcaagaacggccgcctcgccatgttctccatgttcggcttcttcgtccaggccatcgtcaccggcaaggggcccctcgagaacctgctcgaccacctcgacgaccccgtcgccaacaacgcctgggtctacgccaccaagttcgcaccagggtcttaagctagctaccgggccgcggcgtgccaggacattgtgttgtacactactcgtttctgtcgtgatctgtaccatgaacgaatgcaaatattcttgtgctctcccagaaggaacgaactggactagttttgctcttccattccatgtatactctgcttcagcatatatgtagttgtgtctactggtttttgcagttgttaactgatttgcgtccatatatgaggttgtgtctactttttttttacaaacacaaccaggctgctaattacagtaggcatatttccaaactctggattcaaatgtccggaagaaagatggcatctggtggcagattgatattaacaaacacttccttgaatagttggccaatttataca

SEQ ID NO: 1497 - DNA, 618 bp, Zea mays
cccacgcccctccccctcttgataagcccacgtcggcggcagggggggcggccgccaggcttgctatagctggtccatggcaccatacatgtaagcacgcacacaggcacacacacacacgcacgcaatgatctacgtatctagcagcagcttatcatgtcgtcatcatgcatgcatggccgacggaggtcgtcatcttatctgggagcgtgtgtgtcttggcaatgggaagctgcatgcgcctctcgggcgtcggcgcgtcggcgcctagctgtagggcggcgtgccatagagctgcctcctgccgctcacaccatgctgttgacgaggactgatggtggccatggcctctcggcgtcggtggcggcggcgccggcgccgagttttacctctctactaaggtagggcaacttgtatcctttggcaattgttctcatctatctgggtctgtctgttggctgcccggtgacggtatacggtgatgttctaatagtactcaattggtcttggatcggagttcatgctacggctcctctgttatatattacacggctgacggctccttattaatgtgtacgttgatgatgtcattaataatatgaatctgatattgtataa

SEQ ID NO: 1498 - DNA, 3098 bp, Zea mays
cttgcttgcgcttcctccgtccccctagccgctgcaggtcctagttgccccacccctcacgccaatgcagcttccccctgttttgttgctttgaccgccttaaacacctcagggcctgcagatgtcgcaccgaatcacatccccttcacgcctcctgctcgaattcctaacgcccgagaaaccaataacctggtggtgatgccgctgagcaacgccgtcaccgtcacttaatcccaactcccccactagttgtctctcttcttctcttcggttacaagagcagaccggagttagcgggcagtggaggccgcgatgaagagcccccctgtcatggaccccgaggcgccgccggcgggcactcctcccgatgacgaggaggagaagcggggaggacggaagggggtgccgtggcggatgacgctgagcctggcttaccagagtctcggcgtggtgtacggcgacctcagcacatcgccgctgtacgtctacaaggcggcgttcgcggaggacatccagcacacggagagcaacgaggagatcctcggcgtgctctccttcgtcttctggacgctcacgctcgtcccgctcctcaagtacgtctgtgtcgtcctccgcgccgacgaccacggcgagggcggcaccttcgcgctctactccctcctctgccgccacgcgcgcgccgcgctcctcccgccaggacgaaccgccgcctgggacgaggaccagttctcggacggagccggcggtggcaccaacaaggctacggcgcagaatggcaatgctgtgacgctgggagggggcgccgccgccagcgtcaggaggctgctggagcggcacaaagtgctgcagcgggttctgctcgtgctggcgctggtgggcacctgcatggtgatcggcgacggcgtgctcacgccggccatctccgtgttctctgcggtctccgggctggagctgtccatggcgaaagaacatcataaatatgtggaacttcctattgcctgtatcatactggtttgcctgtttgcactgcaacactacggtacacaccgggttggcttcatttttgctccagtggtgatcacatggctcctatgtataaccctgatcggtgtttacaatattattcactgggaacccactgtatatcgagcattatctccgtattacatgtacaagttcttgaggaagacacagagaggaggttggatgtccctgggaggaatactgttatgtgtaaccggttctgaagcaatgtttgctgatctggggcatttcaaccagttgtcaatacagattgcttttacatgcatggtgtatccagcattgatccttgcatacatgggacaagctgcttatctgtgtaagcatcatatcatggaaagtgactacaggatcggattctatgtgtctgtgccagagaaaattaggtggcccattatggcaattggtattcttgcagcagttgtgggaagccaagccgtcatcactggtacattctcaatgatcaagcagtgcgcttctctgggctgctttcctcgggtgaagataatccatacatctgccaaagtacacgggcaaatatacatccctgagatcaattggattatgatgatactgtgcttagctgtaaccattggttttaggaacacaaaacacttgggaaatgcatcaggattggctattataaccgtcatgctggtcacaacgtgcctgatgtccctggtgatagtcctgtgctggcataagagcatattccttgcgattggcttcatcctgttctttgggaccattgaggcactgtacttctcagccgcactcatcaagttcagggagggagcctgggtcccaatcgttcttgctctcatcttcatcctgataatgtgcgtctggcactatggcaccatcaagaagtacgagttcgacgtccagagcaaggtctccatcaactggctccttggtctcagcccgaaccttggcattgtccgcgtccgtggcattggcctcatccacaccgagctcgaaaccggcatcccagctatcttctcgcatttcgtcaccaacttgcctgcctttcaccaggtactcatatttatgtgcatcaagaacgtgccgataccacatgtccggcctgaagagcggttcctcgtcggaaggatcggccccaagcagtacagaatctaccggtgcatcgtcaggtacggctaccaagacttccacaaggacgacgtggagttcgagaaggagctggtgtgcagcgtggccgagttcatccggtcagggtcgtccaagctgaacggcacggctgaggaggtcgacgaggaggaggagcagcgcatggcggtcgtccgctccaacagcgtccgcatgctggaggaagaggccacggtgcagaacaccgtcggggtcggcccgtcgtcgcgggccagcagggagatacagtcgccgtcgccggccccggcgactggggttgggcccaagaacaagaagcgggtgcggttcgtgctgccggcagcgagcccgaagccggacgccggcgcgcaggaggagctgcaggagctgtcggacgcgcgggaggccggcatggcgttcatcctgggccgctcgcacgtgaaggcgaagagcgggtccggcttcctccgccggctcgtgatcaacttctgctacgacttcctgcggaggaacagccggggaccccgctacgccgtcaccgtcccgcacgcctccacgctggaggtcggtatggtgtactttatctgactggactgaactgaacagccccctgaaactaactctgggagtgagaaactcagaaacataggaacatgaaaagataagatgaggtgaaacaaaaaaaaaggttttcagctgtatatgctaggttttgtaactgctggtgagtttcgttgtaaaatgcagccctgttttcttgttaggcgttcagcttctctcgtaatccactagaaaatttattattatgggctagtttggtaatatattttttcgaggtatttctatttttcgatggaaaattagttcatttaaatgaagctcaagttctcaaactgctgcaagatcagccaagattcttccagctacag

SEQ ID NO: 1499 - DNA, 2115 bp, Zea mays
cacgcgaggcggaaggggaggcgagtggcgcgggccccactgcagctactatctcctttggcgtcgctgtccagtagtgcgtcagcggctcagcgcagcgtcgcttccaattataagtagcgtggccagctaccatctccccaacctcgcctccccccactccttccctccctccctcgctcacccagtggggcagccaaagccgagccgcaaccgcaaagatcttgcgcggcctcctttccccagctcgtcactgtgccgctcgtgccatccaccctcggttcacccaaccaacaatccatccgccaccacaccccgctgcggcgatgtgcggcggcgccatcctctcgggtttcatcccgccgtccggggtgccggcggcggcagcggcggccaagaagaaacagcagcggcgtgcgacggcggacctgctgtggccggggcccggcaagaagggagcgccccgggaggaggacttcgaggccgacttccgcgagttcgagcgcggcctcggagaggatgacgacgtggacggggccggcgacgaggtccaggagcttcctctgccggagccggcgaggctcgccttcgccgccgcggttggggcgccgcgcactgcagttgacggcgtgatgactccaaaggatggtgaaggagacatgcctactaccgctaccaactcagcagcaaataagcgcaggcggaagaaccagtacaggggaatccggcggcggccctggggcaagtgggcggccgagatcagagaccccagcaagggcgtgcgcgtctggctcggcacatacagcaccgccgaggaggcggccagggcgtacgacgccgaggctcgcaggatacgcgggaagaaagccaaggtcaatttccgggacgaagcggcggcagcagcaggtgctcagaaggcaccagccgcaactactccaactgcttgtggcaacgcagcgaggctaggtcctccacctccaccgccgaagttccgtgctgacgaggttttcgggaacatgaacggtggcactggcagcaacgatctgttcgcgattatgttcgcgttcagtgacagtagtagtaaggtcgttcgtgtggagccaggtgagggcgccgccggtttcctccccgcagatctgttgcccggcagtaagaggtctgcggctaacatgctgctgctctccgaccagagcagcgactcgtatggctcttgtgacttggggtgggagtgggactgggacgatgacaccatgacctcagactacgcctcagtctttgctccagctgctcccagtaacgttgtgccagcatggtacacgcaaggtggaccggtgtcgaagagaacgaggagcagctacggctacggtgcggccatgccgggcggctttgaccctgagacgaactaccagtaccagccgttgccttatgtcgtcgagagcagcccgtcagacggcgcgtcgacggacgacatggactgccttcaaatgatgcgggctggtgatgttccacaggatggggcgagcagtggtggtggtggcggcgacggcggcgatatctggagccttgacgagctgctcatggccgctggcgcttactgagaaaagctatgtgcatcgcattcgcatgtgctagacggctacttgctgtgccgtgaatggagtgtttctcagcttcgttttgcttttaattttttgttatgccaggtctcctgcttgtgcttgtggtgatgatgcaggagagccatggtgggtactatgcttttgctgccagtggaactgtaagacaatgtttatatagtatctatactatgttggtgcgtcgatggttcatggttggttggaagcgagtttgagactgattcagtaatttaccttgtctacatatatgcctgatcaactcgattgcgcgtactgcgatactgcatgttactaatgtgtatgtggtgtgcctgtactatagactgcaggtctttgtctggaagcactcgatctcgctttctacgcaacatttcttttctgtttcttgggggaatggtaggtgccagccaaggccgatggtctgtgtcaccagaaatcgagaaagatctagatgacctaaacaaggttgctgtttgcc

SEQ ID NO: 1500 - DNA, 2203 bp, Zea mays
aacacaccactgaactgaactcccagctgtaatctatctccttgcagtaagcaagggcagcgagagtacgacgacgacggcccagcaacttcctcgaacagagaaaaaaaaaagaacagcacctaacctagggaaggatgtgtgtgtatgcgacgacggcgacgactatgtgagggtggcatcaaaagcggcggcgcgtgcagtttaggtagacgctgtttcccgttgacaccgcgtgccgccactgcgcgagtcggtcacgcgccccgcccgtcgtctgatgccttgcactgcactgcactgcgcgcttgcatgctcaacccaagctccccggcgcgcgcggcctcgatggcgactggtcggggcgggaccgcgggagcgggcgcgggcctttataaaatggcacgtcgtgctcgcagccaggcagccagccacgcagcaggagcagcagcagcagatctggcaggagctagtgatcactgacagtgacagattgacatggcggagaacaacgtcgtggccacgtactactacccgacggcagcgccggcggccatggaggtctgcggcgcggagctcggccagggcaagcccgacaagtgcttcgacgacgatggccgccccaagcgcaatgggacgatgtggacggcgagcgcgcacatcatcacggcggtgatcggctccggggtgctctcgctggggtgggccatcgcgcagctcggctgggtggccggacccgtcgtcatgctgctcttctcgctcgtcacctactacacctcgtcgctgctcgcagactgctaccgctccggcgaccccagcaccggcaagcggaactacacctacatggacgccgtcaacgcgaacctcagtggcatcaaggtccagatctgcgggttcctgcagtacgccaacatcgtgggcgtggccatcggctacaccatcgctgcctccattagcatgctcgcgatcaggagggccaactgcttccaccagaagggacacggcaacccctgcaagatctccagcacgccctacatgatcatcttcggcgtggcggagatcttcttctcgcagatcccggacttcgaccagatctcctggctctccatcctcgccgccgtcatgtccttcacctactcctccattgggctcggcctgggcgtcgtccaagtcatcgcgaacagaggcgtgcagggcagcctgaccggcatcaccatcggcgtggtgaccccgatggacaaggtgtggcgcagcctccaggcgttcggcgacgtcgccttcgcctactcctactccctcatcctgatcgagatccaggacaccatccgggcgccgccgccgtcggagtcgacggtgatgaagcgcgccacggtggtgagcgtggcggtcaccacgctcttctacatgctgtgcggctgcatggggtacgcggcgttcggcgacggcgcgcccgggaacctcctcacgggcttcggcttctacgagcccttctggctcctggacgtggccaacgccgccatcgtggtccacctggtcggcgcctaccaggtctactgccagccgctgttcgccttcgtggagaagtgggccgcgcagcggtggccggactcggcgtacatcaccggggaggtcgaggtcccgctcccgctcccggcgagccggcggcggtgctgcaaggtgaacctgttccgggcgacgtggcggacggcgttcgtcgtggccacgacggtcgtgtccatgctgctgcccttcttcaacgacgtggtgggcttcctgggcgcgctcggcttctggccgctcaccgtctacttccccgtcgagatgtacgtggtgcagaagaaggtgccgcggtggagctcccggtgggtgtgcctgcagatgctcagcctcggctgcctcgtcatctccatcgccgccgcagccgggtccatcgccggcatcgcgtccgacctcaaagtctaccgcccgttcaagtcctactgatcagattcacggcctacgggagacgcagcagcatgtggtatataggcatatactagcaaccatgttcgtgagttgcaactcataagtacttaaatcagactctgcatcattgctaaacgcgagtttttttaacttgtatacgcatgattcatgagtcccaattacatatgaaaaggatgcaacacaatatatattgaaatataaaagatctcgtaccgat

SEQ ID NO: 1501 - DNA, 1874 bp, Zea mays
attcaaccaatcaaccacacgagggcatccctccagactccagtgatccagtccgtggccgtggcgtgctggaccggcggctaggcgggcacgtcagccgccagctaagcgaccaactcttcaaaaccccggtctctccctcgagcagtcgagctcctccggtctctgccatgaacagcaaatgagcagagctcccaagccgttcaatctccagatcatttccctctcgtcctgctccaatccactcgccggccatctccacaggctcgcctcggctgctgcagctgggttttgctccctgagccgccggatttcgacaggggtcgggtcggccgtccgatggggagcagggtgaaggaggacgagaggaacgagaagatcatccggggtctgctcaagctccctggcaaccgccggtgcatcaactgcaacagcctggggccacaatatgtatgcacaagcttctctactttcatctgtactaattgcagcgggatacaccgagagttcagtcatcgtgtaaaatcagtatcgatggctaaattcacttcccaagaagtttcggcacttcaggaagggggcaatgagcgtgctaaggaaatctatttcaagcattgggacttgcaaggccctgttattgacagtagtgatgtacatagactcagaaatttcatcaagaatgtatatgttgaacggagatattcagaccaaagaattggcgaacatttagcgcaagcaaagaaaccatcatcttcgaggaccgacgatcccagccctgcaacattcaaagatgctaaattatatatgtcaaaaaatctgattgacttcgattcagatctggaacctcctcaaggtgttgctcagactgatattcagaagggctcttcacctcaaacagatgttggttgggcaacttttgatgatgctacatccaaaaaaactacaaccatgccttcaacttccagtactaattttttggagggtccaatgctacagatcgccgatttgacatcagcaccacaaattagattttcaaatgccaagtccttgtcttttgccccgtcaaatcgtggaaaccaactgaaccaacagaatttctctcctgtgaatactacacagtacagcaatactctgttgaacagagctactagtgctccagtgcatagccaggatatttttgcaatgagctatcgtccagtatcttcagcctggaactggcaaccaaatcccagtgtaaacatgcagtacggacaacatcgcacgcattatcctgttgggattgtaaatacaactcaacttgcccatccatatccagtgaatcctgttagcttggcaggagggcctgcatcggctcatgcctccaccaggtttccttctttaacttctatgcaagaagcattaccaaatctgggcagtaccgcagtgctgtcgcgtgctccagttcatcagtacatggttcagcaacatacagttcaagtaccgaattatactttcccctccggatatgaaggaaccagagggatcgccgcaactgccagcacatacggattacctccaatggatcagcgtttggctgcgcagaatctgcaggtcatgaaccacggttctttaccccgagttggtgggaacccgtttgcttagtgttgttacttcggtcacctcagttcggtcgtttgtgtatagttttagcatttgatgatacggttttgtcgtgagaagatgcgagtggaataatgtagctgatcaagcagagtggcaacaagtgcctgacaggttttgtgtatatgatttttattttcgctatggaaggtgtcgattgctccatctccgtcgtccctcccagtcccagctgcaactgcaacctctgctgttcc

SEQ ID NO: 1502 - DNA, 3399 bp, Zea mays
gcaaatatatatatgtacaattccggcatcacaacaagctatcaaagtctagaaacagatacatcgtataaatttaaaacaaaaaagaacaaacaggaagacagacaaacatcgctacacagtactacacacctcggtgatctttcccgtacatcctacttagcacacgcgtataggatcaccaacggagatccgacggtacccgaacatgtggcgcatcaggttcggcagccttgctgcctccgccggcaccaccgccgcacctgcagcagctacgtctacgtacgcagcaggcgcctcggtgctacggctacgctccttccaagacctcctcatcgtccgaagctcatccgccacctccttcatcgtcggcctcacagcgatcctgtccgcgtccagaacgctacacttgagcgccagcctccccagctcgtcgagcagggcgacgtcttcctccgccgttatgacgtccctgtcgaacaacgccctcccggtctcttccgtctcgtacgctctggtgaacctggcgaggaggccgtcgtggccgccgtccccgtccccgtccctgctgaccagcgccatcaggacgccgccgaacctgtacacgtcgctctccaggttcatcagcacggagccgtagcgggacgggtcgtcgttcagagctttctctagaaggctgccagtgatcatcactccagcaccaacaacagaagtagtctcgctctccttgaacagcgtacatgacctcgagaactcggtgagcttcggtacgaggttgttgtcgaggagtatggtggacgccgagacgctgccgtgtccggtgacgccagtttccgacgaatgcaggtactgcaacgcttccgcggtcttgatcgcgatcctcatgcgtagatccagcgggaaatcctcctggctacacaggatgtcgaggatgcttcctttagcgacgtactcgtagaggaaagcggtggtctggggttccagacagcagcccagaactctgacgatgttcctgtgggcgatcttggacacgaccatccctccgttgatgaacgcctcctcagagccctcgtagaccaatctatgcaccgccaccatcgtgttgtcctcaagcgttcctttataaacctcggttgctgatgtacctccactgagaagattggagtaattatgtgtgacttcatttatctcctcctttgtaaaaacccttacattgtccccaagttcagatatgaccttagagtagctgctagcgtttcccttgaagaagctcagcttcttcttgaagctgggcgagcttgagcctgcctgcctgtactgtttggcccacatggagtgtgtcgccagtatggactgcggactggtcttcagttctttcttgagcatccgaaggcgtttggccacttcattcatctgaggacgtgtgtggatgttcagtgacaggcactgggatgctagcttccacgactctttgaggatcttcacgttgtccttctcagctattgctgcatcaaacagctccctcagccctttccccttggcacaggctttgttgaacgtagggatcaggttgacgtccccatactttgccctcttccgagtcagtagctccaagaggactataccgaagctatacacatcgcttctcggcgacagacacccctcgtgaaagtatacaggatccatgtagcccatgcttcctttcaaggtcgtagtgaactgggtagtgccactgaaaaggaaccttgacagtccaaaatctgatacctttgtcgtcagattgttgtctagaagtatgttggcgggtttaatgtcgccatggtaaatatggttgtcgctctgcgagtccatcgaatgcatgtagctcagcgcctctgcacaccctatcgcgatgcccagcctcacgtccaaagggatagaggcgtcgcttctgtggagtatgtcgtcgaggtttccgttggagatgtactccgtcaccagcatcagagtgctttcgccaatgcagtagcctatgagtttcaccacgttgttgtggttcatcacgctgtggatgttcacttcatccatgaactcgtcgcgcaagtcctgtcggatgtatcttttcactgccaccagatcatcgtcggcgtcaaggacccctctgtagacttctccgaaaccaccttttccgataagagtgctgtaattgctagtgatacttgcgatctcatcttctgtgaaaattttgattttttgactcattgaacccatgggtgagatctgcagtcataagctagttttcttcatattgtgctccaggccagtgatttgggtcccatgttcaagatctaaagttgatagcctgatagaaaaaaaaatcagttcgtccacgctccacggccagaccctgagagctgagaccgtgagacgccacaaacggcaaaccctagctggctagctccctggaggactggaggtgacggctgctggctgcaagactgaaggctccgacgctgtcgctctcgctccgaggtcagcactcagcactcggcagtcggcaccaggcaaggcaaggcagcaagccagcagcccagcacgacggtcgccggcgacaggcgaccagccatcaccgcgtcaggtggccagcgaccagcgtccagcggtacaggcgtacagccattaggcggccagccggccagcgccctcggccagcggcagcgcgcaccgcccagctggccagcttgacagcatcaggcggccagcgccctcgcccctcggccagcgcctaacgctccagcagccaagtcgtcgtcggcaagccactgcgccagttcatggcttggcttcatgctgataatctggtactagtatggagacatggagattggagagtggtcctgtgcggtgcttactgcttagtgcttagtgttgtctgaattggtgttgtgcggtgcttagacatggagataggtactatggattgaattgatgttgtctgttctgttgtgcggtgcttagacctgaccacctgttgtctgttctctattgactgttgtgcttgtgccattgtgcacttgtgccgttgtgcgccttgtgcctgagctagtgcctgtgccacactgccagtctgccactgcgcaatgcgcatgccgcatgatgccgttcaggcgttcagctatggactgaagcggtgaagcctgagctagtgcggacgtgcggtgaagcctaagctagtgcagacgcctgatggctgatgtctgaagcctgatgccgttcagctgttgtgcactatttcactgttttaatttttaaataatctgtgactggaatattgtttcactgttttaatttttaaataatgtgtactgtgtctgtgtactctatagtctatattctctctattattgtttcactgaaata

SEQ ID NO: 1503 - DNA, 3900 bp, Zea mays
gggagctgcgttggcgccaccactatttgccgtttgccgcgcgcgctcttccgttccctcctcgtttcgtttttctcctccacttcttccctccactccatcctcgcttcgcaaacccccaacctgcttctgcttcagacgaggcgagatccccaatccatcaccacatcacactagatcacccaacctccctccacatccatcttgcagcatccgccatggcgccgccgcccaagccagccgaatcttccaccaacaagaagaaggtcacccccgcggaggtcgcattcctcgtcgaccgctacctggccgaaaacggattcaacgccgccctcgccgcgttccgctccgaagccgcgcacatctacagccccaccaaatacagcaagaagacgcccaagaggctcatcccgctcgccgacatcctccacgactacatcgccctcaaggaggcccgcgtcgccatcgaatccgcaatgcaggccatgcaatctctcgtttccacctactacgcatccggctcctcgtccgctgctccgcctcatatgaacatgaacatgaacatgatgatgcctccccttcccccgcctcacgccgccaccggtgcccagccgtcatcgccgccgctcttcttctacgcgccgaattcttcgtcgcctccgtcacaaggaaccgccggccacgcctcgcctctcgttcatcactacgctcacgcatccgccgcgggccttgtccacaactcctcctcagatctgtccactccagctcccacctctctgcccactaataaaaagaggaaggcttcagggaagaccgccgccgcttcagcctccaagagatcctgcattgctcctaatacaaccaccgacgcaaagggtagagctgtacccgcggcgtttcaaccgtcgaatcatcagaagaacatgggttccgctgcccaaccaacttcagctcaacattcagctccactccaaacttcatctgttgcaaagagcttgtttgcgccgctcccacctccggcccactcttctccctacacgccgcagcaacaagatcagcctgctgctgcttatccgtctgcaactccagcgtgtgccgttgcccaacaggaaatcggcccctcccagtgctctatcgtttcttcttccaagaccctcatcgtcagccctctcaaagggagcgcgtactatgctgtcgagaggagctaccatctcagctcccccttgaaaccgaccgcccgcagttcccccttgaaaccaaccacccgcaagttgaacttcgattgcaccgagctaggtccctgtgagcagatttgcgacaaggcctctgcctctgcctcctccgacgaagacaagcaatatgactttgacatggatttcacgaacttcgatatatgtgatggtgaattttcgttttctgagctcctgcttgacttcgatcttgacaatgaaggtgtcctgaacgcttccacaagtgatcaagttcaaaggctagagcctgctgctgctgctgctagtggtcatatggcagcgggtcctgttctacctgattcagtgaagccagtcgcagcagattctgctcaggaattgaatccccaaggagcgaccgctgttacttctgtcagggctattacgaagaggataaagattgtgagccctgccaagggccgggcagcttcttagagcagctagcaggtagattttcagatctcgccaaatcaggtggcattccatgaccaactgccctgctctgtctgtctgagggcattttcaatgtagcatgcatgactctaatgttatgttagcattttatgttcacgatgtaaaggctaatatcgcgttactaattactacttttcacaagtttgctgtgctgctcaaaattctgtctattgagagatttgcaaattttgttataatttaaaaccatagatggacactgaaacagagtttgttccttcatctccggcagtctgttccttctcttttctgaacgctgctagcagcgcgggtagtctggcgggggcggcgggagcacggcgtcgggcgtgggcccgtcttcaacctcgaaggccatggccaagccgaagggcagatgcgcgtccaggtggcagtgcatgatccagacgcccgggttgtccgctgtgaagcggatgacggcccagccgccgccagggacggcgacggtgttgcgctgctgcgggttgacgagattgtacttgcggacgtgcctgtgcgcgttgaagttgcccgggccctgcgccagcacgaagaagttgaagccgtggaggtgcagcgggtggttctcggcgccaaggacggccgtgttctgcagcaccacctccaccgtctcgttgtaccgcagcgtcttcaccttggtgcccttggacgtgagcatgaacgaccggttggccgccatggcgtcgcccgtgaagtcgaacatcaccggcggccggtcggggaagtcgcgcgtgtacacgccgtccggcgcgccccgcatgtgcgcctccagcaacgacatggtcgtcgggagctggaaggagacgttgttcatgctggccgccacggagcccagcgtccggttgcagagcgtctgcgccgacgcgcacggcgtggcgcccaggccgaacgtgaccagcatccgcgtgtccacgtggagcggcaccccgtcctgcagcagccccgtgaggctcgcgtagaagctctgagcggtggcgctgtcgttgaacgctggcatggtaggcatcagcgtcggctgctcgtcgtccgaccccgaggcgtccggcaggtaggttaggagtgccgtggtggcggcgctgtaggtggcgtttgcgaggctctggtacacctgtgcggccatgtagtagcggcggcccgggtcggcgtcggcgcgcatgagagcgtccaccgtctgtcccggcgcgatgacgatgacgtccgtgtggtaggggtcggtgtagcaggcgtcggcggcgacgacggtgaaggagtggttggcgaccttgaagaagagctcgtagttgagagcggcattgatgatgcggagcaggtacgtcctgccgcgctgcacggcgagttcatactgggaggaggaggaggaggagctgttctcgctgccgccaccaccgccggcaccaatgaggccgttgatagttagcgcgactgagttgttgggtcctgctcccatgaggagtgcctgcctctcgacgtcgacgacgctgacgttccaccactcgccgagtaggatggtggcctcgccgtggggtgtcgggaacgggtaggacgacggggccgcggggtggaggatgagcgcgccgtagacagtggcacggaggaaggagacgtgggcgtgccaccacagcgttccctcctggccggtaacgttgaagcggtaggtgtaggtgccggcggcggggcggatggggcactgcgacaccatgttgggcccgtccgcccagcaggagaggcgctgcaggatgccgtgccagtggatgctgaggttgtagggggagaggttgacgacgtgcaccaccaccgtgtcgccgtcgcgggcctcgatcttggggcctgggaactgcccgttcaccgcggtgatcacctggctctgccccagccgctgcacgctcaggttgcccacctggatatgcaagcatagaatgggatttgttaaaacagagaaagacagagagagagagagattcaagtgtatgtacatggaaggtgtgctcaacaatggcagcgtcagccaacaagtagtcgtttatgaggtgatggagcaagcacaagacgatggcgagatggaaattagcagcagtacttgggagccgagccatattgcctttcagagcagatagaaaagcagcaagcgatgcaacaccaacacaatgttgctcaagctctc

SEQ ID NO: 1504 - DNA, 3379 bp, Zea mays
cccaacccagctaaatcagttaacaattagctctaaaggtttagaacatggcctaaaacaaccatgttatgagcctgcttgccagattctctcgatcaagtccttgcatctaccagtctgactctaatcttcccgacagcacctaaaccagtctgctcgctgcctcgtttccgccgccgacccattcccgatgtgacgccacccgacttcgcccctttctgacgcctccgtcctttgtcctgtttgacgtccatccgctcgacaagctagatctcgctcgtcgcaacgatatgacttgtcccctgcagtcggcgaacttggcgaactagaaaatcatggctctcatgtgatctttttggcccccctgaattttcgtcctgcgtccgccactgtttaagcccccacagccccacccaataatccgccacgacaataaacaaccagcaccagcagtccagcggcaacaataatcaaatcaaagatcaggaggggggagaaacggcttttctctagcaggccctccggttgtttttattatattgggtgctgttgtttgttgcaggtggtgggtggtgcagggattctttatttctggaggcaggaaggaggaagaagaaagaagaaacatcagaaccgacccgactatcagagatagagagagagaggagctctctcctcttcttttgcttttggtattgttatcttgggatctgattttgtccccatactaggagggagtgagggaaggagggaggaggctgggcttgtttctcctctcttctctcatctcagttcctcctcgcaaggctggccgtcggctcggctctgttgacagcaatccctgcactgcagtcttgccatgctccccacgaggagcgcaccatcagagtgattctgcagaaggattcattctactggcgagccgagctggtgaaggagctataataagcctagcgctcacttcagtcatcagccaagtgattgaaaaaggcaagtcgtctgaattattggttccaagggctctgtagttgcttctccacactttcctatgcttttgcattaatcttgacaactgagtactcaaagctgggatatggctacttattattcgagccctgacagtgaaagagattcacaaacaatgtactcaacagagtcaggcaatgcatcatatcccgtgccatcagccctagggaactttctttatctgaacagtgcatcttctggaccttatacagaatttaatggaattgtccagtctcaacagaatttcatggaacttactggtcatccttcagcaatttcacatgattcatcatccaacgaagctactaacattggcacttcactgacagaacagcgctcttttggtcctttgaaagatatgagaaatgagatgttgatgcatttgatggatggagcacacagcagtggcagtgacctcatccacaatgatgaccatagcactgcacagctcgagtttggcatgttaaacaaccacaattcaacaagtcttccatcagcatcaggccaagggctgtctctgagcctcaatacacatatcttggcaccttcctatccatactggtctgcaaagcaggacttattaacaccaaattcttaccagggtgatgacaacagaatgaagaatatgcagtctgaggcttcacaggcaatccgaaactctaagtatctgaaggcagcacaggagttgcttgatgagattgtcagtgtttggaagagtgttaaacagaaaacagataaaggcccttctgaagcaggaaagtcagatggaaaagagactgatggggggactaaaagtgagggagtatcttttgatccacaagagtctggtgccaatacagcagctgagctttcaactgctgagaaacaagagctccagaataagatggtgaaacttatggcaatgttggatgaggtggatcggaagtacaaacactattatcatcggatgcaacttgtaatgtcatcgtttgatatggttgctggttctggagctgccaagccttatactgcagttgccctccagacaatctcacggcatttccgatgtctaaaggatgctatcaatgatcaaattagtgttatcaggaagaaacttggagaggatgacgatgcatctggcaaagagggcaaactaattcgccttcgttatatcgatcagcaaataaggcaacagcgagctttccaacagtatggtatgctacagcaaaatgcttggaggccacagagggggctacctgaaaattcagtctcgattctccgggcttggctttttgaacacttccttcacccgtatccaaaagactctgaaaagctaatgttatcgagacaaactgggttaacaagaagtcagatttcaaattggttcatcaatgcccgtgtccggctgtggaagccaatgatcgaagacatgtacaaagaagagataggtgaggcagagctagactccaactcttcctctgacaatgtgcagccgaacaaggacaagccgccatcttccgaagaaaaggaccataagacctcaacaagccaggtttgccaaaccagccagcttggcgaatccaaagccaacattggtggagtggtgagcttttgtggagcgccagccggcggcttccacaacgatgccaaccccgatgacagcttcatgagcctgatgctgaaggcccagagaccgggcgaaaccgatggcagcggtctcctccatgatgccgtcgctcatcactccgatgagagcgcgcggttcatggcgtaccacctgacagagtttgggaggtatgggaacaacaacgtctcactgactctggggttgcagcacgccgagaacacccagccgggcttccccggcgtcagagaccaagacatctacaactccacagctcctctcaacgtcacctccacatcttcagagtatgattcggcgagccaaatagatcaacaacggcagctgtttgaggtgtcacctctgatgcatgatttcgtggcctgaatttcagctgacgcactggaaaacgtggggaagtgacttgtcatttgtagtgccaggacgaacaatatgcctggactgaattttcaggcgtggaaatgtagctgtagttgtaattggggtacagaatggacgaggtatatagcataaatgttatgtaaatttagtgggggcaggggtgatagtggtaaagaaatcctgtaaagatggaatacattttatacgtgtaaaatacgagtatttaagggccacgctgtaaaaatagatttacctgtaactgtaacgagtgtttgtaatgagtgtaaagaactgccacatgccatattttcgatgggtgagaagatatagaaatcttattttctttgttaa

SEQ ID NO: 1505 - DNA, 1614 bp, Zea mays
ccaacaatgcacaccaacatccactctctcgtcaggctcctctcccccaaaaatgagcgctgagttctgcgctgctgccggtgtcgtggccatggagctcggagtcggagatgtgctggggctgcagcaaggcatcgcaatcaccgcgccatcgcccagggacagcgacctgggtcttctcaagcgagcaggcctcacccaggctgcggctgctgccccctacccctcccccttccttgacgaggagaagatgctcaggttctccaaggcggctcacacattgcactcaggcttggattttggaggcccaggtgagcaggctttcctgctgtccaggaccaagatgccatttactccctcgcagtggatggagctggagcaccaggctctgatatacaagtacctcaatgcaaaggcccccccataccttccagcctgctcatttcaatcagcaagagcttcagatcatccaatagagtgagctggaggcctctgtatcaaggctacacaaatgcagactctgacccagaacctgggagatgccgacgaacggatggaaagaagtggcggtgctccaaggaagcaatggctgatcacaagtactgtgagcggcacatcaacagaaaccgtcaccgttcaagaaagcctgtggaaaatcaacctaagaagaccaccaaggaggtgcctgctgctgctggctcattgccatgtgctgggccacaaggtagcttgaagaaggcaaaagttaatgactccaagccaggcactgtcagctattgggcagatagtttaaacaggacaatgttgagcagagagaaagcaaacaaaccgacggaagatagctctttgctgcttacttctacgaacagccaacccaccttgtccctgctctctcagctgaagcagcaaaacaaaccagataagttaggccccacactggaaaatgagtcaaacccagacacaatattgaaagcctggggtggcaaccagcctagccacaagagcatttcctctacagagcgccatgatgctgaatccctccaatcagtccttcaaaatttcagcctagcccagaatgagaagatggagtcagaaaagaacaaatattctgattccgtgctagtttcgtcgactttctattctgcagacggtccaagagctacctgccttacacctaacatgacacaggtgaagcaggattgcatatcaagctcttgggagatgcctcaaggtggacctctaggcgaaatcttaacgaactccaagaatagcaaggacttaagcaagtgtaaaccaaggtcatatggttggttgttgaatcttgaccatgcaccatgattcctcaatccatgaagagcttgacatagatatcccatcatgtaggcaaacaatggtcagaaaaaggttatgaccacattgcttgccccatgcatgcttgctatctacatttgtatttctgttacgtagcatttagctagttgaattatcagttcttctggatacggctgtatcttaaacaagttctagtttgtgtcagatgatatcttgcttgctagatgtttcatgttccactttcaacaggaacttcagacaaccactttgattgacagaaaa

SEQ ID NO: 1506 - DNA, 2912 bp, Zea mays
gaaaaaaacgctaatccataacgtgagacggggaggcgtcctcctagcagccgcgcgcgctcacattatcctcaggcaccatcgcaccattggccgccgctcacgcgcataaaacccacagtccgctcgcgacagcctcacggcgcaggcgagaaggcgaggagagggagctcgccggcaaaggccaccaagagcgaaaaggaaccacagaggcagtctccatggccgccgaggcgcccgtgcgagcccccgccacggcgcggtcctcgcgccggccggccgccgccgtcgtctccgcctcgcgcctcctcctcggccaccgccccttccttgcgccgcgcttcgctgcggggcgcgccgcggtggcaggccccgcggccggactacgcccgcgcccgcgcaggccgcgcctctcggtcgtcgtcatggccagcagcgatcgccaagtgcctttacatgattaccgcaatattggtattatggcccatatagatgcaggaaagacaacaactactgagcgcattctgtattacactggaaggaactacaagattggtgaggttcatgagggaacagctacaatggattggatggaacaagaacaagagagaggaataaccattacatctgcagcaacgactgccttctggaacaaacacagaatcaacattattgatactcctggtcacgtcgacttcactcttgaggttgaacgtgctctcagggtgctggacggtgctatatgtctctttgacagtgttgctggggtagaaccacaatctgaaactgtgtggcgccaggcagataaatatggggttccaagaatatgtttcgtgaacaaaatggaccgccttggagctaacttctttagaactagagacatgatcgttgcaaatttgggtgccaaaccattggtgattcagttgccgattggttcggaggacaatttccaaggagttgttgatctagtaagaatgaaagctattgtatggacaggggaggagctgggtgcaaaatttgaatacaaagacatacctgctgatctccaagagatggctcaagactatcgtgttcaaatgctggaaactattattgaattggatgatgaagttatggagaaatatcttgaaggaactgaaccagacgaggaaactgttaagaaactaatcagaaagggagcaatttctgccagctttgtcccagttttatgtggttcggcattcaaaaacaagggtgtccaaccattgcttgatgctgttgtcgattacttgccatctccacttgatctaccttcaatgaagggtactgacccagaagaccctgaaataatatttgaaaggcaaccaagtgacgatgaaccattttctgggttagctttcaagatcatgactgatccattcgtggggtcactaacatttgttcgcatatactccgggaagctgatagctggttcctatgttctcaatgcaaataaagataagaaagaaagaattggaagacttcttgagatgcacgcaaacagtaaggaagatataccagttgctgtgacaggtgacatagtagcgcttgctggtctgaaagacacaattactggtgaaacactctgtgacccagacaagcctgtagtgcttgaacgtatggaatttcctgatcctgtcattaaggttgctattgaacccaagaccaaagctgatgccgacaaaatggctactgggttaatcaagcttgctcaagaagacccgtcattccacttctctagagacgaggaaaccaaccagactgttattgaaggaatgggagaactgcatcttgatatcattgtagacagactaaagagggagttcaaggttgaagcaaacgttggagctccacaagtcaactaccgtgaaagtatttccaaagttgcggaaatacaatatgtccacaaaaagcaatctggtggatctgggcagtttgcagacattattgtgcgttttgaacctttggaagctggaagtgggtatgagttcaagagtgaaatcaagggaggggcagtgcccaaagaatatgtaccaggggtgatgaaaggattggaagaaagcttacccaatggtgtcctagccggttacccagttgtggacttccgggctgtgctggttgatggctcatatcacgatgtcgattcaagtgtcttagcattccaaattgcagccagaggagcattccgtgagggaatgaggaaagctggtccaaggcttctagagcctataatgaaagttgaagtgataactcctgaagagcatctgggtgatgttattggtgatttgaactctagaagaggacaggtcaacagcttcggggataagcctggtggactcaaggtggttgattcttttgtgccacttgctgagatgttccaatacgtcagcaccctccggggcatgaccaaggggcgagcgtcctacacgatgcagctcgccaagtttgacgtcgtcccacagcacatccagaaccagatctccgtggcaaaaacagaggaagctgctgcttagttttggttttccgtagatatatccatacagcaacaggagagcaggttgataggaaggacatcaaggtgtatgtagctttgtagtgtaaatctcttaaggcttgttcggatgattggaggggattgatatggattgagagagattttaatttactatggattgaaacttcctcaattcatatggattggactagaaccgaacatggtctaagggagcattatttgccattgattttgcacctgataataatggcctttgttgagttttcacaatgacaggacagttgaattatatgtttttggtttcctgctccctgttgagaactcagttctcaactttagtttggaaaacatagcacctgtaacaatataaattaatgca

SEQ ID NO: 1507 - DNA, 2793 bp, Zea mays
ctgccccaagcacaacggaagcgcgcatttattattctgtatatataagctccccaccaccaccaccacctttctcctcactgcctagacggaaaagcatcgcgcgatcgccactgctccccccagagccagtcagccagccagccagcggcgcacgaaggaacgcacggtgcacttccgttccgtctcatcgtcatcagctatgcatcgcccgcgcagccatcgtctctgccgctcgcgcgtcgccgcagctgtttccgccgccatcatcatcggtctaggcgcggcgggcgtcggcgaagcggccaccggcacgttcatctacgccggctgctcgccgtccaagtaccagccgggcacccccttcgaggccaacctggagtcgctcctggcctccatggccggcgcggcgcccaaggccgggtacagcagcttcacggcgggtgccggcggcgttggcaacggcacgacggcgtacgggctgtaccagtgccgcggggacctggcgggggccgactgcgcggcgtgcgtgcgggacgcgctgggccagctgggccaggtgtgcgcggcggcgtacgcggcgtcgctgcagctggagggctgctacgtgcggtacgacggcaccgacttcctgggcacgcccgacgccgccatggtgtaccgcaagtgcagcaccagcagcagcagcgacggcgagttcctcagggaccgggacgccgtgctcgccggggacctgctgcagggcggcgcggccaataatggtagtagtaacgggtacaaggcgggcagctccggaagcgtgcagggcgtggcgcagtgcctcggcgacctcgcggcgcccgactgcgcggcgtgcctggcgcaggcggtcggccagctcaagggcacgtgcggcaccgccctggccgccgacgtctacctggcgcagtgctacgtcaggtactgggccgacggctactacttccgccccacacaagattattcgcaggacgacgtcgggaggactgtggccataatcgtcggaatcttagcagggctggcgatcttcgtggtgttcatctcgttcctcagaaaagcatgtatgatccgctaagcctaagcgtcgtccaatcacgcatgcgcgcgggatcgatccagggccttgccttaactaacctcgtgcacgcaactggtgtctcaataggctagcttggccactggaaacggcgggcttccacattccctctcagacggtggcacgaggacggcataggggagaaggagggatcgggaacgagattggcctgcatgcaaaatgcttcacaaagcacatgtagtctggttttgttagcaatagatttgggctatcgatcagaggagcactaccttgatttgggtcatcattttcggtccactgattatggcctacttgcgatcacccatcgcaacagcattcacatctgatcttttaatcatttcggtacttggatgaagatcagagttgagttggtattactactttacataggcacgagcacaagtgcatgatatgtacaaccgtcgatgggtccacagtccccagatgatacgagctcgctcacagggacatggggcagcagacctcggggggctttgctatttgatctttaccatcaagcactgtgtccccgagccatcgggctccacctcgccgagttgtagctgctgcaagcgctgatgctcgactccctcattttcatctcagatataccactgttgcagatgtttgcaaacgctctcatgtacttcatgccgtactgagtaagtgaaccacactgggactcgaaaatccgcacctaagcaaaagccaccaagtgaaatgagttaggcagcgcactgacaggatgggaatgtgcgcacagcagtaaggagcttcattttcatgtgcatgccttgtatcaagagtcgaataagaaaaatcaccatactcaccatcctcttcaaacagtcccagtcatcgactaatggttgaccagaggttctaacagcctcaagcatcgaaggccctttctcaaatccgaagacgagcctcccaacgaaatcgatactgctgtcaagatgcttcctgtgctgaacagtttctttaatctctatgagagccctcagcttctcttcggtccccccatttaactgctcgtactgaaagaaagaactgaacattaggaaacaagaataaaaggaggctactgactaccacaagtgattggtagaactccagcttggtattaggatatggccatcagatggtctatatatggtcatgtaaaacactgttttgcactgtttgcaaagtaaagtttaaaatgagagatagaacgagtaagctactggagatagctttagaggtgtgagcttgacatcgagatgagtgtacgagctctaacccctctcaagcatggtgctaacgcaacagcctctcaccaagaccacatccacaattgtattagaaagctagttcttcctccaatcttctctaataagaagcccatctacaagacttagttaagccataccaaacaagacacgatttcaacttttaatggtgattgtgtgaatggaaaagccacagcaccttttagccattgatggaacaagcgaaaccactttcttgaactgtattgtcaattattatctaaatttctctaaaacataggtataaaatgtgcaacagctagccctaggtttacatttgcgtgttccaactaaagaaataaagtagtcataaaaactaaagcatacccatggtatcattgccaacatacacactaaaaaaag

SEQ ID NO: 1508 - DNA, 3371 bp, Zea mays
cccaggtcagtcggactaccgctgagttagcatataaataagcggagagaagaacttacgaggattcccctagtaacggcgagcgaaccggagcagccagcttgagaatcgggcggcctcgccgcccgaattgtagtctggagaggcgtcctcagcgacggaccgggcccaagttctctggaaagggacgcctgggagggtgagagccccgtccggcccggaccctgtcgcaccacgaggcgccgtcaacgagtcgggttgtttgggaatgcagcccaaatcgggcggtaaactccgtccaaggctaaatacaggcgagagaccgatagcgaacaagtaccgcgagggaaagatgaaaaggactttgaaaagagagtcaaagagtgcttgaaattgccgggagggaagcggatgggggctggcgacgcgcaccggccgtatgcggaacggctcctgctggtccgccgatcggctcggggcgtggaccgttgtcgcccgcgccggcggccaaagcccgggggccctaggcgcccccggcagccgtcgtcggcgcggacggtatccgcgcgcctctggcgcgcccctcggggcgctgcgctgcaacggcctgcgagctccccatccgacccgtcttgaaacacggaccaaggagtctgacatgcgtgcgagtcgacgggttcagaaacctgagatgcgcaaggaagctgacgagcgggaggccctcacgggccgcaccgctggccgaccctgatcttctgtgaagggttcgagttggagcacgcctgtcgggacccgaaagatggtgaactatgcctgagcggggcgaagccagaggaaactctggtggaggctcgaagcgatactgacgtgcaaatcgttcgtctgacttgggtataggggcgaaagactaatcgaaccatctagtagctggttccctccgaagtttccctcaggatagctggagcccacacgagttctatcgggtaaagccaatgattagaggcatcgggggcgcaacgccctcgacctattctcaaactttaaataggtaggacggcgcggctgcttcggtgagccgtgccacggaatcgggagctccaagtgggccatttttggtaagcagaactggcgatgcgggatgaaccggaagccgggttacggtgccaaactgcgcgctaacctagaacccacaaagggtgttggtcgattaagacagcaggacggtggtcatggaagtcgaaatccgctaaggagtgtgtaacaactcacctgccgaatcaactagccccgaaaatggatggcgctgaagcgcgcgacccacacccggccatctgggcgagcgacatgccccgatgagtaggagggcgcggcggccgccgcaaaacccggggcgcgagcccgggcggagcggccgtcggtgcagatcttggtggtagtagcaaatattcaaatgagaactttgaaggccgaagaggagaaaggttccatgtgaacggcacttgcacatgggtaagccgatcctaagggacgggggaaacccggcagatagcgcgatcacgcgcgtcacccgaaagggaatcgggttaagatttcccgagccgggacgtggcggcagacggcgacgttaggaagtccggagacgccggcgggggcctcgggaagagttatcttttctgcttaacggcccgccaaccctggaatcggttcagccggaggtagggtccagcggccggaagagcaccgcacatcgcgcggtgtccggtgcgcccccggcggcccttgaaaatccggaggaccgaattccgtccacgcccggtcgtactcataaccgcatcaggtctccaaggtgaacagcctctggccaatggaacaatgtaggcaagggaagtcggcaaaacggatccgtaacttcgggaaaaggattggctctgagggttgggctcgggggtcccggccccgaacccgtcggctgctggcggaatgctcgagctgctcgcgcggcgagagcgggccgccgcgtgccggccgggggacggaccgggaacggccccctcgggggccttccccgggcgtcgaacaaccgactcagaactggtacggacaaggggaatccgactgtttaattaaaacaaagcattgcgacggtcctcgaggatgctgacgcaatgtgatttctgcccagtgctctgaatgtcaaagtgaagaaattcaaccaagcgcgggtaaacggcgggagtaactatgactctcttaaggtagccaaatgcctcgtcatctaattagtgacgcgcatgaatggattaacgagattcccactgtccctgtctactatccagcgaaaccacagccaagggaacgggcttggcggaatcagcggggaaagaagaccctgttgagcttgactctagtccgactttgtgaaatgacttgagaggtgtaggataagtgggagcctccgggcgcaagtgaaataccactacttttaacgttattttacttattccgtgggtcggaagcggggcaccgcccctccttttggctccaaggcccggcctcgccgggccgatccgggcggaagacattgtcaggtggggagtttggctggggcggcacatctgttaaaagataacgcaggtgtcctaagatgagctcaacgagaacagaaatctcgtgtggaacaaaagggtaaaagctcgtttgattctgatttccagtacgaatacgaaccgtgaaagcgtggcctatcgatcctttagaccttcggagtttgaagctagaggtgtcagaaaagttaccacagggataactggcttgtggcagccaagcgttcatagcgacgttgctttttgatccttcgatgtcggctcttcctatcattgtgaagcagaattcaccaagtgttggattgttcacccaccaatagggaacgtgagctgggtttagaccgtcgtgagacaggttagttttaccctactgatgaccgcgccgcgatagtaattcaacctagtacgagaggaaccgttgattcacacaattggtcatcgcgcttggttgaaaagccagtggcgcgaagctaccgtgtgccggattatgactgaacgcctctaagtcagaatccaagctagcaaccggcgcctctgctcgccgcccgccccgacccacgttagggcgttcgcgccccaagggcccgtgccattggctcagcccgcccggccgacgcgccgcggcgggccgcctcgaagctcccttcccaacgggcggcgtgctgaatcctttgcagacgacttaaaacgcgacggggcattgtaagtggcagagtggccttgctgccacgatccactgagatccagccccgcgtcgcacggattcgt

SEQ ID NO: 1509 - DNA, 1557 bp, Zea mays
ggcccgcacgcacctgcgtctgtgtgcagcgaccagcgacgcaacaacttccgttccgtccccggcgccggttccggcggaagccgtcctctgcgtgactgcgtcggctgcggtggagatggcttcctcgtcggcgtcttcgaggcaccaggtcaccatcaccctcggccgcagcggtcaggttgtcaaaaggagggctatgtctgatgatattaatgacggtgaattgcctttgttggggaaaaagcgatctgtgagggataggttaggaagtaatgtgtctgattctgatttttatgaaagccagcagagaaacaaacggcgacaattagaaagtaatagctcacatggagatgatggttcagaccgcctggttgggaagggtgatctgagactgaaactcatgaggaaaggcttgttgccgaggagcaatggtagtgcagaacagaatgacatagatctccgtgaaaagctttctcgaaaccataagttaccaaattatgattctagaggtcatgctgcagaatcaagggctagttatgatatgagagatgagcctccagagttaagttccagatattcttcgagggaggatgtcctagggtcgaggcactcttctgttgtaagtcgagttccttatgcaagaagtgtggatgatttgttaaagttggattattcaagaaaatcctacccgtcatggacagatgatggtttgaggcacagatcacctgaaaggatgttaaaagttcggagcgatatgtatccacggatagcttatgatcagattaggcccatgccaccccttaggtctgctggttcctcgagacctcaaagttttattacaagagatgctcctgacacgtcaaggagccaaccatatgctggcaaatccaccatttctattgatacagtacagaggactaatggaatcactccatctactgcagctctgcctaaggcccctgttatggatgaagccccgcttacagttactggattgctgaactcgttgggtcttgagaagtatgttgttctctttcaggctgaggaggtggatttgtctgcattgaggcaaatgggagagagcgacctcaaagacatgggggtaccaatgggcccgaggaagaagattctccttgcagttggccctcagtccaaataacgccaaagatgagcaaacagggtgtgggtctaagaacatttgttggcaaccgaaaatattggtgtaagaactccagatataagatattgtatacccaattatccatagtggcggtcttaatccacccttttgttgccgatgacgtttcgtgccgtagttgacatgtaagtctgttcggtcagctgttaatccaggttctatcgttctcggtctgtccggtgcctgccttactgtttttttctttttctttttttaaacagcctgccttactgttattattgcttcgaaatgggacgatacgccatatgcttggtgtacccattgatagttggcttgggaattgatgatccattcagttcttgtgtcagaaatcacaaggcgacgatactttacat

SEQ ID NO: 1510 - DNA, 3240 bp, Zea mays
tatgcggccgctggtgcttgactatacatatcggcccgcacgtaggaccgagttactgtttgtcgctttcagtctcgcctcaccgcagtcgttgcttccccctcgacgacactgcgatgccggcgtggagcacgacaccaagctttctcgccctagcccccttgaaaactatcggtcgtcgtttccctcaatacgctgccatggctcctagtgacgatagtgtggcggcaccgccgctgctaccaatgtcaagcggtgggggcgtcgccgcttttccgtcagttgtcgcgccgtcttctgatatggttagtcgcgttagtgggtcgggccacttgaattatgagttggcccgtcgagaacttcgcgacggagggtgaaggagatggaatctttgggggtacttccctactggttacagcctggcagcgggcacggagactgtaccgcgatcggatggcgaagtcctggtcttgctcacgtgccctgtgcttgaatttctcccctaatatacttattaagccaataaatgcacgataattttgtagatcgacggttaggttatgtccagtggcagccacatgggcaatggaaaacacgaagtgtgaatgcgcgtgcgtaaacaagaggacgcctctatctaataaaaacgcgtatgcagatggcacatatagacttgtggagaagagataaaccgtggatttgaagtatgggaaggagggcactcatttttcgcatcctcgttcacgctctgctggtggatagtttacaaacgcgaaaaaagtatgggagcagggtgttggagatagctttaggatatatttagatccacaggactaaaataaaacgactaaaatgatttagctcctttagctctcatggaggagctaaaactgaaaagtctctggtccccactttcccctcaccttacctcccttaggactgtggagtcttgggtccccaccttccctctatcactccatttaatgttttaatgaatgtctagtcactttttctaaatgggagtgactaaattagttttgtaactttattttagtcctgtggatctaaacatgcccttagcgtgacagttctttgaaatagcagttcttgtgggggtgcgagcggcaaatacagcgccggctcttggtttccaagtggccccctacgtggaaccttctgagacggctatcctacgtgtacgctagcctccaaacttcaaagcgcgtctctgcagggctcgcacgtgctctttttccctcctcaccccgaattaacaatcgcgaaatcccaggtttgacctttcccccagccttgttgttccagtggggcccactacacccatgtccccttcttcctcgcacacgcgggacactgcacctgagcctctcaagccctcaacacgccaatttgaccacgtgaccgtaatcttgatccacggcctccttgcacttgcaccgcaccggtgcctatttaacccgcgctcgaacaactctctgccggcaacgcaaccaaaccgctctcgctctcggctctcggctctccaccagtctccgctctctggacgccggaaatgcagatggactcctacaactacaactacgccagtttcttccacgacgaggctccgtccttctacccgcacgttgcggtgccgccctccccggagctgcccatcggcctcattgcctcgccaggggagccggagccgcccttcgcgccgccgatgccggcctcgttccaggactacacgggcgccgtgggcgtgggcgtaggggtgagagcgccgttcgggggtgccagcgtgcacgggcaggcgatcgacgcgctgggcgggggcgacgggcagcgcgagcagagcatggcaatggcggaggacggggaagagccggcgccccggcggcggcagccggcgggaggccccgccgccgccgccgtcgagagcagccgcgggttccggcacatgatgcgggagcggcagcggcgcgagaagctgagccagagctacgccgacctgcacgcgctggtggcggcccggtccaggggcgacaagaactccatcgtgcaggccgccgccgtgtacatccacgagctcaggggcgcgcgggaccagctgcagcgccggaacgaggagctcaaggcccgcatcctgggccacgacgccgggcagcagtgcgtcaaggtgcagttcgaggtggacgagccggcgtccgccatcgactccatgatcggggcgctcaggcgcctcaagggcatggacgtcagggccaggggcatccgctccagcctgtccgggcgcaggctgtggacggagatgaatgtggagaccacgatggcggccgacgaggtggaaaggggcgtggaggaggctctgctgcaggaagtggagaggaagcagcagcagcagcttggagctgggagcgccgcccctggttttccaggcccgtcatcgcacgtgcaaaacgtgttttgacacgcgatcctcccccacaacaagaagcgaaaaagaaacatgaaccccgagcctcatttcttgattcttttttctttaagaaccggatgcgcaaaacgagcatccgcgtccctggctctattgatttatttttaagtagaaatcggtgctgtttgtgtacaagtgttgtcgcagcctccaagtgggattttgagcacgtgtataaagttatagggctcgtgttcttacaacacacacacacaaaaaaaaaaagagacgtgcggacagtgaggactgaggacatgtgggcagggatcaagtgggccggaggaagcgggcgagaaatggggtcgagggacaggcacgttccggtcgtgccgtgtggagattcctagccgcggcggcaaccggtcaccagtgtgctctcgttgtccttggtctctactactcctgctacaaatggtgacgcctttattttatcgtgtggagtggatgtaaatggacgccaccacaataaattagagtactaaattaattttagtttaaaaataaataaataaaaatagagtatgattctaatcctattcactcttaaatctctactactacttatgttagtatggtaggcgtgcacagttgtggttctgccgcgcctccacgtccctccgcgccgcccgaaatcttggatcgcatcaacagccgcaatgcctcgcctgcccctgtctccgcgaatctcgcctcccccgcccccacaaatctcgccgtcgccattatctcaagttctcaacccg

SEQ ID NO: 1511 - DNA, 13595 bp, Zea mays
ggcccatccaagcaagaatgcagacacaatggtccagccaccacaaccatgtgcctcatcacgtaccagttgccattttggcacctaatgctgagtccccatgttcattgatctgccatttcagggataacttctcccgcttaatcacgattacacttaggcaagtgctaattctctgtcaagagcactgtcattcctagccgctgctcagcaatagaaaaacatattcacagaggggcagaggaaaggtcggtataaagaccaccagcttttcgagataccaccggcctttttcagggagaagccactccatctttctttttttcctttttccaactttcttcttcttcctcctccttctcattctgatctggaacaatggcgacagaagacgaagagcgagaagcagcagatgggacggaagtcccagtggaagctgtggttttgggaacattccatttgcatgcacacccagaaggcaagctttcatctctgatggatatcaagagcatgggagaaaccatcgattcaactgaaggaacgttgaagattccagaggatcaagttttagtagaagcaccctctgatgtccaacttcctccagaacataatctaaatggtgaagcatcttctttgaatggccatacagacaaagaagagaaggtttcagtcgagcagccacatgacaatgatcaggaagaagcagaactagatcagaacaacagaatcaacaaagaagatgcggctgatggtttaagtcatggagagagcacaacagaagacagctgccttctgaagcacaagaaagatgaagaatccaagggtgatgaacaacaagatttaggtgttacagtggatgatgacttggtgcaggaagacacgctgaaaactgacaatgctattgagcaaacagatgatggtcagcaagaccaggatcaagaacctgaaaaggcaaacgagaacacagaacctgcaagcatcgcaaacaatgacgatgttgagattgtagctgagacacctactggactccaagctcctgtggagtcacgtatgaatgattctgatggcattccggagactattgatgaagagacagaaacagatgaaccagctcaggcagatggcgttgttcatcctgaagacgtggccaaagtagaagatcaacagagtcaacaagatgacacggtggatgcagatgtggccccagaagaggttaaatgtgaagaaactgatcagcaggaagagaagcccaaatctgaagctcatgagccaacgattgatactcgagaagcgttgaatcaagaacctgctgaagaaactgatgactcgatgaataaaaagattgaagaaactgcacaccagaggaacatggcagctccaaaggagacaacactagaacatgaagcaacaatgagtgctacaccagtaaatacacaagtgcaggaccaggaaccattagaagaaatagaagataccgaaaaaggaatccaaccaagcagtggttctggggatgcaattccagaagatcaatctaatttaagtgttactatagacaatgacactgtgaatgaggatacagtgataggtattgagcaacaggatgatggtcagcaagatgaggatctagaaccagaaaaggcaactgaggatacacaacctgcaagcatgacaaacattccccaggttgaggttgtaactgaagcatcttctggagtccaaactcctggggacctgaatctcaacaactctgatgctgttccagatactattgatgcaaacacagaaacagatgagccatctaaagcacactctgttgttcatcctgaaaagaaagagagatttctagaagacgcaaccactgaggaacctacagaagaggtggtcaaagtagaagctcaacagagccagcaagcagatgtgatggatgcaaacatggtgcaggaagaggtgcctaaatctgaacatgctgatgagccagcaactgatgcttttgaagtgctgaatcaagaatctgttgatgagccagcaattcaagcacctgtaactattcaagtgcagaaccaggaaccattagaagaaatagaacttgctgaagcagttgatactgaagcaacagtgcaacaaagcagtgctgcttttgaggagtcggttccagaacatcaatgtaatttaggtgctacacataacacagagcaggaagacacgctggaagctagtgggcaatcaaaaggaggtcaggaataccaagacctaggaccagaaaatgcaactgaaaacacacaacaagcaagcatgacaaatattcttgatgttgaggttataactgaaacaccctctggaattcaaactcccatggagatcaatctggttatctctgatgccattccagatgcaactgatggaaacacagaaacagatgaaccagctaaagcacacactttcgttcatcctgaaaagaatgaagtctttccagaaaatacatttaccaccaaacctacagcagaggtagtcaaagtagaagatcagcagaaccagcaagatgatgcaatggatgcagaagtggtgctggaagaggtgcctaaatctgaacgtgctgatgagccagcaactgatgctcttgaagtgctggaatctgttgaagaaactgatgacccaatgaatgaaaagactgaagaaacaacccaacagagcaacataccagcatctgaggagacaacggcagaatatgacgcgacaagggagccacctgcaaataatcaagtgcagaacaaggaaccagtagatgaaagagaatctactgtagaagaaagagaagttgctgaagcagttgatactgaagcaccagtgcaacaaagcagtgttgcttttgatgaggcagttccagaagagcaccataatttaggtgttgcaaataacacagtgcaagaagacacaatggaagccactggacaaacacaagaaggtcagcaataccaagatctaggaccagaaaatgcagctgagaacacacaacctgcaagcacggaaaacattcctgatgttgaggttataaccaaagcaccttctgaaattcaaagtcctgtggagatcaatctggacatctctgatgccattccagatactaacgatggaaacacagaaacagatgagccagctaaagcaaacactgtcgctcgtcctgatacggaagagagctttgcagaagatacatctactggacctacagaagaggtggtcacactagaagatcaacagagccaacaagttgatgcaaaggatgcagacgtggtgcaggaagaggtgcctacatcggagcacaccgatgagccagcaaccgatgctgttgaagcgctgaatcaagaatctgatgaagaaacagatggcccagtatatgaaaatactgaagaaacaacacaccagagcaacatgcccgcatctgaggagacactaccagaaaatgatgtgacaacaagggagccatctgtaactattcaagcacagaaccaggaatcattagaagaaagagaagttcatgaagcagttgatactgaagcaacagttcaaccaagcagtgcttcttttgaggagtcagttccagaacatcaacataacttaggtgcgacaaatgacacagtgcagcaagacacactggaagcaactaagcaaacaaaaggaggtcagcaataccaggatctaggaccagaaaatgcaactgagaacacacaacctgcaagcatggcaaacattcctgatgttgatgttataaccaaagcatcttctggaattcaaactcctgttgagatcaaccgggacatctctgatgccattccagatgctactgatggaagcacagaaacaactgaaccagctaaagcgcacagtatcattcatcctgaaaagaaagagagctttcaagaagatacatctaccgcagaacctacagaagaggtgatcaaagtagaagatagacagagccagcaagctgaagcaatggatgcagacgtggtgcaggaagatgtgcctaaatctgaacatgctgatgagccaacagctgatgctcttgaagtgctgaatcaagaatctattgaagaaaccaatagcccagtgaatgaagagactgaagaagcaaccaaccagagcaacatgccagcatctgaggagacaataccaaaatatgacgcggcaacaagggatcaacctgtaaatattcaagcgcagaaccaggaaccagtagatgaaggagaagctactgtagaagaaagagaagtggctgaagcagttcatactgaagcaccagtgcaacaaagcagtgttgcttttgaggaggcagttccagaagaccaacataatttaggtgttgcaaataatacagtgcaagaagacatgatggaagctactgggcaaacaaaagaaggtcagcgataccaagatctaggaccagaaaatgcaatagagaacacacaacctgcaagcacggcaaacattcctgaggttgaggttataaccgaagcaccttctggatttcaaactcctgtggagatcaatctggacatctctgatgccattgcagatactactgatggaaacacaggaacagatgaactagttaaagcagaaggtgttatccatcctgaaaacaaagagagttttctagaagatacatctaccacagaacctttagaagaggtggccaatgtagaagatcagcacagccagcaagctgatgcaatggatgcagacgtggtgcaagaagaggtgcctaaatctaaagccgatgagccagcaactgatacccttgaagtgctcaatcaagaatatgctgaagaaaccagtggcccagcgaatgaaaagattgaagaaacagccaaccagagcaacatgctaacatctgaggagacagtaccagagtatgacacagcaacaagggatccacctgtaaatattcaagcacagaaccaggaatcattagaagaaagagaagctactgtagcagaaaatgaagttgctgaagcagttgatactgaagcaccagtgcaacaaagcagtgttgctcttgaggacgcagttccagaagatcaacataacttaggtgctacaaataacacagcgcaggaagacacgcaggacgctattgggcaaacaaaagaaggtcagcaattccatgatctaggaccagaaaatgcaactgagaacacacaacctgcaagcatggccaacattgctgatgttgatgtaacaaccgaagcaccttctggaattcaaactcctgtggagatcaatctggacatctctgatgccattcctgatactactgatggaaacacagaaacagataaactagttaaaacagaaggtgttatccatcctgaaaagaaagagagttttcctgaagatacatctaccgcagaacctacagaagaggtggccaatgtagaagatcagcaaagccagagagctgatgcaatggatgcagacgtggtggatgaagaggtgcctaaatctgaacatgctgatgagccagcaactgatgctcttgaagtgctgaatcaagattatgctgaagaaaccaatgacccagtgaatgaaaagactgaagaaacaggcaaccagagcaacatgccaccatctgaggagacaacaccagaatatgacacgacaacaagggagccacctgtaaatattcaagcacagaaccaggaatcattagaagaaagagaagctactgtagaagaaagtgaagttgccgaagcagttgatactgaagcaccagtgcaacaaagcagtgttgctcttgaggatgcagttccagaagatcaatataacttaattgctacaaataacacagtacaggaagacacacaagaagctattggacaaacaaaagaaggtcaacaataccatgatctaggaccagaaaatgcaactgagaacacagaacctgcaagcacggccaacactcctgatgttgatgtaataaccgaagcaccttctggaattcaaacttctattgagatcaatctggacatctccgatgccattccagatactaccgatggaaatgcaaaaacagatgaactagttaaagtagatggtgttatccttcctgaccacaaagagagcttttctgaagacacatgtgttgtagaacctacagaagagatgatagaagtagatcaacttggtcaacaagctgatgcgatacatgcagaggtattgcaggaagaggtgcctgagatgatagaagtagatcaacttggtcaacaagctgatgtgatacatgcagaggtattgcaggaagaggtgcataaatctgaacagtctgatgagccaggggtcgatgctcaagaagtgctgaaccaagaatctgctgaagaaactgatggcctggtgaatgtaaagactgatgaaactgagcacaagagcaacatggtggtccctgatgacacaattccagaacatgatgcacaaacgagagagccacctgtaaatattcaagaacaaagccgggaatcagtaggagatgctgaagcagtcaatactgaagcagaaatgcaacaaaacagtgttgcttttgaggagacaactccagaaaaccatgtagcaacctcagagccatgttctgaaatccaacatgcacatcatgtggaaccagaggaaatcaatggccctgaagatggcaaagatgatgagatcaccaacatgagcagcagagaatatctagttcgagataatgttctgcagagtggaccaataatagatatacaaccagttcaggagttggaacaaattaaaacggatgaagcttctaaccagactcatgctgttatcttcaatgacctagctcaggaagatgctacagcaacaagtgaaccacaagtgactgaaacagaactaaaggacattgaagccactgaagctgaagaaatcaccaaacttgaccatgttactcattccaaggaacttgcagtagaaaatgattcaacagcagatgaaccacataagggtgaaatccatcaaactcttgaacaagatttagttgaagttaaggacactggaacttaccatgaaaaaacaatatctacttcagaggacacagtacaagataatttgacagaagatgagccaagttttggtagtcaagaagtagatgatgcagagtcaacagaagaaactaagcaaaacatagctgagaatattgcagaagtctctgatgtggcgattgttgatgacgcaattgaacagaatgtgctacagactgaggatatcgttgaaatgcataaacaggagctggaacgagaagaaacagagagaatagaacctgttgaatcagaggaagcttctgatcagaggaatgatgcaccattcgattattcagctcgagaagataatacaaaggaaagtgagatacagcagacagaatcagcaacggaaacaaatgaaattgaacccactgaaattgaagcagttcctcgagaaagcaatacctgtgtttcagaggagccttctcaagaagatcatataaaagaaagtgaaacaagttttgacaatcaagaagtgaacatcacagaatcttcagaagtaaatgatagtcacaaagatataatatctggaggaatctctgacccaagcaacacagcttctgctggggattcatctgaaggaagcaatgtccctgaaggcgagccacctgaacaggctgtgcaggaactgggatcagaggagataaagaacactcaaattgatgaagtgaatgaaacatcccttgaaatgaatgctactgtctttcagataccaagtcaagaagaaaatccagacacaaccaaattgcatgaatcaacagaggtgagcaacattgaagccacagaaatgcacggaaacccccaccaaagtgatctggctgctcagtcagaggagcaaacaacagaaggaatatcaagtggtctgaaaccagaatcaattgaaggtaatgatacagaagccaaaaaatgtcaaagtacctctcaggaaaaaacaatctctgcctctgagtctgtcccagaagatgcaaccactgaaccagatgttgatcaccaacaacttcaggatcaagaatctgccaaactcaaggaaaccgaagctgataaatttcaagaaattgtctcatctaacactctttcttctgaggagttcacatcaacagaaccaagttctgacaccgaagcagacaattcacagttagcagaagaaactgaggacaccgaaattgtgaaaagtaatactgctcttgctgaggcagcagctccagaaacagatgcaactgctgatacatcatctttccatgagacagatctagaagagaacaaggacacaggaacaattgaaacagaggatggtatggtatcaagtgactatacatcagaaaagatggacacggaaaccatggagactgaagcagtccctcatgatagtagtgatgcaaatataaaagaacacactgaagacgatacttcaacaccaaatgccccacatgctggtactgaacctgttcatgagctagaatcagttgaagtcagcgctgacacaacggaacatccaggagagacccatgactctgcttctgatgagcttactccaacagaagaaaatacagcagtaacagaaccatcttttagtacacaggaagtgcagaatctgacatctcaagaaatcaaggacagcgaagatgacaaaactgatgaattctcagatatcaatagctttcctattcctggagaggcagaccaagtaccaagaagtgaaacaactcctgatgtccaagaagtggaagaactgggtttaacagaagaaacaagagacattgaagccatagagcctggagatcagcaagaagacatagtttctacccttgagaagccagaaatagacggtgaaccaagtgctgataatcagcaggttcatgaggacaaactaccagaagtggaagacaataaagcaattgaagctgaagcctccaagcaaagtaatattgccactcctgataatgcagctgaagaaaggaatgaactggaaagtgatccagatccatatgcccagccagcagaacaggtagaattatccaaagacaatgagaacagccagcttgtgaagacagaagaaacctcagaccaaagcaattttgtcgtccttagaaggactacagaagattctgttgcaagagaaattgacccacctgttgccattaaacaagagcaaccagtggaagaaatcaagggtgtcgatgccactgaagctgaagaagactttcgtacaacccaagctgttgcaatagagaaactagcttcagtcaataaaatagcaacagtagaaccgacttatgatattcagcgaatggatgacttggaagcaacagaggaaaagaagcacgctgaagccattaatgaaggagatcaatccaatattgctgtttcagaggaacaaactccaacatataatggagaaacaccagaagatcatcatgtagaatcaaatgaaggaacgatggggaatgaaactgacaatatcattttggcacacggaatcaaagatgaaatacagaagtcagcagaactaaaggacggtccatgtgatttgtctgaaactgttttaacaactcggagaagtgagaacatgattgatgaagataatgttcaaacttatggcaatgatacagtagaggcttcaaacagtatccatcaagtcaaagaagagccagatgctggaaccgaacataattcaagccaaatgataagtgaatgtagtggagagaacgaaactcatgtccaagatagagatgtagacatgtggattctcacagaaggtgtcattgcagaagcatcacaggctttattggaaaatgatcctcaggcagcacaagatactatagaaaaggatgatacaacgaaaagtagtgagccaatcagtgatcacgatagcaggcaacattgtgatgtagaagcacttcaacaacaaagttgtgagacagaggccttatccattttggaacaagatgaggctctgcaaaagattgactcagatcaaaagcagaaagaagttgaggagattgaaagtcagaatgatgaacttcaggtagatgaacagaaacatgaagacaagagggatgatttagccaaagaaccactagtggagtaccagaatttcgaaaacagagcttcaaacaacacaaaagacaatgatgcattcaaggtaaataaaaggacattgtatgtgttaccttttctagatttctttaatcagaaacaacgaaaaacaaattttaccattgaaaccctgcaggttgaacaaacagaggcagccaatagtgagattctcaagaataaagccctacatatatccaaggaatccaccccaagcattatggctatgaaggttgaaaacattaaggaaacaagtgaaggaactgaagaagatgatgctgccaaaaatgataacaaagatgaacaggagaatgcagaaaatgttgatatagtatcaaaaacttctactaatgaacaaggccaaacaactgatgaaattagaaaagaagaggatcctgttcacatcattcaagcatcagagaaagagatcgcagatgaaatagaagaaagtaaagaaatacatgaagacaatgctatttgtcatgataaattacagacaaattctgaaaaggaagagtcacctcaaccgcattccaatgaaccatacaatgtggatgctaaaattgatgatacaacatctctatgcgaagaaataatccatgacaatacaagtataaatcctagagaaattgaagagataggagaaaacaaaggaccagacttcacttctgaaccttctgtagaatcatccatacagaacaatgttgaagactcaagcagtcatcacaaggttgaagatgaaaagctttcaatgtctgagaaaaatgatgtagatactgaagctatgcaagaaataaatgatgaatctggcgcggatataaaccaaacagaacaatgtcaagaagaaattactgcagatgatgttctgcaacttgaaacagaaggaaattcatttgacaagattgaagagactgcttcaaatgaggaaacagagactagtacagcagccactgaagcagtaacgttcaatgaagatattactgacaaggttagcggagctgatggagcaccgtctaacggaagtctcaagacctttactgacactggaagggatattgatgttccattggtaattacaacatcaaaggaagaaagtgtgaacgacactatggaaaacctcaatcttgaccttcctggacatcaggcacaggatggcaacaccgctgaaaaggtgctcagcttagaggaaagagaaagagagatgccttcatcagagaagctccttcaaactgaaccaggagagaatcaaattcccaatgaacaggatgaaaaggacatacgagatgagaatcaaactctaaaagaaaaggatgaagatgacatgcaagatacagaatttggagaggctaagaaagaagttcaacaagaattacctgtctcccattttctgatgaatctaatattgggaaaagagagcagtgatgcaaatgaagattcagaatctgaggctgcaaggaagcaaggtgaagcgacagaagatgacagctgcacgttcatttctgaacaagaagaaagtctggggtcacttcctacagaaaataaggtggatgacaatcccacctttgttgaacaagaaaaacatgaagttaaatgctctgaagaaacacaggaaatggtcgaagaacaaagtgatgatcagctgcacacagaaagatcaattgaaattgatgaggatatcaaaaagaacactcgtgctttagaaataccagcataccaagacaatccccaggatggaatttctggtgaattgcagacagaagaagcagctggtgtttctacaaaaatggtaactagagatattgatatttcgagtgttgtgctggacaacagaacagttggtactgtgtgtcaggaaaaaatggaggtatcaacaaaaaatgaaaatggaagcttgaggagcagcctgaatgactcaacaaacacaatggctccccaagacgatactctaggagaaggacaatcaaggctcgtgcttgaacctttacctgaagacaaaagtgttgatgtagtttctgagcaagcacctttgttgacagaatcaggaatgactgacgcgaatgacttatctagcgatactacaagtgctcaaaaccctgtgtctacaaaacccactgaatctgccagagttgaggccacatattctactgatattcaactggagaatgaagaagtagataagaaagaagaggaccagcatgcaaacacaaccaaagatgaagtttctaaagagattgtagaaagttcacatataaatctgcagaaaataacaaggcctgaagaaaaatctaatgagctagaaactcaaattaccgaaccagtttgtgacagtcaggcaattttggcccatgaaaaggaaatatctgaagaaaactttccaacagcagtcgaaattcaggctgatggtccaaacatgcagatcaaccaagataagcaagatgaagctgctgacatcgaaactgaaatgaagccagaaaaattaggggaatctaattttcaggaacaccaggacaatggtactgagcaaaagtctcctaaagagactgatgaaggagaccagcaacttgtggccaagaaagagattctgacccaagaaatggatgtgcatgagacagttgaaagacctcagcaagcagttgaaagtcctcagcaaacagtgagcataacatccaatgaagaccaggaactgtttgattcaaaggtccaggaacgtgatctcaatgtagtttcacccagagaagcttctgaggctgaagaaaactttgtggacgtaaccaagccagaattcagcacagatgaagaacaaagtccaaaggctgatgcagaagagaagatttatgacgagaagataaaggacatagagggaactaagaatttaactgatgaagcagcaataaaaactgaagcaccaggagcagcccagaagacacgtaaaaaatatagcctattgtctggcgtgggatcgaaggtaaaacaccaactcgcaaaagtgaagaaagccattgtaggcaaacctgggcacacaaaaccagtatctccgacggcataaaactccagtcaccttagaacatgtacattattgtattgtttgtagtcttgtgagccatttatttcggtggtagtgtttgcgatgggctaggagaaggtcctcttcacaaccatagcattggaattctatgatgttgcacatgaaacaccccccccccccctcgagagtatgttgaagatgtttgtaaatatgtctagtgtgtaaattcaagtttccctgaaactttgaggtagaatcaaggacatgtaattggtcaattgtttgtattcttcgttgaaatgcacaagcagtttgtggtcatgatgcagcttgcagcatattcttcacttcactcaagtgctcctggtctgttcagtccctatctgagtttaaaatgg

SEQ ID NO: 1512 - DNA, 1550 bp, Zea mays
ccccacaccacgaaacaactggaccagtttgcccccacgcctcctggcaccaagtagttttccttgctcctttttttttttctctctctctataaaaacaaccgaggcgccactcagccggagaccatgtcccactcccctctccctcctccagtcttccaaaatatctccctgcgcttttccgagtccttttccctccaaggaacagaaacaaccggagcttttaccccacccgctttcccctccccgccaggaacaacagggctcctcgcaataattcgtccatccatggcgaagctcgtcaacaagctggtcgattcgttcgaccaccacgaggcgccggcgccggacgtcggctgcgtgcgcgccgtgctggccgagctcgtcctcaccttcctcttcgtcttcaccggcgtctccgcctccatggccgccggggccggcgggaagcccggggaggctatgccgatggcgacgctggcggcggtggctatcgcgcacgcgctggccgctggcgtcctggtgacggccggcttccacgtctccggcggccacctcaaccccgcggtgacggtggggatcttggttcgcggccacatcaccaagctccgggcgctgctgtacgtcgccgcccagctgctggcgtcctccctcgcctgcatcctcctccgctacctcagcggcggcatggtgaccccggtgcacgccctgggcgctggcatcagcccgatgcagggcctggtgatggaggtgatcctcaccttctcgctgctcttcgtcacctacgccatgatcctggacccgcggagccaggtccggaccatcggcccgctgctgacggggctcatagtcggcgccaacagcctcgccggcggcaacttcaccggcgcgtccatgaacccggcgcggtccttcggtcccgccatggccaccggggtctggaccaaccactgggtctactggatcggcccgctgctcggcgggtccctggccggcttcgtgtacgagtcgctgttcatggtgtacaagacgcacgagccgctgctcaatggagacatctgacgaccgtcgggcccccagggcagtgagcacggttcatgcttgttttctgtaaaatagttcgttacctacaagcatgatgcatatattgaccaaggtaattaataggagagggttgctgttaccctggtgggattgtgggatgtagaaattgttgctgggctttgcttttttttttacttttcctcccaaggaattttttaagagggctgggttctgtaaaggatttgtttaggctattagttagctatgtagtagaaaactagagaatgctatacgttggacgtgattttttttcacgtatattgttgtacgatatggtattttttatcttccggatgaaattggatgtacatagcataattttttttgaagcagtatttatgctatcatcgctcggggaaatatcataccctcaacaaccagcaaatggattcaaagatcttgctgttcattttaatcttaattcgtatggattggatgagattgag

SEQ ID NO: 1513 - DNA, 3978 bp, Zea mays
acgcgtccgtgatccgtccgtcgccctccccttcctgcgcaagcgtgcgcctacctgcatccgctatccgtcggcgatgtcggtgccccccgccggcaagcgccaggtgtccctgcggggctcgagcgcgaaggagatcacacgcgacgcgctgctgcagaaggtttccgaggagcgccagctccgcagccacctccgccgcgccgccgcggccgccttctccatccagcgaatatggagaaggtaccatgtgataagaatggtttcagaacagctccatgaagactgggaactattaatgaaccagcctaacatcgacttgactactcaatggatatccaaaaagatgcttagaccgtttcttttcttcattactcaaccttctagctggtatattggacaatggagcaagactgtggaatctatcttaacatgcttcaagattatcttgaatagtataaattcaatggatgcaaggaaaaacttctgctcctttgctgtgggtataccagaagagagatctatttggctttatcaggccaaaaagctgatttcactgtgctcttccattcttgccaggtacgaccattcctgttgcaaggatggaagcatagtcgacatgactgctattgctatgagattggctgtctctctaactgattgcaaaacatggaaaagtttgaacagtgagaacactagcgctgcagatgcttctgtacagagtttgattgaatttattggtacgtgccagagtggcatgtataattgtgttaggcaatatataaagtctcttggtcctcatgttacttcagcgaagaaaagttctgcaactgcaacagatgatgattttcttattactgctagtgcagtcactttagccttgcgcccattcgattctaagaaagcaaagggcggtgttgatctgaatggtgcttcaaagaaatacttcacacttatacttacaataccagatctgtgcaaacgcatgccacctcttttgttacctgctcttaaacatttttctgtgctgcaaccgagtctcaatattttactgatctccaaggataaaatatttgaagaaataataaaactggaacagtcagaggtttcagctagtattattccttgttctggttgggctcttggaaatatagtgaacttagctaccaatcatgatgacttatccaattcagggtgtttcattcaagagttagatttctgcttatatgttgatgttattaattgtatttctgaaaacttactggaaagttttgagaaaagcaagggaacgtctcaaaatgttggtaatatcactttccatgccgacacatctgttgcagaggaagaggataccaatgacgactgcagaatgagaacattatttatggaccttctgaagccaatttaccagcaatggcaccttagaaaacttttgatgttggcaaaagaggattttccatgccgcagggcaactgattatgatccaaacttgaagaatattcactttcgaatcctaaagttgtcagatgttatatgcttctactatcacatgcttagaattttctcatcacttaacccttctatcggtgcaatgcctattctcaacatgcttgcattctcacctggatttctagttgatttatgggaggcactagaaatgcccatttttggtccacctatccagaattcacaagaaacaggacacgagaaacagttggctacaagtagttcaggtgtgcaagtatcctccatgaggcaaagaaggaatgccaaggacacagcaaacaggtggtcaaatgtgctccagaagattactggaaaatccaatgattcagaggagggcactttatctgatagtattttattttctcatgagtctaatgatgatgcattaacttcatgggatattgaagccatgagacatgcatctgagggtattggaaaggacttaatgtgcattatgtatcttttctgtgctatatatggacacctattacttgtgctagatgatatcgagttttatgaaaagcaggttccttttactttagagcagcagcggaagattgcatcagcacttaatacatttgtatacaattctttcattcaaaatagtggaagctacagcaatcctcttgtggatgtagctgtcagatgtcttaatctactctatgaaagggacagtaggcataagttttgtcctatttccttgtggttggcacctgctagaaatggccgaattccaattgctgctgctgccaggtctcatgaggcagcatttggtatttttccagggattcctcatcggagctctgtacttaccacattaccacatgtatatccatttgaagagagagtgcaaatgtttagagaatttattgagtcagacaaagcatcgagaagggttactggtgaagtttctgggccaggcccgggatcgattgagatagttattcgtcgaggccatataattgatgatggatacaggcagttgaactgcctaagatcaaagttgaaatcttgcattcacgtgtcatttgtgagtgaatgcggtcttcctgaagctggtttggactatggtggtctgtcaaaagagttcctaacagatctctcaaagtccgcttttagtccagagtatggactattttcacaaacatcagcatctgatactagcttaattcccagcaattctgctaagcttctggataacggaattgatatgattgaatttcttggtcgagttgtcggcaaagcactctatgaggggattctgttggactattctttctcaccagtatttgtgcagaaacttcttggacggtataattttctggatgaactatcaactcttgatcccgagctttatagaaatcttatgcaactaaagcactatgatggagatgttgaggatctatttttggattttactgtaactgaagagttgggtggtaaaagaatcgtccatgagcttagacctggtggtaaaaatatatcagtgacgaacgaaaacaagttacactatgttcatgcaatggcagatttcaaacttaaccgacagatacttccatttgcaaacgcattttatagaggactcagcgatctcatttcaccatattggctgagcctgtttaatgcaaatgaatttaatcagttactttcaggcggactacaggattttgacgttgatgatttgcggaacaacaccaagtatactggtggttatactgagtcaagtcgaactgttaaactcttctgggaggtcatcaaagcatttaagccaacagagcgttgtttgctcttaaagtttgtgacaagctgttcacgagctccactgcttggattcaagtacttgcaaccttctttcacaattcataaggttccatgtgatgtaacactttgggcatcaattggaggccaagatgtagatcgtcttccatctgcttccacatgctacaatacgctcaagcttcctacatacaagcggtcaagcacgctaaggagcaagctgctttacgccataagctcaaatactggatttgaactctcgtagaggtatattcagtggttttgtaaccctgctttggttttgctgtgaatagaggtatagcaaaattcgatcggatgtacaattgcatcttgattaatcggagtaacagcttctatgaaggtagcgcaatgcataaaaaatgtttgtttggccggcggggccgtttggatcgatcccaggcaaaatccgacgcctggggagctccgttcaccaggccggtttgcaattcaaacagccatacgtgtgtttctattgattgtgctgagagagagagagagagagagagagagagagagggaggggggagggagagggagatagagagagagtgagggaggagagagagagagagagagagagagagagagagagagagagagagagagagagagaaagagagagagagagagagagagagagagagagagagagag

SEQ ID NO: 1514 - DNA, 1730 bp, Zea mays
cgacagtttctgacactccatttctctgcaggccggagtggcttgcagcaagagctcgcgagagggagaagaagaccaatggctcttgggcagcagctgagagtactgcacgctctggatgttgccaggacacagctctaccactttatggcaaccgcaatcgccggcatgggcttcttcacggatgcctatgatttcttcgccatctccctcgtcatggatctcataagctacctgtactacgaggaacagattgatcgcggcgtcaaagccaccatcaacggcatcgctctgtgtggcgccgtgccggggcaactggtctttggctggctgggcgacaagatgggccgcaagcgcatctacggcgtcacgctgcttctcatggtggtcacctccctggcgtcgggcctctacttcggcaccaacgaagcgtcgaacgtggtggccgtcctctgcttcttccgcttctggcttggcttcggcatcggcggcgattacccgctctcggcaaccatcatgtccgagtacgccaacaagaggagacgcggcgccttcattgcggctgttttcgccatgcaaggtttcggcaaccttgcagctggaatcgttgccgtggtggtatcagcctcgtttctgaggaccaatccaagaaggaacgctaacttcgtctggcggatcgttctcatgctgggcgcggttccggcgatcctcacctactactggcgcatgaagatgcccgagacggcgcggtacaccgcgctggtggcaaaggatgcgaggaaggcagcgtcagacatgtcctccgtcctccacgtggaaatcagcccagaggacgaagcagtcaggcaggaccagtacggtctcttctcgccgcagttcctacgataccatggaacacacctgctcgccaccagcgcgtgctggctcgccgtcgacatcaccttctactcgctcaacctctacatgaaggacatcttcgtcgacgtcggtctgattgaccctccggggaaaaaccacttgttcatgcggatgaccgtcactaccttgctgcacacgggcatcgcgctctgtggtacactgccgggatacttcttcaccgtcgcattcgtggaccgcatcggccgtgtcaggattcagctactgggattcactatgatgtccgtctttgacagccatcctcgcagccacttatgcgtactggaaacggcaggaaacaatacagcgcaagatgggcttcgcagtcttgtatggcttgaccaacttcttcgccaattttggtcccaacaccacaacattcatagttccggcggagattttcccagcacggatgcgcgcgacgtgccatggcatagccggcgcattcgggaagataggcgccatcatcggcgtgtttggcttcatgtccaacatggaagaacacggcgtcgtcccaagaaagctgtgggcactattttcctccaacctagtcggccttgtgttcaccttccttctaccggattccaaaggtaagtcgctggaagagatggccggtgaaacggaagaacagcagcagcaacaggacgctgcagtagttgccgcggccgaccatataaatttggtgcctatttagcacgcccaatggtcactgtttgttgcacgcaatggggtgcgtggcactacttcgtgatatgtgaatatttcatagatcttcttctactgtgctcttcccaatatccatatatatgttagca

SEQ ID NO: 1515 - DNA, 2654 bp, Zea mays
tatatatatagggcccttttgtcataaattttctcacaaccatagccggaaaaggcaccaatctagctagtacgcctagcaataatcagcaccttaggccgagtattttctttagatgaaataaaaaaatggacagaatcccatcctcgattcctcatgaaccatactatctcccaagtccaaccctagcaacggcgccactggcaagaacaaggtaactaggggaccatctcctctatataagcactcttccacggggtagacggtaccaccagaacgggtgtagaagcccagccagtaggataagccctcccagatctggccgggcggccggctgctgccttcttccccaattcgggaaagacgactatgaagatcagtttgtgtagcgtggtttggttcttctctctagctgtatctccttgctcccccgcgcgcgctctctctctctccgtgtccagttcttgttgcgtctgcttggtactgtactttgcagcggtggtcgacgttgggatgatgggggcgctggctggagccagcagctcgacggtgtggctgacagaagagagtgagcacgcatcggccagactgcatctatatacggctgctcctggcgaatggatagatgccaaggcgcagctgctgttgcgtgctcacttctctttctgtcagctccctctcctcctagggacttgttccgccgtatgcatccaccaccgtcccagtagtcccacttccgtccatcgcagcgcgccaatgatgcgtcgtcgtcgtcgtccaggcgcagccgttccccttatcacatcggtcgccgttctctgaggcgcctgccggccttgtcgtgtccctacctgaaaccttatcttgtctcccgctcggatttcgatgacctctgctctttggaataaggtactcttaaaatctcagggaagcttagccgcccagcgcatgtacgccatggacccttgcgctgcgggctgcggctggcaacgtttcttttcttttatcggtgaggtcctcgttgccgtctttgtggcttccgatgatggaattttagccagctccgttccgtccttcaggcttcaaccttgggggaagggacgcgtgaaggtttggttaacttaacacctgtgtctttgctctcctccctaggagtccgcttaacggaaagcactgtttgactgctctctctctctcccccctccctctcttatctactcttcctttccgtaaagatttcacacaaaaactattggatcttttccccttttgttgtgctcatctcatgtggttctgtgactgctgagagataggtgggcgaggcagccatggagttgatggtcggaggcagatctgcttggatgcaagtggagagggggctggcgcgccgcacgcggcacctacctccagcagcggcgccagcgccggcggcttcttgtagatctggaagcgccaatattttcttctctagccgtttagcaatcatcatatataggaatgtggacgtgctccatgtacctcttcccctactaatcaagcaaggtaacttttatgttacatttttggttggattgtacattatgcatttttggtagtcatatattatgcattttaatttggttgttggctggcttttggacattggttatttttatataattggaccaagactaatgttatctaagaagttgttctttgttgatttgagatgctcaaatattctatttggtgcaatcaaatcatggaagtccaatttagtttagcttatactacttgattagttaagtcatctatatggtttggacacatattgacatcatggttcaaatagaattgcaatgtagatacactttgagccctatatatctatctacctcggtgatggataaagtcattgcaaaggacctacaacaagtagatatccctcggtgtatatatgttcttttgttgactacgtagtgctagtaaatggaaattggtggaagactaggttttcgctggcaaactagagacaaagattttagatttcatcataattccaacactacttaacctaaggagtgacatgctagtttggaagatcaattaatgtagaaggaaaccttctgatatttgggattgatggtgcaaagagatagtggcattagcagaaatgttaaccgtagaatgaaagttagtgtggatgaaatgacaccaagaatctagcattctcttagatgtatgacaagaaggtgccacataggctaaaaaggcagggcccatagaacaacggtaaaaatacattgttatttagtctagaatgttgacataaaagtagacattcgatgtttaaatgttgtagaaatgcattagttgtattgttattatgattgaatgctccaagaaggggtgggtcaggttgaatagggctctaaaagaagttaaagcttatcaacaataacctatgcaattctacttcaagcattgcatgaattttcatagaaataataaatagagatggaacaagaagggtccttagcttcatgtcaagctgaaccatatatatgaagattgatcacaactaagtgcgtaaatgcaaaaccaaatctacttgtcaatcaacatcttaaaggcacaaacaaattgcaaaaagtaaattcaagaaaataaaaaga

SEQ ID NO: 1516 - DNA, 1558 bp, Zea mays
tgccggccgagtgctcactacctcgaagagcaagcaagagaggcagacacagatagctgccagtagagcttcttcttcttcttcttcttccgcttcctcttgccgagcgcagtgctacgtaggaaggagttcacgccctcgcgcacgcgtcgtagctcgtcggtcgatcgccggaaatgtcgaccaactcgagggccaactccagggccaacttcaacaacgagatccacgacatcggcacggcggtgcacaactccagcagcctgccccccgcgtactacgaccggtcgctagcggacatgttccctccccacctcctcaagaaggtggtctcggaggtggtgtccacgttcctgctggtgttcgtgacgtgcggggcggcggggatctacggcagcgacaaggaccgcatctcgcagctggggcagtcggtcgccggcggcctcatcgtcaccgtgatgatctacgccgtcggccacatctccggcgcgcacatgaaccccgccgtcacgctcgccttcgccgtgttccgccatttcccctggatccaggtcccgttctactgggcggcgcagttcaccggcgccatctgcgcgtcgttcgtgctcaaggccgtgctgcaccccatcgccgtgctgggcaccaccacgccggcggggccgcactggcactcgctcatcatcgaggtcatcgtcaccttcaacatgatgttcgtcaccctcgccgtcgccacggacacgagagcggtgggtgagttggccgggttggcggttggttctgcggtttgcatcacgtccatcttcgcaggggcggtgtcgggcggatcgatgaacccggcgaggacgctggggccggcgctggcgagcaacctctacaccggcctctggatctacttcctgggccccgtcctcggcacgctctccggcgcctggacctacaccttcatccgcttcgaggaggcgcccagcaaggacgcgtcgtcgtcgcactcgcagaagctctcctccttcaagctccgccgcctgcagagccagtccgtcgccgccgacgccgacgacgacgaggagctcgaccacatccaggtgtgaagtgtgatgtcatgtccggccgctccgccgtacgtcccgtcgatcagagagtgcacacgtacgtgctactcctaacactatgtgcctagcaggatagttagttatggtcgatggtgatgtctgctggtctgtgcgccgatcggttctcatgatccgatccatgcgcgcacgcactcgcattgtgtgtccggttggtggcgcactggcgcgctgtggatacatgggctcgctctgtcaatgtgccaatgagctctggcgcttctttttgggacggatgaacactgtgccgtgtgcgtacgtgtgtgcagtcagtcgtacgcgcgtgccaagcaagcgttcgtacgtctcctgctgtcactcttgttccgaaatcagttgatggtgcatatatacaaagatcatctgtaaggagggttttcaaatgctggaaggcaaatgtgtttcatccctaaataaacatggccatcgtc

SEQ ID NO: 1517 - DNA, 1275 bp, Zea mays
acaagcctctctcacacacacacacatcgttgtccaaacaagatcggcgcggctcacgcggcctagctcgccggcctaacgaggccggatattccttaacctagctagctaacagctaactagatagatcgatccatcagctggcagccatgaatatgatcagggcagtacggcgccggttcaccgtcggccacctggctacggccaaagaccccgccacgctgcgccacgcggccgccgaactcctcgccaccgccatcttcgtcttcgccgccgagggtgccacgctctctctcggtacgtacctacctacttacgttatatatatactgtgtataaattaacggtgcatgctgtgtgcttgtcgtcgcgcgtgtctcctcactcgtcgtacgtcgtaaacgtgtgcaccggtgccgcgcgcgcgcagggaggatgcaccaccatgacaagggcggcggcggcctggtggcggtggcgctcgcgcacgccctcgcgctcgcggccgcagtggggtgcgccgccaacatctccggcggccacgtcaacccggccgtcaccttcggcgcgctgctcgccggccggatctgcctcgtccgctccctcgtctactgggccgcgcagctgctcggcgccgtcgccgccgcgctcgtgctcaggctcgccaccggagggatgcatctgccggagtacgcgctggcggggggcgtgagcggatggaacgcggcggtgctggaggcggccatggcgttcgggctcatgtacgcctactttgcgacggtgatggacaaagcgcggagggtccgcgccggcgccggagcgctggcggcgccgctcgccgtggggcttctggcgggggccaacgtgctggcctgcggcgcgctggagggcgccgtgatgaatccggcgcgcgcgttcgggcccgccgtcgtgggctcccgtcgctggagacaccaatgggtgtactgggtggggcccatggtcggcgccggcctctccggcgtcgtctacgagcacctcgtcgccggcccggccgccgaggaggaggagcccgcgccgagctgcggcgaccgccgtcgtgcgtagaggactacatgcatgcaggagcagcaggacgtcgtcgtcgtccccgctcctcggaatcttctgaataaaaaaaacagcttgcatgcgtgctcaattgttgtgtgtcgtggtcgatcatgagtagaattaatgtttcatgcatgcactcttaccgtcttctacttatgtccttgtttgcttcaataatct

SEQ ID NO: 1518 - DNA, 4454 bp, Zea mays
ctcgtcgtcatttcctcctaaaatccccaagcctccaatccactgaactaaaccctagacatggcgggtagagactactgccggttgccggtgcgcccgcgcgacttctgaggccccgcccccgtcccggcgtcgccggaactggctccactgtcgcccccatcactgggactgggagagtgggagttcagagccgcagacgctggggcgccgggtcaccggaaggccgggaaggaaggtgtggccgcaagacgcaggcaggaggcatcgactcgactcaccatgtctcagtcaccgggaggacgggaaggcatatattacagcaggcagaggaaacctgagcgcaatggcagtgtatttacacctatagctgcaatgtattccagtggtcatgcactccctgttgcaaataggagccacggtttggtatttggcagtctgagcaaggactgggacgacattcgccagcgcaaggatcagttggtcaacttccttgctagtcttgaacgagcctctggagattctgcggcagctggcaaaatcgaagatagcaaattggccagtcctgtggagccaactgaacaaaaagagaaggctgccataatcgttcttgattcagacgatgaggacggaaatggttcaggaaacagtaagttggcatctgagactaacaaagaactcggaacatctggattgattaataatatcgcagaaaggatgacgtttaatgggagccaagcatttggaaccgtgcatacttatggagataagaacacacagattgttccgtatggtcaatgttctgctttagtgaatcagtttcctttgcaaaccagttggcaaccatctattcagtttgagagagtcgtgctgcagaaaaggcctgaggagcagcgaatgcaagatcttgtggctgctagcatagccgagaagagagcagaaacacaagtgttcctttcacttcccacagagaaaaagcgaaggagatcagaccccagtctgcatgccagtgacgatactgctactgtccctaaacaaagaaaaagtaaaggtgccacagttgtagcagcagctaatttgtcattggtttcacaacaaactgctacatcaccagaacctgacatggttatagaggaagaggagaaacataaaaatgaaagtgatggtcttgacgattattggaaagattttgcattggctgttgaaagcacaaagcttgacgaagttgatgaggcggcaattgaaaaggaagataatggaaagatggaggacatcgattgcaatcatgacatccggattcatgaagatttgggtcatgtatgccgtgtgtgtggtatgattgtgagaagagctgattcaataattgattatcagtggaaaaaggcttcaaggagaagaacgaatggctatggaggacattcaaaagatgctgatgagatagattgtggtactgttaaactgtctgaagatttcatagtcgcagatattgctattcatcctagacatgctcggataatgaaaccacatcagttggaaggtttcaactttttggttaagaatttgattggagacaagcctggaggttgcattctagctcatgccccaggtacagggaaaacatttatgcttataagcttcattcagagcttcatggcaaggtatccatctgcaaggcctcttgttgtgctgcccaaagggattctaggtatatggaagacagaaattaaacgatggcaagtgcaggatataccagtgtacgatttttactctgtcaaggctgaaaaaagagtagaacagttgcaaatcctcaaatcttgggaagacaagatgagtatactatttcttggatacaagcagttctccacaatcgtcactgatgatgggggcagcaatgtcacagctgcatgtcgagacaggctgcttaaggttcccaaccttctgatacttgacgaaggacatacacctagaaatcgggagactaatgtactcgaatcactaaatagagtggaaacaccacgcaaagtggttctttcgggtacacttttccagaatcatgttgaagaagtgtttaatatcttgaatctcgttcgcccaaagtttctcaggatggaatcatcccgtcctactgccagacgtataatgagtcaagttgaaatagttggtagaagttcgaaagggcttgctgatggcgcattcactaaggcagttgaagaaaccttattgaatgatgagaacttcaagagaaaagctcatgttattagaggtcttagagaactaacaaaggatgttcttcactattataagggtgatatcttagatgaactacctggcttagtagacttcagtgtgtttttgaagctcacacccaaacagaaagacattatttataagttggaagcacatgatcggttcaaaagaaatgcagtagggagtgcactgtacattcatccatgtctttcagaactttcagaggttaatgctgagcatagggctaacacctttagagatgatttagttgatagtctggtagattctatcactgtgagagatggcgtgaaggccaattttttcatgaatatcctgtcacttgctaattctgcaggagagaaagtgctagctttcagtcaatatatatctcccatgattttctttgaaaggctgctggtgaagaagaaaggctggcatgtggggaaagagatctttatgatctctggtgatactagccaagaagacagagaattggcaacggaccattttaacaactctgctgacgcaaaaattatgtttggttctatcaaggcatgtggggagggtatctccctcgttggtgcgtcgagagttgtcattctggacgtacacctgaacccatctgtcacccgtcaagcgattgggcgtgcattcaggcccggacagcagaagaaggtgtttgtgtacaggcttgtagctgccgattctgacgaggtaaaggtccatgagacagcattcaagaaagaagtcataccgaagctgtggttcgaatggagcgagcactgtactacggaagacttcaaacttggtcaaattgatattgatgactctggtgacgaactgttggatactaaagcaatccgcaaggatatcaaagcgctgtatagaaggtaacaagctttgtggccactggacaccatgtacatattgcagtgctgaccgtcgagctgatccttaaactgaagaaagaggtgacgggtgttgcggtggctacattgcgcggtcattcccagctatatccgtggaatggcggcttcttttgttcgtagtatgtgccaacttggggcagcagtcagctgatccccagacacatttctagactcttttttaggctcaagtttctgagaattaacctgctatggcgtttagccttaagtaaatatttcgttcgcaacaataataacccagtaaacctaatttgttcttgtgcgtttgtggtggtggttcttgaaatttacctggcgccttcttcctgggctagatgctatgcaggtgtcacaggttggtttgttggcatgtagaatcgggaaatgctaatctcgaaagctcgtagtttccttttcccccccgggtgacatgtttattcacctcttactagttaccacgtccatttccaactataagatatgatactttggcttttgaagatacattacttttattacgtatagtgtatatcacaatttttcttcattttttttgctattgcaagagccaatggtgaaaattcgatctttccccaaaaccaaacaaaaacttcatataaaaaagtgttataatgttaatatatcaaaccttgagacacaaagcagaatttggcttgccctcacttttttccttgcgtcgtctctatttgaccatacgaaattcatcccaaatgtgtactcatgtttttcgtacatccaccgttgagccgttccaatgtttcaattgtatgtttctttcccatggggcttttctttaacatcatataaaaaaggttatccaaacctacaagaatgtatgctctccatttcttctcttagggagtgtttggtctcctcagctaaagtaatgcaaagcatccgtgcatgaacattgcttcctcaaaatccagctcggtactacaggacatcttcatcttgaactgtctagagacatgcctcggtcgtccgtctctggccttcagagaggggactcatcagttggcagcattccggatctgccagaagctaactgaacttttcgagtccttggctcacgtctgttggtctgagcagttattttgtttttgttgatatagaaatttcacgatgatgatgggttattggatagacggtagacgcagttttgagcattaagggtgggtaattggtgtgaagtcaattgtaagtgtgttgtatagaatgcgttgtgactacttaattatgtagaagctgattgttacc

SEQ ID NO: 1519 - DNA, 1854 bp, Zea mays
tgtatatagaaagtcgcgaagagacgagctctaaagatttctcaagagacccctcaattaatgggttgtacatgccacgacccacgataagtcttcatgtctagaagcttgcgtaccaacaaaactgcaattatctcctcagtctccttcaaacaactcttttttctattgttagactcgaagcctatccccttcacggagctctcgccaagcgctatgggggacgccaacggcggcagtatgcacgttgtgatgctgccatggctggcgttcggccacatcctccccttcacggagctcgccaagcgcatagctaggcagggccaccgggtcaccctcttctccacgccaagaaacaccaggcggttaatccgcatccctccagaactcgcggggcatatccgcgtcgtggacatcgcgctgccgcgcgtggagcgcctgccggaggactgcgaggcgagcatagacctgccatccgacgacctccgcccgtacctccgcgtagcctacgacaccgccttcgccgacaaactctcggccatcctgaaggagccggggccggagaggccggactgggtgctcatcgactacgccgcgtactgggcgccagcggccgcggcgaagcacggcgtgccgtgcgccttcctgagcctgttcggcgccgcgacgctcagtttctatggtcccccggaggggctcatgggacgcggcaagtacgccaggacgaagccggaggacctcaccgtagtacccgactacgtgccgttcccaaccaccgtcgcgcaccgcagcttcgaggcgcgcgagctattcaagccaggccttgtcccggacgactccggcgtgtcggagggccacagattcggcgtgtccatcggagagagccagattgtaggcatcaggagcagaacagagctcgagtcggagtggctgcaggtgcttggcaagctctacaagaagccggtgatcccgatcggcctgttccctccgccgcccacgcaagacatcgccggccacgaggcgactttgcggtggctggacaggcaggctcagggctccgtcgtgtacgcggccttcggcagcgaggcgaagctgacgagcgcgcagctccaaacaattgcgctaggtttggaggcttccggcctgccgttcctctgggcattcaggccgccagccgacgccgcacccggacaaggcacgggcgggttgcccgaaggcttcgaggagcgtgtcaatgaccggggattggtctgccgcggctgggtgcctcaacccaggcttttggctcatgaatcggttggtgggtttctgacccatgccggctggaactccatcgccgaaggcctctcgcggggcgtcacgatggtgctgttgccgctgatgttcgatcagggcctcaacgccaggcttcttgtggataagaagatcgggattgaggtggagagggacgaagacgacggcacgttcgcgcccaaagacatcgcagatgctctgaggacggccatggcggagaaccaagacggaactagggtcaaggaactggccgaggtgtttggaaatgacgaggccaatgatcagtgcctgcgagatttcctccggtatctgtcagaatacatcaggcagcatcaaggttagttccagtccatttcgaggctaatgttaatgcagaaaagggcaaagaaatggcagtgagtcacgtcacgccatcaaaaaaaatccttccaggcaaatactactccgtagacaatagaatatggaatggaagcatgcatctttgagattattgccaagaaattcttgctctctcttctttagaaaaaaaaggaagttttctttgttaagaaatctcttttt

SEQ ID NO: 1520 - DNA, 2326 bp, Zea mays
atcaggggcaagttacaaaaactgtctcctctcgcacacgccacgcgcgtacacacgagcgccccgcggaaagggtagcaaacggcccggacagtgagccgcgcacctttcacacttgacttgatgggttgctggcgctcgtcgctgcgctcagggccccacgcggcggagaagccgccccgccaccgccaccgcccgccaccgccaccgacgaacggccccacctcctccctgaacgcgcagcaggccgcgcccccggcccgcgcctccggggaagtaccggcgctcgccgagttctcgctggcggagctccgcgcggccactgccgggttcgcgccggggaacatcgtctccgagagcggcgagaaggcgcccaacctcgtctacagaggccagctcaggggccccggcggcgccccgccgcgcgcagttgccgtgaagaagttcgccaagctcgcgtggcccgaccccaagcagttcgcggaggaggcgaagggggtcggaggcctgcggcaccggagcatggcgaaccttatcggttattgctgcgacggcgacgatcgcctgctcgtcgccgagttcatgcccaacgacaccctcgccaagcaccttttccactgggaaaaccagactattgagtgggctatgcgtctgagagttgcatactacatttcccaagcattggaatactgtagtaccaaggggtggcctttatatcatgacctaaatgcatacagggtcctctttgatgagaatggtgaccctcggctgtcatgctttggtctgatgaaaaacagcagggatggaaaaagctatagcacgaacctagcatatacacctccagaatatctgagaaatggcagggttactccagaaagtgtcattttcagttttggcactgtacttcttgaccttctcagtgggaaacgcataccgccttcacatgcgcttgatatcatgagaggcagaaacatccaagcagttatggattcacatttggagggaaactactcaattgaggtggctactacattggtgaatcttgcttctcagtgtctacaatatgagccaagagatcgtcctgacataaaaaagttggtttccattctggagcctttgcagaaaaaaatagaggtaccgtcctatgtgatgcttggaattgcaaagccagtggaagaaccacaggcacctcctactccacagcgccctctttctcccatgggagaagcttgttccagaatggaccttactgccatctatcagatcctattcacaacgcattaccgagatgatgaagggagcaatgagctgtcttttcaagaatggacacagcagatgagggatatgctggatgcaaggaaacgtggcgactctgccttcaaagacaaagattttaaggcagcaatcgattgctatactcaggtgggcatgtgcttcttgttcatgaaaagctatttaaaagtgctcccccgccccccagatatatcactcaaatgtagctgtagagagcggggtaatttggtttattttatttacctacctacaatgggacactccaatgtagctgattcttctttccccgtgtttgttgcacagtttgtcgatgtggggataatggtgtcaccgactgtattcgccagacgaagcttgtgctaccttatgtgtgaccaacctgatgcggccctccgtgatgcaatgcaagcgcagatcgtctaccctgattggccaacagcattctacatgcaggcagttgcactatccaagctaaacatgcagagtgacgccgtggacatgctgaacgaggcatcacagctagaagagaagaggcaaaagagcacaagagttccttgaatggcattgccagctcagagaagtggcacgtcttctatacatataacatagattgcacactatgtagtacagtagtatattctccaacctttcccaccctgtaaaaagcgcatagtatattgcgtggtctagaattagaagtaaggagaagtgaactgcagagaagatgctctttgctccctggactctggagccctgtgatggcacttgtgtgataggttcaattttttgggcccatgtatataacatccgttgcatgggagtttagagtataggttgccggttggtcaggagggccctgtcgccgaagataataaacatgttatgtttgtgaaaaactgtctgggtatcgcttccagcagggcatgttagtaagggcttgtttgtatctcagagctaaaacaaaagtgactaaagttttagtcaggctaaagatctaaacattaagagctaagagctaaaagtgactaaaata

SEQ ID NO: 1521 - DNA, 1468 bp, Zea mays
atctactcgctgcagacctcgcgggagcccacgccccgcggctccagcttcaaccagtccgacttctacgccatgttcaacgggagcaagatggccagcccgctggcgcagcccggcgccgcacgcgcgccggggctcgacgagcaggtggccaacaagttcgcgtctgggaagggtggcgacgccgcggcgtaccccgcgcccaaccccggcatgatgaccgccacggtacgtcggtctactgtccccaatctctttacatttggcaacgatgtttactccaggaagaaggagctgggcggctccaactccaactccaacaaggagctgcacatgttcgtatggagctccagcgcgtcgcccgtgtcggaggccaacctccgcaacgccgtcaaccacgccgcctccaccgacttcgccgccgcgccaccacccgctgaaactgatatacgagttgtctgtccctgcgtgtcacatgcatcaggcgtgagtgggactgtcacgccggccaaagccggaccccgcggccaacggcggggacctggagatcgaggacggcctcaagagccccgcgacggggctggccgccaagttcccctgtcgggctcgccgtacgtggccccgcgcaagaagggcgccgacgcgccggggctggaggaggccgcgcacccgatgccgccggcgagcgtgatgacgcgcctcatcctcatcatggtgtggaggaagctgatcaggaaccccaacacctactccagcctcatcggcctcgtctggtccctcgtctcgttcaggtttaacatccagatgccctcgattataaagggatcgatatctatattatccgacgcagggctaggcatggccatgttcagcttaggtctgttcatggctctgcaaccgaagctcatctcctgcggtaagagggtggcgacgttcgccatggccgtgaggtttttgaccggcccggccgtgatcgccgccacctccatcgccattgggctccggggagtgctcctgcacgtcgccatcgttcaggctgcacttccacaaggcatcgtccccttcgtgtttgccaaggagtacaactgccatcctcaaatacttagcacagcggttatattcgggatgctgatcgcgcttccgatcacgatactctactacattcttcttggaatttagatttctgggtaggcagagccgctaggattctaggaatgtagcagcgaacgcatgcaaagtgaagcaaattggatatcctgaagaccatcggagcagagaaataggggaagctaataggaccctagacagaaatgcagatgagggtgaaaaaaaaaatccttgattctatatattttttttgcattttctgttaccgttttagattcaaagcaaagtttagagctttgagcatggaggattgaaccgttaaccgggcaacttggtactaaagattcctaccagttgattc

SEQ ID NO: 1522 - DNA, 2298 bp, Zea mays
gcccgattcgatgataacaaaagaaagccaaggagccggatgcaaaggtctcccagcttttgccattttggcgaccagctccaacaaccggagagggggagagagagagagctcgagtcacaaagctaaaaaaagcaccgagaaatctagtggtgcagcgagcgaatccgtccggccgtccccttcctccgccacccatccccaaaattttcaccgcacgtcgcctccccgcgacgacgacgcccgaagcttccagggccctcccctcccccccgcggccgcccctccctagatcgccgcctccggcagcggcgaggctgcatcgcgagggcggcggaggagccgggcgacggggtcgacgaaggcggggaagacgaggctagggttcggggtcgctgctgctgggctgcgtctgagggaggaggatgcatatgatgcggcggctcaagagcatcgcctccggccgctcgtcggtctccgatccgggtggtgactctggctccaaaagaccaaagtttgagcaggatggagcaggagatattgttatggagccacacttaaccgaggataaacctgtgcggatagaccaagaatcatcgtcaacatctaatagggatgctgaggcaagcacatctactagcatgaaacctgttaaaactgaagaagcaggagcagatcttcttcccaaagagatgaatattatgacaattagcgacgataaagctgatggccataatgataaggaaggtgagggtgttacacttgatgggactggaacagagacagggcagataattgtgacaacaataggaggtcacaatgggaagccaaagcagaaggtctcatacatggcagaattggttgttggtactggttcgtttggtattgttttccaggcgaaatgcttggaaactgacgagacggtggcgataaaaaaggtgttacaagataagcgctacaagaatagagagctccagactatgcagttacatgaccacccgaatgtagttcagctgaagcatcacttcttttcaacaactcaaaagggagaagtttacctcaaccttgtacttgaatttgtatccgagacagtttatcgtgttgccaaatactacaaccggatgaaccagcgtgtacccataatatatgttaagttgtatgcatatcagatgtgccgtgcgcttgcttacatccatcgagttgtcggtgtgtgtcatcgtgatattaaacctcaaaatctactggtcaatcctcatacacatcaacttaagatttgtgattttgggagcgctaaaaaattggtccctggtgagcctaacatatcgtacatttgctcgcggtattatagggctcctgaactaatatttggagctacggagtataccactgcgatcgatatctggtctgttggctgtgtagtggctgagcttctgattggtcagcctttgtttcctggtgaaagtggtgttgaccaactggtggaaataataaagattttgggtactccaacaagagaggagatcaggtgcatgaatccaaattattccgaattcaagttccctcagataaaagcccatccatggcacaagctttttggtaagcgcatgccacccgaggctgtcgatctcgtgtcaaggctgctccagtactcaccgaacctgcgctgcactgctgtcgacgcctgtgcccatccgttcttcgatgagctgcgggaccccaaggcttgcctgccgaacggacggccaatgccaccgttgttcgacttcacagcagccgaactcgaagggctccccgccgagcttgtccaccggatcgttcctgaacacatgaggaaggaagtgaattaggtggacggacgtactggggcaaaaaaaaaaaaaaaactccctgtttctctgttggttctgagagatgtgtgagggcacggatatggaggagcggtggtgtattgtaattgtaaagagggctgaaagaaaggtccctctggttgggcgtgtcaccaaagagtggccctagaggcaaaccttacgtttgctcgttgcccttggtgtgtacccagatgtgtatcgatgacataggctggctgctgtatcatcatcagggttgacgctgaacaagagaaattcaagcagggtgctgctagctcgcttcctcccgtagctggaaaccccagaatgccagtttccatcactgcacgtcgtcgcgctgtccactggtgtcccgtaagcatatagagctctgccggctccgctattggcttgcgtgtgtctatcgataatgacttctacggacgctacc

SEQ ID NO: 1523 - DNA, 1483 bp, Zea mays
ccgaccgttttcattgctcacactgctgtctccgttccatcccctacgagatctgccccctcgccctcgccctgctccaatccccatctccttgcggcccgatccaccctgctccaatcccccggcgatggtcgtgtgcaaatgccgaaaggcgacgagggtttactgcttcgtccatcaggtccccgtctgtggcgtgtgcatatgcttcccggaacatcagctatgtgtggtgaagaactatgctgaatgggttgttaattctgagtatgactggccacaacactgttcgtcttgcaattctgttctcgaaggtggaactgaagaaacaacacgattgggttgcttgcatgtggtacacaccaaatgcttgatatcacatatccaaagttttcctacccaaacagcaccagatggatacgtctgcccctcctgttctgcacccatatggccaccttctagcattaaagatacaggttcgcgccttcacactgaactgaaagaagcgatagtccagactggaatggagaaaaatgtatttggaaatcattatgtgacaatagctaaagctgatactcagacacctcctgcttttgcatcagatcctctcaaaactttatccaatcgtgatgatagagaatttaatagtgcaaatgcagctaaagatgctgctttgccatcaacattacattctgggatgtactcttctgctgtaggatctgagacaactattcatgttgatccagaaattgttgaaatagagggttctagtcctgtatcgacccaattttcagtgcaggactccaacttcatcaggagtccaagcccacatgggcctggtgctatgacaagaaaaggcgctaatactgttgatagacaaaattctgagatttcttattatgctgatgatgaagatggaaataggaaaaagtatactaaaaggggtacatttcgtcacaaatttctaaggatgctgctgccgttctggtccagtgcactgccaacgctaccagtcacagcaccatcaaaaaaagagagtgatgctctagaggggagtcgatcacgccatcagagatcatcaagaatggatcccactaagatcttacttgcaatggctatcatggcatgtatagcaactatgggaatactctattaccggttgtcacagcgaggtctttctgaaaccttcttagaggacgagactcagtaatcttgccttcctgtattgcgttgttgctgattcaaaggattttaccctctgtattttttttcgtttaccctttgtgggcctttttggtggtttgaaggtggggtagtggttagtagactctttctatattccgattcatgctcatgtttatgtgactactataatggtatatacaatattgtattatctacagctgagatcatagaaaatttaacccatggacagtttaaacctggttagctcatctaatgtagtatttcctagtttctgttt

SEQ ID NO: 1524 - DNA, 3075 bp, Zea mays
ggtgtcatgtagggatctaggagtgagttcagtagttaacctcactagggaagggtgttggttggttaagtttagattgtgggggtaggttggtctagtttgctttctttcttctcctttttctttttctttttctttatatttctttttctgttgtgtttgtaattggtctaatttttagacccttcttcttaatacaatgatacgcagctctcctgcgtgttcgaaaaaaaaaaaagtttacttatttggaactcagtccagtggtagtggaagtgaaagtggcattcagacgcagaagtgtaccaagtcaaaaggtgccaatgaatccggtaacaacagtggtagcaacgacgatgaagctggcatgggacttaatgcaagggatgacagtgataatggcagtggcactcaagcacagaactcatggactaagcttgctgtggagatcgacagtccacaagctatgtctctggaccagttagccgatccagccaatagcacctgtgcacaagtaatccactcaaagtcagagatatgtagccacagatggctaccaggtagcagcaacagaaactgcaagaagcaaaaatacactaatgatgactttaagggaaaagacttggagatagatggtcctggaaatctatatatggatcaccaatcttccccaaatgagagacccatcaaagcagcagatcatgaaaacaattccaaggagtcaatgatgggaaatttaggggatgcaactgttcgagctgctgacctaattggttcaatggccaaaaacatggatgcccaacaggcagcaagagctgcagatacccctaatttctcttctgaagtgccagaagggaaagatgactttaagggaaaggacttggagataggtggccctagaaatttatatatggatcaccaatcttccccaaatgagagacccatcaaagcagcagatcatgaaaacaactccaaggagtcaatgatagaaaatttagaggagccaactgttcgagctgctgacctaattggttcaatggccaaaaacatggatacccaacaggcagcaagagctgcagaagatacccctaatttctcttccaaagtgccagaagggaaaggtaagaatgaccagcatgataattatgttttgccatcacttgagctgagtttgaagaggtcgagatcatgtggagatggtgccaacgatacagtcaatgacgatgaacagcggaatagtgcattaaggcgatcgaatctctcggcttttacaaggtaccatacatctgcggcttccaatcaaggtgggacaggattggtaggtagctgttcgccgcatgataacagctcggaggctgtgaaaacggattctacttacaacatgaagtcaaattcagatgctgccgcaataaaacaaggctccaacggcagtagcaataacaatgacatgggttccactacaaaggatgttgtgacaaaacccagcacaaataacgagagggtgatgttgccctctgctattaaggctaatggatacacgtcaacattccatcctgtgcagcagtggatggttccagataatgcgacagcagggaaagcgaaggctgatgaagtggccaacaatgcaggcagaaatagtcatcctggtgacgtgcagagcaacctgacgcaacaacatcgtccaacccttcattacgtccattttgagaatagtggatcaggtgccctgcaatgtggttcctccaatgtatttgatcccccacttgaaggccaggctaccaataactatggtgtgaaagccgggagcaactcaggcagcaacaaggggcagaataatgggagtacagctggtgcgagcacggctgctgcaaatgctggacggacagatacagagatacgggctatcgataaaagtggacctggaggtggcagtgggagtggcaatgacacatatgtcagacggcttgctgcgagcatgacaccacgacaagaacagctaaagaaatatagagagaaaaagaaagatcggaactttgggaaaaaggtgcggtaccagagcagaaagaggctagccgaccagcggccaagggttcgtggacagttcgtgaagcaagctgtgcaaaatcaagagggagatggagagagatgacccccccccccctctggcttcagctcatggttgttagacgtggcggttgatgattcttccttctctggtgtgatctgatatgatcgacaacacaccatccttccttttcttcattggtttcttcacatctagaatttactgcctgaccgggaaaaaataagctaggaacttctatacatgtgtatgcatttctaatcatgtagaagaataagtgtgtcttgactctagataattttaggtagagtcatgctcgctctcctacattatgtgatgtaactgaagtgttgttgtgttgtcatgtatggtcttggatcactttctgtcaatatattactagcccacaactactattaatttgatgagatgtatataattaaaaatattgtaatagtccttcctttggtaggtagacaacaaacaatcttgaattcagtgcatacataaatcactgtatagatatatacacgttggggtctgctttagatgaaggtcctcaaaacattaactaatcagttattttttgagtctgtttcaagtgtaacagggtaaatgctaaaggacaccttcgttcgaagatgatgcgcggtgatcacggttgccaagacgaagctacaaacttcagaccgcggcgcatgcacgtgatgaggtaggtggcaagagaagggccaaatcccagagacttgtttatcaagattactaaggcaaaagacgacaatacccttaatcatctttgtagctcatgcgtataggcttgagggcatgaatgtaatttttatgaagctatacatcttgattataagcaattgaataggttgcaaaaactgatttctagttaccacatcataaataatggaatgtaaactctatgtacattgtttgccagtacttgttggactaacaaatatagaaagtgaaatgtccaacat

SEQ ID NO: 1525 - DNA, 6652 bp, Zea mays
atggagtccccaacatatacccctgaggttgtacaccctacaacagatgcaattgaacctaatggatccgctcttaccccctgcgactgggttatccctgatatcgccagtaacccgttcctaccagcttcaacacagaccgaggatgccgattcactgcgtatgtctactagaccactaagacgtaaacaacatgtgccacgtggtgaaagacaagctatcttagcccgtcgaaaccggcaatttgaagcatccatttcaaggaacatggctactgtggctgaggatatcattagtgacgccgaggaaggggatgatcggacacaaccccatatgactgcaaagatcaacaacaatgttgatgacgatgacggtgtcgtatttgaagacgatgctgatgagaacgagggatacctattcgctgggcaatatgaggataccgatgaggatatagagatcgatggtagtcaagatgaatcgagtgccattgatgttcctgacccgtacgacaaggtgtatagcaacatccctaaagaaacccatatgctaaagactgttcccaactgcggttattgcaccgcgaagaagtttgagtatgagacacctggtttttgttgtcgtggtgggaaggttgagctagccccactggagacccctccccaactcaagaggttgtgggatagtgcagactctgatgctaggcactttcgtgataacattaggttttttaatggccatttctctttcacttccctatactgttgcctcgatagtatgacaactaatgtaagggattctggtatatacacgttccgagcacagggcatgatgtatcacaatatcaagtcatttggtagggatggtggggcagagcataaacaccttgagctttacttttatgatgatgatcccactctcgagcatcggtaccgtaagtgtcgcgaagagcatcaacagaaagacaaagaggttattcgacagatagtcgacatactacgtggaaatccgtactccgagcaccttaggaccatgggtcacgttgagaaccttgatgactatcgtatcgcgttgaacctagaccagacgttgaaccagaagacatataacacacctctcacttcggaggtggccgctgtctggatcgaagggagcaaagggcgaggccagttcagcaagagtgttatgctccatgggaaggacagttcaagccactgcatccgctcataccatggatgctacgatgcactatcatatccattgttcttccctagaggcgaacttggctggcacggaaatatcccaaaggttggagtatccatggacgaagtggatgcataccgtgcgacacatagggcaagtaatgcaaatgatgaaaatgcggcggaggagattcgccccggggtattcaatcctatacttcatggaaagcgactttttcagcagttcgcggtcgacacgtacataaagattgagaactctcgtttagattacatacgcaagaatcaggatcggttaagggcagacctgtaccagggcttggtggatagcatgctagatggagatattagaggagagaaggttggcaagcgaactgtgctgtcgacgtcgtttattggcggtcctcgtgacatgagacgtcggtatatggatgctatggctctggtgcggaagtttggtaaaccagacatatttcttaccatgacatgtaaccctaactgggatgagataaggagggagcttctccctgggcagacaccgcaagatcgtgcggatcttgtagtgtgtgtctttcatgcgaagctacaagagttaaagcatcggctgactaaacaggatattcttggtaaggtccgagcctacgtctatgtcgtggagtttcagaagcggggtttgccgcatgcccattttctacttataatgcagaggaagtacaagctcacatgtcctgagcagtacgaccttttgatctcagccgagatcccaagcaacaagtaccctgaactacgaaagatggttatcaagcatatgatgcatggcccgtgtgggtcgctaaaccctaactgcccatgcactaagggtcgtaaatcatgcaagaatcattaccctcggcctttcagtgacacaaccttgcaagggaaggattcgtaccctatttatagacgtcgtgacgatgaccgtaaagaaaaggtccgagggtgcgaactggacaatagatgggttgtcccttataacccatacctccttcgtctcttcaactgccacatcaatgtcgaggcatgtgggagcatcaaggctgttaaatacctgttcaaatacatatacaaaggccatgatcgtgcgtctgttgttatgagagatgcgagcaaggcagatgatgatgttgatgagatcaagcagtatagagatgcaaggtgggtgactcctccggaagccttgtggaggatatacggctttgagcttagtcagatatctccacctgttatgcagcttcaactccatcttccaaacatgcacatggtggcgtttcacgagcggcaaatggtcgagcgagtcgtcaaccgtccaggtgttgataggtcgatgctcacatcatattttgaggcgaataggtttaataaggaggctcgtggcatcctatatcgtgacttccctgagtggtacacttggcagagtggtaagggaaaagtatggcaacggaggaaacgagatacaggtggacaagtcggtaggatagtctctgctcatccggctgagggggagcgctactatcttcgtgttctcctaaaccacgtgactggcgccgcctcctatgtggatctaaggacagttgatggtgtcaccctaccgacttttcatgaggcagcagagagaaggggactacttgagtcggacaacacactagatgagtgtctcactgaacgtgcgcttttccagatgccatcgtcgctgcgacggctttttgccacaatactggtttactgtgagccaagcgatgtggctgtactctggcagaaacacaaagattctatgtcagaggactatcaacacaagagtcagaacaaaactcatgttgagcagatggtattgattgacattaggaacatgctgcagtcaatgggaaaggacataaagacattccctctacctcctatgatcgacgcgtatgacgatgctattggtactgctcgagaggtttacgaggaggaaagtatccaaccgacagtggaagatgtggctcttaaagactctcttaacgaggaacagagggccgcctatgataagattatgtctgccgttgacaccgatcagggcggattattctttgtggatggacctggtggcaccgggaagacttatctatacagagtactgctcgcgacgctacgcaaccagggcaagattgcagtggcaacagctacatctggcgttgcggcttccataatgcctggaggaagaaccgcccattcacgcttcaagataccactcactattgacgatggcgctgtatgtagcttcacgaagcagagtggaacaacagagttgctacggaaagcatctctcattatctgggatgaggcttctatgactaagagacaagccgtggaggcactggacaatagcatgcgcgatataatgggtcgccccgcactaccatttggtggtaaaaccattgtcttcggtggagatttcagacaggtcttgcctgttgttcgtaaagggtcaagggctcaagtggtcgcgtcttcgctacgaatgtcttacctatgggagtccatgtcccacttaaagcttgttagcaacatgagagcaaaaaacgacccttggtttgcggagtttttgctgcgcgtaggcggtggaactgaggaaacaaatagtgacggcgacattcgtcttcctgatgatgtgtgtgtgccttacagtgggagtgacaacgatcttgacaacctaatagactttgctttcccaaatctcaacgaaaatatgtctgattctacctacatcacttcaagggcgatactgtcaacacggaacgactgggttgatatgataaatgttaagatgattgatcgttttcaaggggagcatatggtgtatcatagtttcgatagcgccgtggatgatccccacaactactacccacccgagttcctaaacacattgacgcctaatgggctaccacctcatgttttgaagctcaagattggatgtcctgttatattgctacggaatatagaccctgcaaatggactttgcaatggcaccaggctggtcgttcgtggcttccaaagaaatagcattgacgcagagattgtactgggtcaacacgttggaaaacggattttcctaccgcgtataccgttgtgtccctccgatgaagagatgttccctttccagttcaaaagaaagcagtttcctgtacggcttagctttgcaatgacggttaacaaagcacagggtcagactattcccaatgttggtgtatacttgcctgaaccagtgttctctcatggccaactatatgttgctctatctagagcgacggcccgatcgaacataaagattcttgtcatcccagctgtcgatgggaggaaaaagttaaggaagggtgtaaagaaaacccccaccgtagattgtgggacatataccaagaacatcgtctacaaagaggaaatcccttgtgaaccaagggtagaagtcgttcttattgatgatgcctttgttgaaaggaagtggatggagtgtttatttcagccgagcgcatatttaggtgacgaggttatagactgttacataaatttgataaaagctcaaaagcatctaaagtgccgatctggaggtcgcgtttacatagaaaatgctttccagttcaatttcctgaagcgagatggtgatcttgaaattaaaacagaggagctatatccaattaaagacatgacacacatatgtagcgctgaacgaagggtgttactttacctagaccatgacatggtgtttattccgataaacatccgagagacgcattggtatcttgctgtgatccatgcaagaaatatggagatacaagtgctcgattcacttggtacttcacaagaccgcaaagacctcactgactctattaaaggactgcaaagacaaatagatatgatatctcaacgtaaggagttaaaagaccacaggtggccagacctccaagttgcttcttggccgctcagagaaatagacatgggatatgcaaagcagacagatagctcttcatgtggcctctttcttttgaactatatcgaatactggacaggggatgaactgtctgacagttttacccaggatggcatgtcacactttaggaaaaaaatggctgctatattactatcttcagacctgaataagagaagggggtgtctgttatacaaaaatgaaaaagaagttgactctggaagcccatctgatgttgagatattagaaaacccaacagattctaataagaggaaactactccacgtgcttgatgatagcgaagtagtgtttgaagatgaggaaggccctattactcaagcagacttgcaaaggtggtttgttgatgattgggataaaagagctcctgtaaaagtctctaacgatggttgcaccaatgactttttaatggttggtctttccacaaaggacatgccagtgaccaaagccgattcaatagatgttttatgtgattatatcatggcaatagaagacgatacgacactagagagaacatgggtgcgaagtttcaatccttttaagatagaaatatctgtcaaagacctgcaaaacatattaacgacaactcaagatatgattctaagatgttttgatatggctgttcggctgcttgccaataaagagtcacgtaaaccgaaagaagaaatcataaataatagaaagcattatatggacatgcgtttttggagaatggttggttttggtaaaataccaaagtaccatcaggatcctacaacagaagagttggccaaaacactagattgttggccatcaatgaattattatatcacgggttgtagatatgttctcatgccatggaaattcaatggatgtcacgcccttttcgtaatagatcatgttaaaaagcatgtgacttttatcgattttacaccgactcaagattggtgtaaacacatgccatacaagaggttcgcggaagcgattatcatggcctcaaaaaaatataagattgcttacagcaagaaacgttctggatggacggaggatatctttaagtgggaacatacaattcagactggtgttccaattgacttaagagggtttaataccagctacctcgttctacaagctatggccatgtgggggaatgacagacgactgaaatttgttggggatgcaaaaactcttcgaagaaactttgtgattgatcttttaagttatgaggacaattcgtgccgatatgccatccctgcaaacatacaacaaagacttgtcgatatcgctagaaaggattagctgattagtgaacagttgtcgacacatttgtctgtaactaatttgtgtgatattgataatgttttccaatatatcagtgcaaactatgatattgaatgaaatagtttttatatgaatctcttttgaagccattgagattccc

SEQ ID NO: 1526 - DNA, 2848 bp, Zea mays
gctttgcttccgtacaaaaaaaagttagaatcactctctcgagagacagagagagtataaactaacgcctaccataaatacaaaataaagaaagacaaaaaaagaaaatccctattcctcctcagcataccccttcttccttcgtccccattgatccccttcccccctccactcgtctcccaaatcgccagcgagcgccatgccgccgcctcccctgccctcgccgcccctgaccggctgacccgacctccccactgtctttcccttccacctgggcgccacagcgtttcccttcccgtcaccacgaaatcccggagggacgaggagggagttcgtcgcctgatcgatcggccgatccacgccgccggcctcccaatccttcgctgccgccatgttcaacaagataatcaagaggggaaaccgcaagggcgcgcgcggggacagtgcggaggtcgccgcgcgccccgcagcgccctcgtcatcctccgggagcggcggcggcggcgcggggggagccgcgcccgtcaccgtcaaccacgcctcccgggccacagcgccttctccgtcgtcgcccacttctccgcacgtcacgccgtccgcgtttgcgaccaacccggcggtgggggcggcgtcaccgccactcctcgagcctctcccgctcctccgcgacgtcgccgccgcagaccgtccgggcctcatcctccgcaagctccgcctcgtcgcggcgctcttcgacctctcggactcgctcaagcacccgcgagagaaggaggccaaacgccaggcgctcctcgagctcgtagattacgtgcaggctccagctcaggccgcgggcgccaacgcgcccacgcgcctcccggaccacgtccaggaggcgctagtccttgccatctctgccaacatcttccgcccgctgccacccgcgctgcacgagtccgccgccgcgatcgaccccggcgccgcgcccgacgacgacgaggagccatacctggacccctcctggccacacctccagctcgtctatgagctccttctccgatacgttgtttcgcctgacacggacaccaaggtcgccaagcggtatgtggaccatgctttcgtcctccgcatcctcgacctctttgactccgaggatccgcgtgagcgggaatacctcaagaccgtgctccaccgcatctatggcaagttcatggtacaccgaccattcatccgtaaggccatcaacaatgtgttctaccggttcatctttgagactcagcgctacaatggcataggggagctccttgagatccttggaagcatcattaatggatttgccttgccaatgaaggaggagcacaagctattccttgcccgtgctctcatccccctgcacaagcccaaatctgttgtgatctaccatcagcagctatcctattgtattgttgagttcgttgagaaggactacaaattagcagatactgtgattaggggtctgctcaagtactggccagtcacaaattgccagaaggaggtgttgtttctgggggagcttgaagaagtgctcgaggcaacacagcctgcagagttccaacggtgcatggtgccactgtttaagcagattgcccgatgccttaacagttctcacttccaggttgctgaacgcgctttgttcttgtggaacaatgatcacattgtaagcttgatagcgcaaaatcgtggtgttatatttccaattatatttgaagcgctcgagaggaatatacatagccactggaatcaagcagttcatggtctcactgcaaatgtgcgcaagatgtttctggacatggacagtgaactatttgaagagtgccagcagcagtatatggataaacaagcaaaagccaaagagatgcaggagcaacgagaatcagcatggagacaattggaagctgttgttgctgccaaggctgctggggatgacatggttttggtcaactaggtaatataaccaacctttccacttcatttatttgttagtgcttgttgtttttagtcttgtaacctaaaactgtactacttttgttctcggctttgttctagcatatctgtgagatgcattgccactttttgtactgctcaccttttgttttgagtcatggcagttcacaaaaagatgggatatatctgtaccaaagtttcaatttattatggacaattgatttttagtaatgtcagtcaaaccaagcatccataagtacgcaaacatcgtttgaaaggatgtttatgctttctcagatgattgctgctcacttatttcttgagcgcggtgctagttgcggtcctcttatatcaactttgttgacttgggactatcagatccatgttccttgcatcagtgaaaaacatgtgggccgagtttgaacacattggtggccgcgacagccaatccacgcagaatttctgtgtctagtgaggtcctgctatggttctgagccgttcctttattcagcccctcctcttctgttgcgttaatttatgaacaattggactcttgtattaatccttcattgtttgccctagtttcgtacccacaattgggaaaattcaagtagtgaaaatgactcagctagattgtaaggtttcttttatttgtatttacttcttttctccttgggagttatttcagttcatgttgttgtatggaggtaacagtacaaatggcagataaaagcctttttaacctagtgtccggcatggtagcaatacaatgtcagatcttctgtaggaactgtttcgacgttgctgtgattgtttagcaatataacggctcactctgtggtacgctggattaagttctggttacatgttaattcgtgggtaaatg

SEQ ID NO: 1527 - DNA, 1836 bp, Zea mays
ctagccgcgacgcggacccatcgtgcgccttcgcttcagccgtgagcccgcaaccgacccgccgcaaaagaccaaaaccctagccgtcacagcgccgcccccgaaccataaacctccacctcgccggcggccatggcgttctccggcaggatccaggagctcgtgaggaagtatggcaaggtggccatttgcgtccacctatccgtctcctgcgcctccatcgccggcctttacgtcgccatcaacaacaacgtcgacgtcgaagccgttttccggaggttcggtatctcccccggcgttaccgtaggcggcgaggcctcacccgcccccgtttcccgcgatgaacacctgcgcgacgtccccctgccgcccatggccaacgaggtactgcaagaagagacggagcgagagcggcagccccgcaacaggacgatggagctcgtggcgtcaagtggcggcgcgttcgcgctcgctgtcgtctgcaacaaggcactattccccgtgagggtccccatcaccatcgcgctcacgccgcccgtcgccagggccctaagccgctggaggctcgtcaagagctgatctgtgtttttttcgtcacaactgctctgggatatagggtgcatccacatccaggaaatccagagagaaaattcgccgcggtttgttttttgtggtcatggatgaaagctgaaatccctggagcgaagtctcatgttgaactcccctttgttcatcagtgaggtgtgaatccctggcagaacgccctgctgattttgtaacatgaacacaatggcttggggacaaaataagaactgcgatcgaatgattgatacaagaagctacgtctacactcgctttatgtgactttgcctgtttctctgatcgagtgtgtgaaatctatgtactgttctcacttctgagtgaatttataaatgatcaaagagctgaatataatctttcttcttgagacattcgattatgcacacgctttcgatacggtatgaatcaagattcgtgcgttgagaaagggttctcctgaccgtccgatcggtccttggcatatgatggcgtgcctcttgtcgtcatcgcccattcgcccacacgagcctacccaaagagcccagagcccgggaggttacttcgctgcctgaggagtccccggcaccggaggtcttgctaccggctggcggcttcttcttccgttcctccccaagtcctcttcccggaggaatcatgatcgtctgcgtcgccgttgtcggccaccagaacaatccgctgtacctgcagagcttcacggaggcggacgacgccctcaagctccaccacatcgtccactgctctctcgacgtcatcgacgagcgagtgagcaatcctaagaggagtgcacctacattgaatgagacatttttgggtcttctatacccaactgagaactacaaagtgtatggctatttgacaaacacaaaggtcaaatttatcatggtcacgactgatcttgatgtcaaagatgcagatgccagaaattttttcaggaagttccatgctgcatatgtagatgccgtctcgaacccgttccatgtcccagggaagaagattgcttcaagaagctttggtgcaagagtaagcaccatcgttaaatccttcggttcagggaccagttgatcgaatgctacttttgtcagactttctgtaatcaaacatatgtgttctctccctgtttgacaaaattactccctaccgtgtacttgtctggtgaacgagatgctattggtactgattgctgaacaaagaaaaatagtggtttattcattcaaaatcctcctcaattccatccaa

SEQ ID NO: 1528 - DNA, 1547 bp, Zea mays
gactctctctttcagtctttctctctctctctcctgtcgttaattattaaactttaaacgataaaaaccccagatatcagcctgacccaaaaacgttttctttttcaccaatgtctgtaaaattctatttatagaggcagcaaaacctcgcccactctacaaacacgtgacacctccgcccaccctcgccccctccctaccggcaccgcccagatggcctgctcccacatcgccgccgcgggggtctcctcccccgccgcagcggcggctcgttccccggcgcattctcccgcttccgccttcgcgcgcctccggtcgacgcctcgtttcgcgagcgctggcttgtcggttaagggaaacggagcggcgttcccgttggtcgccgccgcggggccggccgcggcggcaccggtggccgacctggacggccgcccggccacggagaagcagcccatcatcgtcatcgacaactacgacagcttcacatacaacctctgccagtatatgggggagcttggattgaacttcgaagtataccgcaatgatgaactgaccatagaagatgtgagaaggaagaacccaaggggaatacttatttctccaggacctggtgaaccacaagattcgggaatatcattgcagactgttcttgaattaggcccaaccatcccaatttttggagtttgcatgggtctgcaatgcattggagaggcatttggaggaaagattatccgtgctccttctggagtgatgcatgggaaaagctctccagtttattacgatgaggaattaggaaaggcattgttcaatggcttgccaaacccttttactgccgcgaggtaccacagcttggtcattgagcaagaaaccttcccacatgatgctttggaggctactgcatggactgaagatggacttatcatggctgctcgccacaagaagtacaaacacatccagggtgtccaattccacccggagagcatcatcacccctgaaggcaagaaaatcatcctcaactttgtcagattcattgaggaactggagaagcagcgttcgtaggggaggtagacgcgacaggtggtttcatttcatagatcagacggaagcagagacaaggcgcttaaagctgcgccaggttccggggctggcagttgaagcatagctaggaaacagctttccctctcttaattcgttgtgttcgtggtgacataatctgtgtgcggaccgaatttagaataaagtacaggcgtccgtctgatcaaataagcaccggtgttggtgctctatagatgaatatatccggtgattttcggcatgggaggcattggcacatttttgtctgagttctggcggtagcaagaccggagtaataaccatcaggcgtttctatgttggttacgtgccgcacgcaggccgggcgtgcggaggatttatgccctgagaggctgagactatctccctcgtcccttattttaaacagtatcattatacaattccgcgttacctgctggagagttgcatgtttggtttatgtccaactatgccac

SEQ ID NO: 1529 - DNA, 1191 bp, Zea mays
cccagcaaaaaacaaactaaactacaggaaaagcccaagcgattggttgctgttgcttcctgctttcgcttcgccttcacccgttcgccgtgcggccgagctctctagttccgccgctcgctagtcgccttcctcccaaatggcgaccgccatgcggggcagcagcctcctgcggttcggtttccgccatccttcctgcctcctgttccagtcccctcggtgtcctgccccgagcctgggtctgaacctggccgttggccgcaccgggcttatacgcctccgatgctcggcggccggggccggcgacgccggtggaaagaaggtgtcggctcggctggctctgacgcagcaggtgctgcggaacgccgaggagcgcgccgcgtcggcgggttcggaccctgcccccaagatcaccctggatcatgttactgttaattttgcaagaagtggtggtcctggtggtcagaatgttaacaaagttaacacaaaggttgacatgcgattcaatgttaaggaagctcactggcttggggagagaatcaaggaacggatattacaagcggagaagaataggataaataaagatggagagcttgttatatcttctacaaaaactagaacacagaagggcaatattgaagatgcattgcagaaaatacaggcaatcattgatgctgcatcatatgttcctccacccccaacagaagaccaaaagaaaaagattgaaaaaattgctgcagttgctgaaaggaagagacttcagaataagaaggtgctttcacagaagaaggaatttagacggaacagaactagctgggattgatgcaagcttgttctcggggtagcaaaagcattcggctgatccttacagcagtggtgtacagagaccgacgaaaaacaagggtcagacttgctgaaggcatcttggtgaagaagatatagctaagtttcgtaggcatctccagtttttgtttcgtctattagtagggatggattcggatcggatactcatggaaacagatccgaacgtcactatttaccatattttaatccgaatacgaatactatcggatacgaatacaaaacggatagttcgaattcggatttacattcgaatacttacttgatttggaacatagcatcataacaagtattaatttgttttatcgatggatttatagttgataaaaa

SEQ ID NO: 1530 - DNA, 2033 bp, Zea mays
gcagcgtgatccgctggcgctcgcggtgaggcgtcgaaggtcaacccctatcttccacctcggggggactgcctacccggtggatcgacgcagcagctttattggttccccggagacctgcaagttgcaagacgagctagacctagcaaccgctccctgccgaccttcggcgtcttggagtaaacatttcggcgtccaggcaataccgaagatctcccatccgctctgtcgatttgcaatggagcccggcagcccagccccgaagaaatcacggctggtgcactcagcggactgcgaaatggaggaggcgcaggcgccttccagttccaatgcagcggggggcgtgaaccagagcttgcactggacccagtggcagatcctggactccatcctcccgaccggcggcttcgcgcactcgtacggcctcgaggccgccatgcagtcccgcgtggtgaacgaccaggaggacctgaggtcgttcgtcgtccaggtcctcgacagcgccggcagcctgctgctgccgttcgtgcactgcgcatgcgcaggcaagtcccccggcgacgcagcggcgtgggccaagctggaccggttgctggacgccacgttgacgaacgaggtcgccaggaaggcgtccgcggctcagggctcggctctgctgcgggtggccgcgtccgtcttcgccgaggttccggcgctgcaggagctccggcggacgttgctgggctccaagagcgtgtcgttccaccacgcgcctgtgtttgggctggtgtgcggcttggttggattcgacggcgagacggcgcagcgggcgtacatgttcgtgacgatgagggacgtgctctctgccgcgacgaggctcaatctgatcggcccgctggctgcttcggtgctgcagcaccagcttgcgccggatgccgagaggatggtgcggaaatggagggaccgtgatgtctctgaggcgtcacagactgccccgctgctcgatgccgtgcagggctgccacgcttacatgttctccaggctgttttgttcgtgacaacaagccatacacgatacatatccctggacaaaactagcagccttccatggccatggctgatggctccaagtgatttctgttactgagatcaatgcgcaatctgttgtattcttgccgcaggatcacatcgacaggagccaacgacagctgtcttctcataaaaaaaaagcaccaggtgagtacaagaatcccaggaacagattcattatgcctcatactgaccctcgtcgttattttcatgcaaacttgtacaacagagatgcaatagtgcatcattagtatcagggttgtaccctctctaccatctattacaccatcatagcatcgtcccatatattcaacggttacagaacacaaacatttgcatgtcaagtgtcacaaagaacacgcttcattatttctgttccatgatacaaagtgccacagcagttgctcgtctccaagcactgtcctaggatccctgagctgcagctgctgcagcagcttgcttggcttcaagggacttctcataatcctcgatggacttgaacagctgcgagaagtttcccttgccgaacccgccgcagccacccttttggtattcttgccccttctcatccttctccatgcacccgatcctttggatgatttccaagaacagcgttggcctgaatgacgcagctggtccagttagattttggattgcataggggtcaaggaaaccatggcattgacactagaatgctgagctatgatcttcagaattaaagtgcaggggattaatgatgagaatggaatgttgaccatcatgtaatcagctgggacatgggagctcgaattatgattcacagcatgcaaaaaggatcctcttttttgctgtcacggtcttcataaagatgcatcatgcatggaggcacaaaaagagggtttgataccttcgtactgtatatatattctatatatgcctgcaatcctgaactagctgaataccttatcctggaattgttcctttgca

SEQ ID NO: 1531 - DNA, 1787 bp, Zea mays
agtccccagaagaaaagaactacgccgcgctctcttcactctcctccagtgagtctccacccacccaccgagcctatatatccctctgcatcctcccttccctcccagcctatcctacaacacctcccgcaacagaagcatacgccgtgcccagctatctatagctagcactagcagtggtgcacactgaaatggacagcgccagcagcctcgtggacgacaccagtagcggtggcggcggcggcgcgtccacggacaagctaagggctctggccgtcttcgccgccgcctcggggacgccgctggagcgcatgggcagcggcgccagcgcggtcgtggacgcggccgagccgggcgccgaggcggactccggttccggtgccgccgcggtgagcgtcggcgggaagctgccgtcgtcaaggtacaagggcgtggtgccgcagcccaacgggcggtggggcgcgcagatctacgagcgccaccagcgcgtgtggctcggcaccttcgcgggcgaggccgacgcggcgcgcgcctacgacgtcgcggcgcagcggttccgcggccgcgacgcggtcaccaacttccgcccgctcgcggacgccgacccggacgccgccgccgagctccggttcctggcgtcccgctccaaggccgaggtcgtcgacatgctccgcaagcacacctacttcgacgagctcgcgcagaacaagcgcgccttcgccgccgcgtccgcgtccgcggccaccgcctcgtcgctggccaacaacccttcttcctacgcgtcgctctcccccgcgaccgcgacggccgccgcgcgggagcacctcttcgacaagacggtcacccccagcgacgtgggcaagctgaaccggctggtgatcccgaagcagcacgccgagaagcacttcccgctgcagctcccatccgccggcggcgagagcaagggcgtgctcctcaacctggaggacgccgcgggcaaggtgtggcggttccgctactcgtactggaacagcagccagagctacgtgctcaccaagggctggagccgcttcgtcaaggagaagggcctccaagccggcgacgtcgtcggcttctaccgctccgctgccggcgccgacaccaagctcttcatcgactgcaagctgcggcccaacagcgtcgtcgtcgcctcgacggcaggcccgtcgcctccggcgccggtggcgaaggccgtgcgtctcttcggcgtcgacctgctgacggcaccggccaccgccgcggcgccggcggaggccgtggccgggtgcaagagagccagggacttgggttcgcccccgcaggcggcgttcaagaagcagctcgtggagctggcactagtgtagattaatgctacggagcgatcgatctttccctggctagctagtcttttttttttttgctcgatcgctcaactcagatggtagcatcaccgagctgaatttagttccctctcggcatctcacttagttggttcgtttgttaatttccagtttcaccatcctttttgctttgctttgatgtaaatcttctcatcaactgtatactgctaatgaaaaaaaaacagtccaagaaggctagatgatggtcaactggcacagaaggaacagaaacattctaaattaacatcatggttaataactgtcaattgctcgtgcatcagatcgaaagatattacgacatttcgaatttccagattccagatgctccctgccatccatgatccatctacatctacaggtggcaggggagctgtatgtaggagtcttcag

SEQ ID NO: 1532 - DNA, 1190 bp, Zea mays
ctaatcaacgccgcatcccgcccgaggccttccttcaatggcgcgtggaaggtcgtctgttattaattggtgcgaccacggacgacaccatggctccgcccgacgcccctctccccgcaactcgcaagcccgatattgtcggcgttctcgcacccaccgatttggcctgcctcccccaggattgccggcgttctcccccctccccgtcgcgccgcgcgatgccagccgtgattcccgcgtccgcccgccccacatctacaaacttgctctgcagatgtcctcccgcccatcgtcatccatcccctgccgccgccacggacgaccttcctcggccgccacaagggggcttctgtaagcgagcgtgcagggggagctataggcgagcgcgcagggggacccgcacacgacgacgcccgcgaggatgctggaggacgtcatcgccgtcgcgctcaacattagggcctccgacgcgctctttttggcctagaaacggaggaggcgatgcggcgccgtctcgcccgtcagccggtggccgcaccaatgagttccacgccgccacgctgcaccttcctcgtcgtcggtgtcctcctcgaacctgtgcactggtgccacaacactggatgggtataggaagcatatagagaaagatcctgccttggaaagaaggtttcaaccagttaaggttccagagcctactgtggatgaaacaatacagatcttaagaggacttcatgagagatatgaacttcatcacaaactgagatacacagatgatgctttaattgctgctgcacaactgtcttatcagtatatcagcgatcgttttctgcctgacaaagccattgacttgattgatgaagctggatctcgtgttaggctgaggcatgcgcagtgttacagctccctgatgaagccaaagagctggacaaagagctgcggcagataagcaagcagaaaaataaggctgtacgtggccaagattttgagaaggtatactattgtttggcacaccgccgatccgctcccacctctctagctacgtcgatctggttaataccaagcattatgttgtttccttttgagataaatattttgttactgattttaccttttgtctcctcttcttgttttttgctctagaatctgtagcaaatggctaacgatgaggacatccatcacttgtttatgac

SEQ ID NO: 1533 - DNA, 3401 bp, Zea mays
cgccccactaggaggacgaagcgaagcggttacgttccgttgcacggtggggcccgacacacgagctcgtcacagtcacaccctccagtggctcgggctctttttttttcttccctttttcttttccgcgcagctgatttattttctctcgctctcgccttcgcggcgctgcctgcgcagtactacgagctagcaggctagcagcaccaggaccaggagcctcttcccacacttccgctctccctctctctctttcctctcgagaatggttgtgtaggcgggcgcaggagggaggagagagaggggagctagctagggttttgcgtcgccgccttctgttacccttaggtgagcgacgctcccgtagatccgggcgcgcatccttcggtcgccgccgtcgtctagatctgtgccgtttggggccgtaggggggcgctgtttcgcgctcctccgtgacggtttggggtgcattgcagcgtggattcggttttcttcgtgcggcatttgtcggcgttcgccgcgcgctctttcaagcgtcgttttttattcgttctgtggttctaatttagcccttcgcaaggttgcttcccatgggggcgtagtaagaatccaggctttggccgcttccggcgtttcttgtcttgtggatgaatttgtggtcgtggagtagatctgtgaactgatgttcggttctgctgcaggctctgaacccctccggtccggtgcggcggcggattaggctccgatggggaagtctccggcgaagtggatcaagtccgtgctcttcgggaaaaggtcgtcgtcgaggtccggctccaccaaggccaaggatttatcgaagggtacgactaacaaagcagcagctgctgctgctgctgctgccgggaaggagcccgcgttctctgagagctctccggtcatctcggagcctgtgcttgttagcgcccacaacaatgagaccgcgcgggaggccgctaagggtgagaattccagcgtgcaagaagtgccagtgactgatgtcagtcaagacttggagaagcagggcactgttgggtctgatacgtctaatgatgctgagaggttgagggaagagcaagcggccgtgaaggcacaagctgccttccgtggttatctggcacgccgagcattccgtgccctgaaagggatcataagactacaggcactgattcggggacatcttgtaaggaggcaagctgtttcaactctccgtgccacatggttgattgtgaagtttcaagcccttgtccgtggaaggaacgttagactttctaatgtttccattcaagcaactacggaactttcccaacagaacttcgggggttctaaacctggttcctggaaggagaagttgtcttcaaatgcatttgctcggaagcttctctcttcaccaattgtggttgaggctcttcacgtccagtatgatgagatggaccctaattcggccttcaattggttagagaggtggacagtaagtcatgtctggaagcctatttcccaaccaaagagagttggcactgatgctaagcctcatacaaggaaggccagttatgcaatggaaacagagtcagcgaaattaaagcgtaatgcacggaagagccctgcagtgccatttgagccttctcaaacaaacaccaccattgaaaatgagaagacaagacggaatccaaggaaattaagtagcactcctgctgagtcagttcccgatggccagttaacagaacttgagaaggttaaacgtagccttaggaaggttactagttccacggttgaaacctcaaaggtgcctagcccaacaactgagattcctgaccgtcaagaggtacaatgtgagagaccactaagaagtgcaaagcaagctccaattcatgttgagaatcaagaacctcagaatgttaatctatcggagaatgcaaagatggatattctggtaccagatatccagcctgacgtggaagttgcttcagatctagtcacaatcacaaatgaagaaaaagttgatgagacaccgtctgttgttgctccagcggctgaaattatgccactgcaagacatcaacagcgaagaaaatgctttggtgaatgatgtggaagagagatccaaagaagaacattcatctactgataacctgaaaggcagcaagaggaggtcttcattctcagctaaacctgaatatccagaaaatggctccaaaaattctccagccctgccaagctacatggctgctacacaatctgcaaaggcgaaactgcgggggaatagttcaccaagacttagctctgattcagcagagaaaaacgggttcactcgtcgtcactcccttccgtcccctaacaatggtaagataatttcacattctccacgtacgcaaaggccaacccatgctggtggcaaggacggagcaaaaggcgacaaggctatgctgtcatcaagagatgcgagcgagagaccactgaaagctgagtggagacgctgaggtggcgaatcaaaaccccaaaccctccatttggttagtgcaactatttgggtcggtggatggcgtctgcagtttgctcaacttatttacagggttttgggtcatgccttttgtgatgtatagctgaagtattttcccggtttgttttgtttcccagacccccagacttacccccccccccccccccccccccccccccctcctgcttactgagagggctgctgatgttagagagaacgagaacatgtatggattgagttgaacagaacaatcttagtcccgtttggtcaaatctgggctgcgttttgactgatggttgtgtgtcatttatggttattgcccttgaggtcgtagtattcttttccaaaggttcttgtcttcctgatctggttgtcatgcaacgcaaggcggcttgcgaaaaggaaccatgttgtaccatgcgatcaaagtagaagtaactctacgatgcttcagattgcttcaatgcacggtaactctacgatcaaaaagtagaagtaactctaggaagacatggccagatgttgttccaagtgacatgaggtcaagcacaggtcaatggccacagatgatgccatactattacatatgcatagttcttaagacgacgcctgttcccattttgtgctctcggcgaattgacgaattcaggctgagttctagatggctttgggaatagcaattggatctccattgtctatctgcagtgcttgtcagtcttggagcctaccagctcaatgaatgacaattatggtaggtgagcttggtcatcccatggatgcagattaaaggtggttggatgatcaatgaaccagggctacttttttactattattattgtgactgtcctgtagcttaggaccagatgaggtcgacctcggaagtgctt

SEQ ID NO: 1534 - DNA, 2001 bp, Zea mays
cttccttccttctcaccgacgaatcctccatcccgcgcagcatctcctccctccctccctccgctccgtccgcgtcgccaaaccctagtagtacgttgtacaggacaatggggccacagccaccgcttcaccttcccgccgccaacggcgacagcatcgtcgaccgcgacgtttggctcgcctgcgccgtcccgctctcccgcctccccgccgtcggtgccgaggtctactacttcccgcacggccacgccgagcagtgccccgcgcatctcccggcgccgctcccggcgccgcacctcttcccttgcaccgtcgccggcgtcagccttggcgcggacgacgagaccaacgaggtgttcgccaaaatctccctcagcccaggcccccaccgcgggcccgccgccgcttgtcgtaccgaccccaccagcgactgcccgccgcaggagctcagttacttcaccaaggagctcacgcagagcgacgccaacaacggcggcggattctccgtcccgcgctactgcgccgaccacatcttccccacgctcgacttcgacgccaacccgcccgtgcagaagcttttcatgcgcgacaccaggggcaacccgtggcagttccgccacatctaccgcggcacgccacgccgccacctgcttaccaccggctggagcaggttcgtcaacgccaagctgctcgtcgcgggggacatcgtcgtcttcatgcgccgccacaacggcgacctcatcgtcggcctgcgccgcacgcccaggtacccgctcgtcttccccagggtcgggtccggagccggggtcgacccggaccagcccccgccccgcaacgcgcgcgcgcgggtaccgccccaggacgtcattgaggccgcacgcctcgccgcggagggcaggtccttcgcggtcacctacttcccgagacaggccgccggggagttcatcgtcccgcgcgacgaggtggagggcgtgctcgccacccgctgggagccaggcgcgcaggtgcgtatgcaggtcatggaggccgaggacacgcggcgcaccgtgtgggccgacggccacgtcaagtcgctccaccaaaacatctggcgagcgctcgagatcgactgggatgattcctctccattatcaccaaatctgagcagatttgtgaatgcttggcaagtcgagcttgttacacaccctcctcttccaaatggagcgaggatctgcaacccaattgcgtctctttgccatggagatgtctcttatccactgatcggatcggaaatccaggggccaccaattcctgctagcatgcagggagccaggcacaccggcccttgtgctgcgccctctgaatcttctgcagtgctcacgaatcgggtactgttccccctgctcaacccggacctccagatgccaccgtttacaagccccagtgattcctctgagattctggatcctgaatctgcttctcctcccaacaaatcagtaaggttgcctccagcagagcttccagtccaagtgaagagcatacagctctttggcgccacaatcatggtccatgttgtgcgaagtgttgcctgtggtggttgttgtgaagaactgaatggagctcctagtggtgatgctacggctgatggcagtgtcggaaaagatgtctaaaccatgcacctgtacttgaagatgccttttaagtctgggagtgtgggtttctactaccaaagtacaagtgttggtgcatgcagagtttatctgtagctacatttagtaggctgtggggggagtattaccgttgcaagttgcaacccatggctgtagtttagttaacagaacacttcatattgttggttggttgattcaattctgggagtttggtcgtatcactttcttctgctctgctgttgcaattgcattgcgcgcaactatatgtgggtttaatttggtaatgatatgggtcaatgacccttcccccgctaattaattgtttgttgggtgtggatcagctcatgtggaa

SEQ ID NO: 1535 - DNA, 1994 bp, Zea mays
acggccctctctctcccgcgcgccgggcttatttgtaccggccccgcccttgcgttacccaacaagcactcaacgtctcctccagtccttcgaaaaccctgaaaccttggtgaagccgagacgagcaatcatccaagcagctagtgcttagcatctatggcgacctccgttcgtggtttcagtagcgccctcagggatgtgccgggcagctacggccttccgctggtgggcgccgtccgcgaccgcctcgacttctactacttccagggccaggacaagtacttcgagtcccgcgtcgagcgctacggctccaccgtggtgcgcatgaacgtcccgccgggccccttcatggcgcgcgacccgcgggtggtggcggtcctggacgccaagagcttccccgtcctcttcgacatggacaaggtggagaagagggacctgttcacgggcacctacatgccctccacctccctcaccggcggccaccgcgtctgcgcctacctcgacccctccgagcccacccacgccaaggtgaagcagctgctcttctccctcctgctctcccgcaaggacgacgtcatccccgtcttccgctccaacttctcctcgctgctcgccaccgtcgagtcggacctcgccgagggcggcaaggccgagttcaacaagctcaacgacgtcacctccttcgacttcatcggcgaggcctacttcggcgtgcgcccctcggcgacggacctcggcaagggcgggcccaccaaggcggccaagtggctcatctggcagctccacccgctcctcacgctcggcctccccatggtcctcgaggagccgctgctccacacgttccacctcccgcccttcttcgtcaagggcgactacggggcgctgtacaagtacttctccacggtggcgaagcaggcgctggacaccgccgagggcctgggcctgtcgcgcgaggaggcctgccacaacctcctcttcgccaccaccttcaacagctacggcggcctcaaggtgctgttcccgggcatcctggccaacgtcgccagcgccggcgagaagctccacgagcggctggtggctgagattcgaggcgccgtggccgaggccggcggcaaggtcaccctcgcggcggtggagaagatggagctggccaagtcggtcgtgtgggagtcgctgcgcctggacccgcccgtcaagttccagtacggccacgccaagaaagacctgcaggtccagagccacgacgccgtgttccaggtgaagaagggcgagatgctgttcggctaccagccgtgcgccaccaaggacccccgcgtgttcggcgccacggccaaggagttcgtgcccggccggttcctcggcgaggagggcagcaagctgctgcagtacgtctactggtccaacggccgcgagaccgagaaccccaccgtcgacaacaagcagtgccccggcaagaactttgtggtgctcgttggcaggctcttcctcgtcgagctcttcctccgttacgacaccttcaccgccgacatcggcaaggacctgctcggcagcagtgtcgtcttcaccagcgtcaccaaagctacctccggtccgggcagcgagtgaaccacccggcgtgtcgtcattggctgcggatggatatatgtttggacgtgagtacgtgacagggtcccatttcttagtttcgtccctttaataagatactaggtaagtgctcttgtattgcaacttatgtataaatatgtattatattgtacgagaaaatgttttgtaatctatttgttagcttagccctacataaattttagttaggtgcatgtgcgttgcaacgacatataaaatatttgacaaaatgttagtacacaatgattacataaaaatgaacaccatatttattattgacatcaatatcacacaaattctttggtaacaatcaatacataactaaactaatacaaatcaaattatactactatacgaatatcataaaaata

SEQ ID NO: 1536 - DNA, 717 bp, Zea mays
ccgatccgtcctatataatccctcttctcccaccttcgtctccgtctccgtccgtatataagaagccagatttcgaattccctcctcctccgcctctcccgcagtccctcccccgtcgcgatcgctctgtgctccgcctccgtccgtcaaggcctgctcttgcgccgttcctcctcgcccaatccgccaggggatggccacattcgagctctaccggaggtccaccattggcacctgcctcaccgagacgctggacgagctcgtctccagcggggccgtcagcccggagctcgccatccaggtccttgtgcagttcgacaagtccatgactgaggcgctggagatgcaggtcaagagcaaggtcagcgtcaagggccacctgcacacctacaggttctgcgacaatgtctggaccttcattctaacagatgcaaccttcaagagcgaggagattcaagaaacactgggaagggtgaagatcgtggcctgcgattccaagttgctgcaacctcagcatccataaaacaagagtcgcctgctccatacatgttcagctcacggtttcatgcttattactggcgccacccaaaccttcctagttcatgtgaatttttgctccctctgaactttttcctagagtaccatggctgtcaacatgttatccgtactgaaatatggaatatatggttttgctttttcaaaaaaaaaaaaaaaaaa

SEQ ID NO: 1537 - DNA, 1803 bp, Zea mays
cgtgcgtgccggagccgcgcacgcactccctgctgctgctggctgtgtatcagttgccccagaggcaggccgatgtgatgcggctacagtgcgtgcggggggaacaccgtccagaggcgagcaggctgcctcgctcacgtccgctcatctgatcatctcgtcgtcgccatccaccctccctcgtgtcgtctcgagtctgttcgtgcccggccccccggccgtttccgggtttcggatacgcatttggctgttgcctctccgatccttgctatagtagtagctacttccttctccagccgctcgagcacgcgagccctgatccacgctagcttgagatgatagagctagagctagagcgagctatctaatccacctacctccgaggcctagcgctttgcagctacctagtggccgtcttgttccgtccggcagcgcaggtcggccgggtcgttggctcgttgctagctaagcgaaagcaagagagagaggtacggcgcggacggtgggtgggagttcaggcgattccgccgccgttgcccatggggaggcagtcgacgaggtggtggagtggcggctccggatccgcgcggacgctgggcgtcggcgtcgcggtggtggttgccctcgtcgtctccctctgcttcgccttcatcggcggccgtcgtctcgcggggacactggtgggtggcggcacccccgcttcagattccggcgggaggaccatggcagcggcagcagcccatcccggcggtcaggtggcgacgaccgatgaggagatggtttacaccggacggcggcgcctgctgtcgggcggcccgggctcgcatccgccgcggtgcgcgtccaaatgcggcagctgcaacccatgctacccggtgcacgtgtccgtgccgccgggggtcctggtcaccacggagtactacccggaggcgtggcggtgcaagtgccggaaccagctctacatgccgtgaccgtcgtcacatgcagtgagtggacgacgctcgtccaactggagacgaagacgaccaagggcggccctgcccgctgcccaagcccaatggctgcgagtcgcgacgccgggagcgtacgacctgaccagcgccgcgggcccgcccgtgcgcgcgcgtggcactggcactggcactggcaccagcaccggcaccgcggcgtgtgccactgtgccttggaccggcgcgtggccgaccgggcagagacggcctgcgaaccggcgctgccgtgtgccgtgcccgcgtgtgtgcagcgcaggcgcagcgcttgcgttcccgcgccgcgcatctatcgctgagctgagcgcccggcagtccgccgcgggcctaccacgagggctcgcacgggcacgacggcaggcagggcgccgtggtgattaagaaaaaggctgcgcctgctctgcctcgccgtactgttcgccttgttcgtatacgattggacgtatgcctttgatttcttggccactcaatgccattttttttcctcttttacttttctcttcgcgccttctcgaattgacccgttttttttttttgcgtgttgccattttcacagccgctacatgtgtatatgatgttgcgtattcgtacattttgcattagccaacaacatgtttgctgcctcagtcactgaaaagatgcgcgtccaagtttggattgattcagtgtatatagaatattattaatacttatgtctctaaatagataactgcgattctacgaaacagatttcctgattatttggtatcacaaatgttactaccctttttatagacgtgcatgtctttaaaatttt

SEQ ID NO: 1538 - DNA, 965 bp, Zea mays
caacaacgcacgagacaaagggcctcacgctttccacatcgacacaaaaaccaaccgccgccacctccctccgctcgcgctagctgtgtgcgttccttgcctgccacaactccagcacttggagtcttcgacgacgacgatgacgacgacggcaggggaggagaaagagaaacaggcgggcgggtcatccatggagacggaggaggagacgacgcccaaggcgaagaagcggccgcagtcgctactcgggagcctgcgggaggcgatcaccaaggtccggttcctgctctcctccagcgcgacgcggtggatgctgctcaggtccctggcccgcggcggcggcagcggcggcgccccggcgcggcgcctcagcttcgacgcgcgaccgggcctgctcgacaccatcgccgcgtcgccgacctcctcctgcagctccaggacctccaggtcggccagcctgggcacggcgaccacccggaccctgtcgcgggccagcagcgccgcgtcgccggaggccctgacgagggcctcgtcgtcgtccggcggccgctccccggcgtcgtcggccggggacgacgacgtcgaccagcgcgccgagctcttcatcgccaacttctacaggcagctgcggatggagcgccaggtctcgctgcagctgcggtacgtcagggggaacagctgggacaggacccctggcgcaactccttctcctgcttcttccaggggatgatccgtagattgcgtagcgaaataagaatttgcaaggtagagatcctttcctttcagagcgcgcggtgacgcgatttagatgggtatcctctttttttttcctccatcgtttctgcacattcttttttttttgggtgctgaatagtactgtacagtttatgatttgcttggactcatgatcgagagtgtaataaatacaaaaaaaaagagagagagattgggattacagtctgtaa

SEQ ID NO: 1539 - DNA, 1554 bp, Zea mays
ctaattagctaggcaaaggcgaacgtccacgagtgacgtggatgtgggtcccgaactgcctgacccagctgtcagcctccgcgtgttgcatcccacgtcccgcgaagtacgaggagacacgatgatgtgatattcctgaaaagaaaaagaaaagacaggagaataacgaagcaagatctgccgcgggtccattttaactggtcggcgactccgccgctgccatcttccccctctccccctccgtaccactcgtcttcgtctagcctcccgcccgcagccaccatggcacccggcctctacaccgacatcggcaagaagaccagagatttgctgtacaaggactacaacacgcaccagaagttctccctcaccacctgctcgccccatggcatcgcaatcacagctgcaggaacaaggaaaaatgagtccacctttggcgatcttcacactcaaattaagaacaataaattgacggtcgatgtcaaagcgaactcagaatcagatcttttgacaacaatcactgttgatgagattggtactccagggctcaaatcaattctcactttggttgttccggaccagaggtcagggaagcttgaacttcagtacctacatgaatatactggtgtgaatgcaagcatcgggcttaattccaaccctatggttaacctttctggtgcctttggaagcaaagcactctcagttggcgttgatgtttcatttgatacggagactagcaatttcactaagtacaatgctgccctgagcctcgccaatccagatcttattgcttcccttcatttgaataaccacggtgataccctggttgcgtcttactaccacctggtaaagcatcattcaggcactgctgttggagctgagctgtctcacagcatctcaagaaatgagagcacactaatatttgggtctcaacactcactggatccccacacgactgtcaaggcacgtttcaacaactatggcatggccagtgcccttgtccagcatgaatggcgtcccaagtcattcatcaccgtctccggtgaggtcgacaccagggcaattgagaagagtacgaaagttggcctgtccttggtgctcaagcactgaaatgctgagtgtttggggctctaggattttattttcgattcggatggattggaataagcatggcctggtgtcatctttgcggcaccgtttggatcttgaattacatattcctctccatgatcaatttcataggaaaatattaggattgattttatgctttaattcccagcgccctgttaataattctggtgattgagacctattgttaagcttgccaaatatgatggtggttattttgtgttcacttctatgtccattccttagtctgtcatgcgtttggatgtctggataatagtgggattgtttattgtggaatacatatattatgtaattatatattccagcttttattgggggtaatgacaagaaaaaccaacgttgagtccttggtttcagaactacagttagtcactttttttcttcttaaaagactgcctttgcgat

SEQ ID NO: 1540 - DNA, 2698 bp, Zea mays
agttactttataaccaaacaacaataaaactggaccaaacactaccaaaaacaccgccaacatgggatttaaagcatctaggatgcactaaataatgtgaaagaaaaaaaatatattataggcttttatttggtggcccatctaaaaacccactaattgagcccaaacttaagttccaccagacccacaccacacgtttctttacccaaccttttttcactgatccaccgaaagcacaaccgccgccgtttcttcatctcccatcttcgtcgtcttcgcagcaccggcgctccattttccgctctcggcacgcaggcgacggcggcggcgctcaggcttgggatctcaacgacggagtcagcggtttcccctccccctctcgccagccgcctcgcgccttcgcctccggtcctccgcacaccggctggtgaccctgcgtgcgtgcctctctctctcctcccgccttcggtggatcgtcaacgccgccaggccccggcatctgagccgcgcgcggcctgagggcagcgagagccagcagatgctgctccaccaaggtggtcgcgcatgcccaaagcgaagcgttacccgtcctcttagcgctgaagcgtgcgcttagtgccggcttttggaaccctgtatcataccgaattgcgcattatagaaattggctaggactacactgggtttgccattggccatgacgtgtgctgcttacagtatcagaggtcctctcatgcttgctgcaaggcgcagctcggatgtgttcgctagtagcaagtcgtgcaatggcaagtcttcggtgtcttaccccgttattcagtggtggagcagtaactgctcatccttcacaatgcggcatgtcgcctcccatcatcacttgattgttaaggcttcagcaacgtggcactcaaaagcttcagcaactgatgcagccactgcttccgatgagaggataactgtactggtcattggtggtggaggcagggagcatgctctttgttatgccttgaaccgttccccatcatgtgctgcagttctatgtgcccctggtaatgctggtattgctcagtccggggatgcaacatgtatttcagatttggacatctccagtagcgatgatgttatctcgttctgccgcaagagggaagtgggaatggttgtagtgggtcctgaagcccctcttgtcgcgggtcttgtgaatgaccttgtcaaagttgggataccaacctttggcccttcatcagaggctgcagcattagaaggatcaaaggacttcatgaagaagttgtgtgataagtacaacatccctacagccaagtatcgcacattcacggacgctgtggaagctaaaaaatatgttaaaaatgaaggagcccctatcgttgttaaagctgatggactggctgctggaaagggtgtggttgtcgcaatgactttggatgaggcgttcgaagccatagattctatgttggttgaaggctcattcggttctgctggttcactggttatcatcgaagaatttctagagggtgaagaagcctctttctttgcattggtagatggcacaaatgctttacctcttgaatcagcacaggatcacaaaagagttggtgatggtgatgttggcccaaataccggtggtatgggtgcatactcccctgctccaatagtgacagatgagctcaaacgcactgtaatggaaagtataattatccctactgttaaaggaatgtcaaccgaaggttgcaagtttgttggtgtattatatgctgggcttatgatcgagaagaagtctgggctgcctaagcttattgagtacaatgtaagatttggtgacccagaatgccaggttctgatgatgcgattagaatctgatttggcacaagttctgttatctgcttgccagggagagttaggcaatgtttcactaacctggtcacccgaaatggcaatggtggttgtgatggcaagccagggatacccgggcccttataaaaaggggaccgtgataaaaaacgtggacaaggctgagcaggtgtctccggctgtcaagatattccatgctgggacagcactagatggagacggcaaccttgttgccgttggagggcgagttcttggtgtcactgccaagggcaaggacattgaagaagcaagggcaagagcatatggtgcggtagacgctgtcgagtggccagaagggttcttcaggcacgacattggttggagagcactgaggcagaagcaagcggcaaaataggtagcagctacccatgaccacgagattttcctagactaccacaactacggtgagcttgtagtgtttgcaagtaataaaaagggaaacggtgtaacgttcactgatttttttttggttgtggaacagcaggttgttcaaattttaacacctgcggatttcagcatgatttggtagatgtttgaaccgagattatgttcagagtctagacaagcgctagcgtgaaagcagcgccatctgaattctgaccatttgtctttcagttctcggataagtggacctcctatatgactgtgatatctcaaaccaaacacttcagagtgtgatcgacctgtcctgtcccgtccggttatccatagtatagtcaccaagctatatgttatctgggcatgtctagatgttgatctatcagaccgacgcttctttttttcccgttcttcg

SEQ ID NO: 1541 - DNA, 1471 bp, Zea mays
gccctcgactcgcctcgccgcagggggtcacggtcacgccgcctccctccgctgccggcctgctcagcctccctccgccggtcctttcccacggtccacacgcgatcaaaagcgcaaaagccaaccccgacgaaacgacgagacggatacgagtgatagactgatagctaacgctacccacagcagcaactataccagccagcggaccccgacgccgccccaagcccccagcaggctgcagcccctgcgacatagtgggggagcgggtcttcttgagcggcgtcgctctcacgtacggcgtcgggtactcgtcgcggcggcagggagctaggggcaggcatgcgctgatggaattcaggggccaggaggaggaggagcagcccgtctcggaggagatgggcgccagctccgcgccgtcgtccgcccccacccccgccccggggaaccaggaccacgccgccgaggcgaggtaccacgagtgcctgcggaaccacgcggcggcgctgggcggccacgtcgtcgacggctgcggggagttcatgcccggggacggcgacagtctcaagtgcgccgcatgcggctgccaccgcagcttccaccgcaaggacgacgcgcgccgccgccaccaccaactcatgctcccggcgaccgcgacgtcctctcgcgtcccgctgctcctgcctccgccccacccgcactacgcgccgccgccgttcccgtaccacggcacgcccagcggcggcggcggcggcaccgccaccgagtcgtccagcgaggagcgcggcccgccgtccggggccgccgccgtgcaggcgcagggccacgtccggcggaagcggttccggaccaagttcacgccggagcagaaggagcagatgctggcgttcgcggagcgcctcggctggcggttgcagaagcaggacgacgcgctggtgcagcacttctgcgaccaggtcggcgtgcgccgccaggtattcaaggtctggatgcacaacaacaagcacaccggcaggaggcagcagccgcacctgccgccgccgcaggggcagcaacagccccaacagcagccgaagtagccacggtgggagacaaggctcagcagtcagcagcaccatcacagccacgccaccatttgcttaatcccccgcctcatttttttatgggctccgagaggtgtgggattaaacaagggaagtgaaggagggctcctatcctctcttcccttccgtttttgggtttcaccttatccttcattttttgtagtcacttctttcaccattgtcttttgcctcaccattcttgtctgcacatctttgatttcttctgttcctagttcgggggatcaattggaaggaggaagaggcactgtgcatgcttcgtagctacattcctgctaccttgttgccatttgaccccccctcggacagcaagattaaccaatctaataagatctctctactttgctctgaaa

SEQ ID NO: 1542 - DNA, 2381 bp, Zea mays
aggggaactcacgaaataaggcacccaaccaccttcccctccgccccaatcgcttgctcccgcacggccgcaccgccgccgacctcgccgccggcaatggcgtggctcgcgcgctccatcgccaactccctcatcgctactgaggaagaacccgaagcaaccgaccggggcccctcggcctccccgggctcgtcctctcccccgcgcggcgtccgcgaggacctctccgagctaaccggcgcgctcgcgaaccgcttccagggcatcgcctccttcctcgcgcccgcggcgcctgggggcggaggcgccctgcgccggccggacccggccgagatcgcgggccggttccgcgccggcctcgcgcggctcccgggccgccaggccgtagcggatctcgccaggatcgcgtcctcgctcctgccccctgagggcgatgcagactgggcggaggaggcagcgggggtcaccgaagaggtggtcgcgttcgcgcgggacgcggcatcgcggcccgagctatggctcgacttccccctcctccccgacgacgcggactcggatgattttgacatgactgatgcgcagcaagatcacgccctggccgtggaaagcttggcgcccgagctggctgatctgaggatcgagctctgccccagccacatgagcgaggactgcttctggaagatatacttcgtactgctgcatcctaagctcaggaaggatgatgccgacattttatccactccacagattctggaagctagggacaagttgtcgcaggaggtgcggtaccggacggagttacaaggcagccacggcgacaccgtacctgtggctctcggcgatgaaggtggcgtttcaggttctcttgtagagggtttgggcgtattgaagggccaagacgactccgccatgctcacgtctttcagcaacacggactacggcaagccacaaccgatcgaacaggacaaggatattgtatcggttcatacgatcggcgagactggagctgtttcttcggataataccggtagcagcggtgtacctgtacagctagtgcccgtgtcgagagacaccaccaccgtggcgccactatctaggacggaagaaagtacgcacgatctctctacggaagacgaagcagcagcagaagaagaagaggagcagggtctgcagatgtctgagatacctttgacggacagctctccccctaaagatggtcaacagaaacaaccactggctgccatcagtgagcgatcaggagctgactatcagaaaagtgataatgttgaggatggcggcgacggcgtcgaagatgacgacggggatgaatggttggaagaggaagcatgggacccgggaaacacgcaaattccgatagcagatgatgaagacgtgtctttcagtgatctggaggaggaagacgatggtgcggcctgacatcgcctgtaggcttggcttgaccgtactgcttacgtagtctgtgcttcctgttccgttatacgattggtacaattgtcttggttgatgtctaatacacgctctcatagtctcattgcttcctgttccgttatacgattggtacggcatgcatgctttgctagctgcccccagctagcagacaactaccagctcactagtcgatcgataagaaactaaacagcgaagcccgcagctagcaaagttcgctcaccagctgcactgcaagctcgtacacatacacaattaataataatcaaccgaaaccagctagtagagttcaaagaaaagctcacataataatacacacacgcacaaaacacgtacgacgacagaaccacacgcaatgcagacgacgaagccggccgacgactggggcgtggggcatgcatcgatcgatctgaggaggtgcgctagccggcctagctgtggcctcctccctggccctgggtgtagatgtagtcggtgtgcgccgccagcgtcctcctcatgaggcactcctcgtcctctcctcctcctcctaccccttcgctgccgcaccgctcgtcgtcgcccgccgcgaagctcatgctcatcgacgacctctcctcggcgcctaccttactcacatctctttgctgctcctcttggcttctcgtcgagctcgccgccgccacagctctcgtcgcgtggccggcgacgacggagaggaggaggaggaggaggaggacagcagacaccagcaccagcagcagcggcagggcggtccgccgtggtgccgatgttggtggcgccgccatgtctgcaagactgcaaccaacctgcactgcaggcttgttgctgttcctttggcgtcagcggcgtggcggatatctgacgacccggccggccggggctcttgctggatttatgtgaagcgttgttgg

SEQ ID NO: 1543 - DNA, 726 bp, Zea mays
accaccgccaacgcgttacagacgcgcctctgcgttacagagctcgacaagatgagcgtcgaacagctgcacgcaaggaagctcctgtcgcacgccgccgccgccgcggctgcctcgtcggcgggaccgccagcgacggaggcgcaggtgcctgccgcgcacgctcacgcagcagcgcccttcagctccctgaacacgatggtgatcactgcgctgtcgctgctcctgtgcgggctggtggtcgtgctcgcggtgcacgcggtcgtccggtgcgcgttccgcgtcacgcgccgcgtgtgctacgggcaggacgaggagtcccccggcggcggcggcggcggcggcgccgatgcatcggcggccgcggcctccttctcctgccaggccggtcccaggaggaagcgtgggccgcgaaccgggctgcccccgtggatactctactcccgcgaggtcgagctcacggggtgcggcgcggcggaatgcgccatctgcctcacggagttcgtgcggggtgaccgcgtacgcgcgctgccgcactgcaaccacggcttccacgtgcggtgcatcgaccgctggctcgccgcgcggcagacgtgccccacgtgcaggcgggcgccgttcgccgctaaaccctcgctctcgctgccggacagcgcggaggcaccggagtccgtgcagcttcaggcgcgcgttgaatccggggccgggcagcacgagactcaatag

SEQ ID NO: 1544 - DNA, 513 bp, Zea mays
atgggggacgccggtttcgctctcctcgtcgcgttagcggccgccctggccgccctgttcctcgtcctgctcggcgccgccgtcctccggcactactgctggcggcggcgcctcgacgctgtggcgcccccacgccgcggcttcgtcctgttcgacgtctgcttcgccgacgacaggcagcagcggcacgccgtgaggccgccgccgccgtccgtggagcggggctgggcgcggcgggcggcgggcgagggccgggtggagcacgcgcccggcggcggcggcgaggccgcggcggacgacgacccggtcgtggagcccgacgagctcgagatcgcgcggtggaggaagatcttccgcggcccgaacaggtccatgtccacgatcgacgaggggacggagaaggacggcacgacgcccgccttctccacgccgtcggcgtcgcctgaccgacgcgacgcccgggccccggccctcggcatggagaccgtcgcggtgcagcttcgtcaggcgtaa

SEQ ID NO: 1545 - DNA, 357 bp, Zea mays
atgccgcagatggaggtgcccactaatcagatccccgcaggctggttcactgagccggcttccgagcagcccatgggcttgcccaggaccggctcttccagtcgcctcaacgcgcaggcgccggagttcgtgccgcggggcccgccaccaccgacgccggcggttgtgctgccgcctccgccgcaggtgatccgcatgttcgccacgcctcccccgccgccgcgtgggggcttcttctccgcgccgccgccccggccgtttgagtactatgcgcctatggtgaacgcagcggatttgctgccaaggagcaacaggcgcgggagccggaagcggagatgctcccgcccgccgcggtga

SEQ ID NO: 1546 - DNA, 2490 bp, Zea mays
ggaaaaatgacaagatgtaatatatttacctctttgtatcttttatatgactcttatctctctattcaaattctcattgaaaggctaggtataggtaataaatttacatgcgttcttaaatcttaattcatgtagaattgcaattcatagctaaactttgtgctccaaataggcttaaacttgtttggcatgactaatgaggatgtgagtaccttgttctagcatcacacactagttgtgagagccttctgcgttggcaattggcagtacaagacaaatcacatccgcaaccgcaaccacagaatcgtccgtccacgtggcccccatcacttccctttatttaccagtcgtcccccatccccagggccacccaccaacaagtgcagtcacccgagccgcaaactgcagctctgcaagctacagaggccaccacgagtccacgacgccacgccctccgagagaaagagaaagagaaaaccaaagcacgataatgcccccgacccccacagccgccgcagccggcgccgccgtggcggcggcatcagcagcggagcaggcggcgttccgcctcgtgggccaccgcaacttcgtccgcttcaacccgcgctccgaccgcttccacacgctcgcgttccaccacgtggagctctggtgcgccgacgcggcctccgccgcgggccgcttctccttcggcctgggcgcgccgctcgccgcacgctccgacctctccacgggcaactccgcgcacgcgtccctgctgctccgctccggctccctctccttcctcttcacggcgccctacgcgcacggcgccgacgctgccaccgccgcgctgccctccttctccgccgccgccgcgcggcgcttcgcagccgaccacggcctcgcggtgcgcgccgtcgcgctccgcgtcgccgacgccgaggacgccttccgcgccagcgtcgcggccggggcgcgcccggcgttcggccccgtcgacctcggccgcggcttccgcctcgccgaggtcgagctctacggcgacgtcgtgctccggtacgtgagctacccggacggcgccgcgggcgagcccttcctgccggggttcgagggcgtggccagccccggggcggccgactacgggctgagcaggttcgaccacatcgtcggcaacgtgccggagctggcgcccgccgccgcctacttcgccggcttcacggggttccacgagttcgccgagttcacgacggaggacgtgggcaccgcggagagcggcctcaactccatggtgctcgccaacaactcggagaacgtgctgctcccgctcaacgagccggtgcacggcaccaagcgccgcagccagatacaaacgttcctggaccaccacggcggccccggcgtgcagcacatggcgctggccagcgacgacgtgctcaggacgctgagggagatgcaggcgcgctcggccatgggcggcttcgagttcatggcgcctcccacatccgactactatgacggcgtgaggcggcgcgccggggacgtgctcacggaagcacagattaaggagtgccaggagctaggggtgctggtggacagggatgaccagggcgtgctgctccaaatcttcaccaagccagtgggggacaggccaacgctgttcttggaaatcatccaaaggatcgggtgcatggagaaggatgagaaggggcaagaataccaaaagggtggctgcggcgggttcggcaagggaaacttctcgcagctgttcaagtccatcgaggattatgagaagtcccttgaagccaagcaagctgctgcagcagctgcagctcagggatcctaggacagtgcttggagacgagcaactgctgtggcactttgtatcatggaacagaaataatgaagcgtgttctttgtgacacttgacatgcaaatgtttgtgttctgtaaccgttgaatatatgggacgatgctatgatggtgtaatagatggtagagagggtacaaccctgatactaatgatgcactattgcatctctgttgtacaagtttgcatgaaaataacgacgagggtcagtatgaggcataatgaatctgttcctgggattcttgtactcacctggtgctttttttttatgagaagacagctgtcgttggctcctgtcgatgtgatcctgcggcaagaatacaacagattgcgcattgatctcagtaacctgaaagaagcagaggtaaaatagaaatgcagagtaagataagcgcatctagacatcttgtttggtgtatcaggcattcacgtgttgatattgagttctgtgacctagctagaacagcacaaaatggacctggcaagcctcttgtctactagcagtctagcactgggctgtagattattatatatgcatcaatatcaggtaactacttaaacgtacagaaatcacttggagccatcagccatggccatggaaggctgctagttttgtccagggatatgtatcgtgtatggct

SEQ ID NO: 1547 - DNA, 2467 bp, Zea mays
atggctggccgaccgcccgcagcgccgctagttggcaccgccttggcctccgaaagccagtccttgtggccgtttgccggcgttgaggaggttaagcctgacaccgaggtgtgcacggtgctcagcagtgatacccttccacagaccccgcatagtgcgggaagcctacggcactgggtacgccctacaggtgctcagcagtgtggtaaatgtgctttggtatatacaccagaacttgcagtgaataagattatgattggaaatctcatacactgccatgataaggtaaaacatgaagctggcatcaatggcaatattaagatttttacagaagatgagattaaaagaattaccaacaactttaacactcttatcggaaaaggtggctttggagaagtttataggggaacccttgatgatgacaatgagcctgtagctgtgaagaaatatatcaatgaagatttgagagaagtgtttatggaagaagtacgcatccatagtaaaattagccacaagaatgtggtgaagctaataggctattgcattgggaaaagtactctcatgatcgtaatggagtatatgtccacaggaaatctcaatgacatactccactgcactgaaatttcgatccctttggatgtaagattgggtattgctatagggtgtgcagaggcattgagctacatgcattcaatgcatttatcatctggcaaccttatctgtcatggtgatgttaagcctgccaacatacttctaaatgacaatttgacagcaaaaataaccgattttggggtttcaaggcttctggttggtggcatcactcagtacacgacaagtgtaaaaggaagtatagattacatggatcctatatatattcaagaaggccgtcttactccaaggagtgatgtttatagctttggattagttctctgtgaactaatatctagaaaaaggataagaaaaggtgacattaacctcattttatatgtcaataaaggctccgcaagtggtaaagggtttagagaaatgtctgatgctgcaattgcaaatgaggacaatatgaagattctcaaagaaatgaagaaattggcaactgaatgtgtatcactgagcatttataggcgtcctcagatgactgatgtggtcagacgccttcggatgctgagaaaagaattaaaggagagacatgaatattattcagagtcaattttggcatcacaccattcatggcgcaaaaacaacaagcaagagataatcatgcccacctataattctaagatgcagatcaagaagagtctgggctttttcaagaggagccttagtaactctaagatccaatcggaacccagcgatgtgaggattttcacacaggaggagctaaaagaagtcacgaataactactcttatctaatcagtggaggtacttcaggtaaagtttacagaggaacactcgaggacaatacggtggtagcggtgagaatattttctgaagtactcgagggctttgaagaagcgttcgtcaatggtgggatgatcctgtctcagatatcccataggaacatcatcaaactggtgggatattgcttggacgctgactgcccagctttcttgtatgagtacgctgctaagggcagcctatctgatgttctggacgggcatgaagacttcccactggatctacgtgcgaagatcgtggtgaagatcgcagaagcattagaatacctccattcaccagcaactggtattatcagacacggctatgttgtgccatccaagatactcgtagacaataatttcatgccaaagctcaccggcttttcatgggcaaggaggcttatccaggagagtaacactactgccagcgacgacgtaatttctagtcatcagcatccatcgagcgggttcaacaacgacccgatccacgaccactatgtgtcgctaaaactgaagaccgatgtgtaccagttcggtgtcctcctcctgacactgattagcaggaagagctttgtgttttacgccgatcacgacggcctcgtctcgcagttcctcacagcttgccaggaagatggcagtggaagggcgttctttgatgatgatgttgcagtccatggtggagatgttgttctgcttgaggagatggggaggctgtcgctgaagtgtgtttgtgaggaaatcgagcagagaccaacgatgcgagaagtggcagagcaccttcggatgatcacgagatcttggaaggacttcagcgggagctacgcaggagctgaaggcaatactcctgagaggccacctagttcagacattggagattgaccatgagcaatcctgtacatacgacagtgaatgatagatgtgttgtttgtattgtttcgtggtcagtgttagactgctgtttacgtgtagctgctgctattgttgtatgtgtagctgctaggggtgtaaatggtacggatattatctgtctgta

SEQ ID NO: 1548 - DNA, 2354 bp, Zea mays
cgggtgctgtccgtccctttgtcggtggtcgttgttcccaaccaaaatttccaccccttcgtcagccccttgaccaccgttccaaccctctcccatcgcgtcgcctcgaaggaagcgcggctgatcctgctccaagcctccaaccctagcttccccgctccccaccttcctccgtccggggctcatggcggagatcgaggtggtatccgaaggcggcaggcgggacgaggacgaggagcggcggcggcagcagcagcaaggcgcgggggagccggaccccgtggtggacgtgtactctgcggcggcgtatggggacctggagcggctccgcggtttcgtggagcaggggggagccgccaccgcgctcagggagcccgacggcaacggctaccacgcgctccagtgggccgcgctcaacaactacccccacgtcgcgctctacatcgtcgagcacggtggcgacgttaatgcgacggaccacgcgcggcagacggcgctgcactgggcggccgtgcgtgggtccacttccgtggctgacgtgctgatggagcacggagcgagggtcgaggccgccgacgtcaatggcttccgggcagtccacgttgcatctcagtatggccaaacagcattcttgcatcacatcatctcaaagtacggtgcagattttgatgctttggacattgatgggaggagcgctttgcactgggctgcctacaaaggaaatgcagatacaatcagattactgctatttatggatgctaatcaagtaaggcaagacaaaaatggttgtacccctttacattgggctgccataagaggaaatttggaggtttgcacagttcttgtacatactggtactaaggaagagctcacactaaaggatagtggtgggttaactcctgtgcaactggcagcagaaaaaggtcatcgacatctttccaatgtcctttctaatgctacaaaagtaagctttgaagataagtttttccctggaaaatcaaggaaaattggatatgcccctttcttgtttgcttatcttgtcatctgcctcatcctgttcctaaactcaattgtatttgcacctaatttttctaggatcactgctactgctggtctttggtcttgggctgctgtatcacttttctttgcatcacaagtaatgttctacagagttagcagaaaaaatcctggctacatcaaggcaaattccaagcgaattgacccaaaggagccacttatggaaattgatcttaccaattcctctacttggacaggcaattggtctcagctatgccctacttgcaagataattcgacctatgcgctccaaacattgtccaacttgtaagcattgtgttgagcagttcgaccatcactgcccatggatatcaaactgtgttggaaagcgaaataagtgggacttttttgtgtttctttggatggggatagctacatcctttcttggtgctgctgttggattccacagacttcagacagagcctgttatactctcatcttcagaatcgtggatacattttatggtgacaaagcatcctggtgctgtactgttcatgtttcttgatgtctttttgttaactggagctcttattctgactggagcacaagcagtacagatagcacggaacatcacaactaatgaggcagcaaatcgatctcgttacacatatcttcgagggcctgatgggcgtttcagaaatccttacagtcgaggttgccagaggaactgcactgattttcttatcagtggatacagcaatgacgaggaggtcgcatggccaacacttcaacaaacagtacagtgaagatagatgcactggttcatgaaacaaaagtgttattgacagatttaatgcccaagatccctggaaagcttatgctttagcgctccgaatatttcagtttgttcagacactggattgacaatggtgtgaagagcgacctggggtcacattctgagtggcacccttttattataagggtctttagtaagtgctgtcggtcatggaattgtttgatactgtagattgttcgcatgcgtgggtgtgcagcagtatgttttcttttctccggctacatgttttgctaggacaagtcatctattcatgttatcgagatgagtgctgatagtgatagatggtgaatgctggttttctgatctccggtgtagtaagttgaattcacaatcttactccattcacgaaatatacacgggacaactgagcaagtataactgtagagcaaccccagcagaaacacttgaatcagggtccctgctactattagtttgagggtctgatacttttttttgctctcttccaacagtagctcttaaat

SEQ ID NO: 1549 - DNA, 882 bp, Zea mays
cctccgccgccgcccacggatcaacgccacgccaccacgccggaagaccgggatcgtgacggccacatggacatggctacggcggccgccgcgttgccatgggtttgtccccattcctcatcttctttcctattaacccccgcggccccgcccctgctttccttgctcgcgctttaggtagaatacatacatatcttctgctcagacaagttcgaccgtccatggaggttcttggtttcgcggcaatgggaggcggttccccggcgtggatcgacgtgcctgagcggagcaagagcgcgttcatggagctgaagcggaggaaggtccaccggtatgtgatcttcaagatcgacgacagtagagaggaggtcgtcgtcgacaagatcggcgcgcccggggagagctacgacgacttcacggcgtcgctaccgaccgatgattgccggtacgccgtctacgatctggatttcgtaagcgacgacaactgccggaaaagcaagattttcttcatctcctggtctccttcagattctcgcatccgtgccaagaccatatatgccgtgtcaaggaaccaattccgtcatgagcttgacggagtgcacttcgagatccaagccaccgatcccgatgacatgaatctagaagttctcagggggcgtgctaacagaacctgattcactagcgagcaacccaaaatgcagctcggaggtcgctgatctgatgaggcatgacgtagaagtataggctgccgatcacacccgggcatgcattgtttctttttacttcttcctttccttttggagttatacttccgtgatgtttgcctaactacataggttccctctaatatgatgtggactgtggaacctttccttgttttac

SEQ ID NO: 1550 - DNA, 5906 bp, Zea mays
tccaattttcgaagcaccgccgttgttatcaccgtcgttataaaggcagcctgggtgcgctgaagaaagaaccctcgcttcagtcctcaccttctgcatttctcgcaacccacgccgcgtcacttccccttcgtagtccagtggaagtggaaccgccaaaatgtcgtcgtcggcggcggagacgccgcgggagcacgtggagagtatccggcggaagcgctactacatcggccgcggcgagcaaaacccgctggcggaggacttgcaccaggccacgaactacctctcgcaggagctctactccaaggacgtgcacttcctcatggagctcgtgcagaatgctgaagataacgaatacccttctgaagtagcaccttctttggagtttctgattacatcaaaggatattactggatgtggtgcatcctcaactttgctcattttcaataatgagaggggattctctgcaaccaatatcgagtcaatttgtagagtcggaaaatcaacaaagaagggaaacaggcatcggggttacatcggagagaaaggtattgggttcaaaagtgtgttcttgatatcaagccagccccacatattcagcaatggctatcagatcaagttcaatgagaaaccctgtgcagaatgcaatattgggtacattgtacctgaatgggtggaatccacacctagcctttctgacatcgaaacattgtacgggtgctcgaaagtcctgcctacaaccaccatcatcttaccattgaagagcgagaagattgatgcggtgaagacgcagctgtcaagcatgcatcctgaaatgctattgttcctgacaaagatcacgaaactttctgtccgggagaactctgatctcaaccatacaactgttagtgagatctcgataactagtgagaagaactaccaagccaggaagaacatgcatgcggagtcgtacacactccacttatctgctgaagagaccgggaaagaagaagcagaatgcggttactatatgtggaggcagaaattcccagtcaagccagagaacagagtcgataagcgtgctgaaattgacgaatgggtgataactctggccttcccacatggccagcgtctgactcgtgggaagcagctattacctagcatctatgctttcctcccaactgagatggtaacaagcttcccgttcatcattcaggctgacttcctccttgcttcgtcaagggaggctatactgtttgacagtccgtggaacaaggggattctagagtgtgtcccaaaggctttcatggatgcttttgtgacacttgtaaagtctgatgcaccatcaatgtctcggccatctatgttcaactttctacctgtcgactcctcacagatcccactgcttgaaccagttaggtctggcatcaaagacaaggtccttgcagaggatatagttccgtgtgaatcttacgcttcacagaagatattctgcaagcccagtgaagttgcacggctcaagccaacattttggactatccttgccaaagcatgggggctaggagtggatctgaagaatctgtcaacccatggaacttatattcttagctcacattttgacaaaagtatctatgacagtgtgctaaactttctggatgtgaaaaatgtgaaccatgaatggtatgcaaaatgcattgaaggctcaaatcttgtcaaggaggtagatgaacaactttacctggaaattttatattttgttgcagtcaattggcaaaacttttctggtacaaacatgatgtccattcccctgctgaagtatgttgataggggtggtgttctctcgttctggagcatatccagagctagtcagtgtaatgataggttgtgcattgcgtctgaaaacaagtacatatcatggctaatcagctggaatagggagttcctatcttctaaccggttctttctgcctcctagcacacaaacagctctagaaggttgctcggagaagatgaagagctggcttcagaaacatgcaagagttgaggttgtctctatttatagttatggatcagttgttgttaattccttgggttctgatcaaagagctgtcattgccttcgcacactttctttatcactctttcaagaaggatcacatcggggactactacttgtcagaactctgcagcagcatgccagtaattgatagctatggctatgttgtcaaggaaagaaatagcattatagttcctgccaagggaagcaaatgggttggtttgatgggaacaaacccatggagggatcacggctacattgagttgtcagcagaatacaagtcagcaggacattttgctggaaactatacttctgaagaccagctattggaattcctcaagacaaatttgcaggcttcggatgtgccattcatactcccaccagatgccagattctctactgtgtcatcatctctaactgtggacaatgtattcttgctgctggaatggataaagaatttgaggtcacgtggtgtaagattaccagacctgttcttgacttgtgtcaaggaagggaattggctcaagacgtcggctgggtacaagtcgcctaatatatcatttctgtccagctccaattgggggagtcttctgcaaacagcaccttcctgtgttgatataccaatggttgatcaagagtactaccaaaacaggctacatatgtacaaagaggaactcaaggcaattggtgtgagatttgaattccaggaagcttcagcttatatcggaactcgtctcatgtctattgctgctggcaattcgctgacaagagagaatgtgtacacactgcttcggcttattcggtttctacgagagaagtttctatctccgagtgatctgatcgaaagtgtaaaagagggacgatggatgaagagtactcttggctacaggcgtcctgctgattgtatcatctacgattcagattgggaagtggcatcatgtatcagtaaccaaccattccttgatgtatcattctacggtgcagccatcctcgaatataaagtcgagctggaattacttggtgtcattgtggggttcaaagacaattaccaacttgttattgacaacttcaagtttagttcttgtgatattacctctcaagctactgttttaatcctcaagtgcatccgttatgtggcttcatgtgatgattttataaggaagctcaaagatttgaaatggttgaagacaattgtgggatttcatgctcctaacatgtcttttcttgtggatcctgaatgggagtgccttcttaaggtctttaatggagttcctattattgactatggattttatggtagtgtgatcagttcatacaaagaagaattgaggaagactgggttgatcacaaggttcgaagaggcatcaaaagctataacagaaattttcaagcagagggtgttgaattcatcgcttaaaaaagctgatgtcctggctctactaggatcgtatcgtcaactggcaatgcacagtccacttccagttgagctgttcaattctatgcgtactgaaaagtggctgtacacttcactgggattccgatctccatcagatgcaattctatttgatgatgcatgggtatctttgtctccaatagcaaatttaccattcatagatgatggtgactcttgccatggtttaggaatggagatacatggctacaaagatgaactgaagaagttgggtgttactgttgatttaaaagaaggtgctagattcgtcatcacaggcatcagcattcccaatgacccttccaagttgtccaaagctacaatcttgtcactgcttggttgcatcaagagctacttcacctttgcagctggacctcttaagggcttcaaggaaaatatgtgcaagaagaagttgttgaagacatccatgggatatcagtgtcctaatgattgtatcctctttgatccaaagcagtcttctgtctgcatggaagatggccctttcatagatgaatcattctatggttcagagatagcctcattcaaagatgctcttacaagaatcggagtaaccgtggatatcaaacttggaaaagatcttgttgctcggcatctgaggagccacaataaaacagttaccatttcccggatctacttatacctgatgacgagcaaatgggtgcctgcaagtaaaaatagcaattggatttggataccaaacgaaatggatggtggagaatgggtggcctcaggaagctgtgttcttcatgaccggaacaatctttttggcctgcagtttcatgtcctggacaaatattatgacaaaaagctgcatgacttctttttgtacactcttgacgtgagggacggacctggttctgaagattactgcaagctatgggccagatgggagaaatccgtcaaggagatagctgtgtctgattgctctgctttttggaaattcatcgcgacaaactggagccaaaacacccagaaacttctttctggctgtgccaaagttcctgtatgtactgacggaaagatcattttgacaaagaaggaggacgtgttcattcctgacgatctactactcacggacctgttcagcaagctaacccagcattcatttttcatctggtatcctgcttctatcctcccttccatgtctcgagctagacttaaccacatctatgacaccatcggtgtccaaagaatctccaaagcagccaccaggaacgattccttcaccatcgacggacgtcatttcagaacgattgatccaagtaaggtggtcaaggctggtctgctccaaatagtgctctcattcctcgctgaccccgctctcgacattgctgccgaagagaggcaccggatggtttcctgccttctgaatgtgactgtccaagagagtgacgagccaatcacactggggtatagtgtaaggctgtcatccggagaggttgtggatgtgaagtccagccgaatggtcaggtgggagagggaggattctaagctgtacgtgcagagtggcgacggcgagcccagctacaaagagaagatcgagttcgcgacatacttcgcagaggagatctctcagggcctgctctttgagatggaggaccagatcccttccctcgctgagcttatcaagttcggcagcttgctggatttccaggacgccgctgttgggttcttgctcaagtcaaagaacctgcagatgtttcctgaagatgagcatttcctgaagtcttcaatgctagatggcaacaacaaccgttagttttctgtcgattatgcgctttgggtaacgttcatggtcagcaaatgtttctgctttcttatgtacggcactactgttaatgtttgtatgttgcatcacatgttttctcactgcaaaccaagtcttatatagattttattggcaggttgctggttggctacataaaaatatggtgctgcgcttggaagtggaagcttctgaatgtgactgttctctagcgttcatcttgtgttcgtctatcgctcgttttaagtttggatttctgtgtgctagaatgcaacttgtcagtgcttccagtgcatgtattaagcgcaaaaactcaactgtgataaataatgccgtttgcaatgcattgtgtctgatctattttgtttttttttatggtcctatctgatgagtttgtgtttgacatgaacactgcacagattatagctgcagcagtgttggtggcatgtttactttgagatggcttagcttggttgctgttgtttcagcgcgattcgcgatcttaatccttcctgtgtgctgagtttatattttaggccagtcgctctatattcagttgttgtcttgccgatatctgatgattcagattttggtattttggtcagcacctgccttggaaaatcagacagaatgttgc

SEQ ID NO: 1551 - DNA, 1446 bp, Zea mays
cgtccacaatcttttggtgcacggttctgcccatccgccatcaacgcggacgcgcccgtcaaggaaggttgtcgcgtcatagatccccatcctccttcctccccatctgctccccgccatcaacgctctccatggaagtcgagtccgcgatgctcgcgtcgtccctaaaccccgccccgactctctccgcgtccgcgacaacccgatttccagcgtcctccaccccgaatcgccgccccggctctctccatggaaggcgcgtctgcgacagcccgatctccgtggaaggcgtgtcctcctccccagatcgtcgtcccggctctctccacgcccgtgacagcctgctctctatggaaggtgagtctgcgatgctcacgtggattgggtaccccgcccccgctctctccatggaaggcgtgtctccgatagccgcatcctcccttgcgaaccgcgtgcgtcatggcaacacgggcgaggcggtggggagtctggtggacgcgcatcacggtgagacgaacgggggcaagggcaagggatatattttccatccggggcggatgtggagaggttcttcaaactctgtgaccctgagaactacaatttatgctcaagtcaatgctgctcttcgcaaaataagagacacatcagagtttgtccaatcttttgcatcagagcatcttaagacgccattagaagaacttgtgaaaggtaataaaaacaagtccaccactgagttatgggtagagaaattctataagaaggtaaccaatctaccggagccttttccccatgatcttgttgagaagttagaagaatacctggataaacttgaagggcaacccgtggacttgtcttccttattgtatgaccaccagctgatcgatgcatatcaaaacagtaccgacatcctgcaaagcactatttttacacaacagtatgtggaacgtgttctagctaacgagagagacaagatgaaatgctgtagcattgaatatagtcatccaaagcagtcatcccaggcttttgtctatggagggatccttctggctggatttattgtgtattcactgatcaatgcttgttgcaacatcatagtgcacctgatggggaatccaacatgtttcacgtgacatgtaggggaaggcatcgaaaaaggtgaaggttgtagaaaagggccctaaaaagggcacgatgaaagcccaacttgctaagagaggtaggaaggctaagaattgatgacatgttgatttcctcgtcagagaaaaaaatgctatagcaacaaagatgagaattcttcaacgcattagccatcgttgtgaggcgcatcatcaattcaacatcatgtagtgctggttttagagagaaaggcaacatgtaaagctataaatgttgtgtactctacgagtgttcagctttggatcattgaaaagatcaagatgttgaact

SEQ ID NO: 1552 - DNA, 1571 bp, Zea mays
atgggcagcttggacaccaaccctgccgccatgtccgccttgggcgacaacgcctgctccggcttccagccgctgaacccggacgacgtccgctcctacctccacaaggccgtcgacttcatctccgactactacaagtccgtcgagtcactgcccgtgctgcccgacgtcaagccggggtacctacggaacgagctgcagtccgcgccacccacgtcctccgccccgttcgacgtcaccatgaaggagctcaccgcctccgtcgtccccggcatgacccactgggccagccccaacttcttcgccttcttcccgtccaccaacagcgctgcgaccatcgccggcgacctcatcgcctctgccatgaacaccgtcggcttcacgtggcaagccgcgcccgccgccaccgagatggaggtcctcgcgctcgactggctcgcgcagcttctgcgcctgccgcccagcttcatgaaccgcaccggcggggctgcgcgtggctccggcggcggcgtcatcctcgccaccaccagcgaagccatgctcgtcacgctcgtcgcggcgcgtgacgccgcgctgcgtcggagcggctcacacggcgtgtcccagctgccgcgcttggccgtgtacgccgcggaccagacgcactccaccttcttcaaggcgtgccgcctcgccggcttcgaccccgccaacatccgctgcatccccaccggcccggagacggactacggcctcgacccggcgaggctgctcgaggtcatgcaggccgacgtcgacgccggcctcgtgccgacctacgtctgcgccacggtcggcaccacgtcgtccaacgccgtcgaccctgtgcgagccattgccgatgccgccgccgtgttcaacgcgtgggtccacatcgacgccgcgtacgctggcagcgcgtgcatctgccctgagttccggcaccacctcgacggcgtggagcgcgtggactccatcagcatgagcccgcacaagtggctcatgacgtgcctggactgcacgtgcctgtgggtgcgcgacacgcaccggctcaccggctcgctggagaccaacccggagtacctcaagaacgacgccagcgagtccggcaacgtcaccgacctcaaggacatgcaggtcggcgtcggccgccgcttccgggggctcaagctctggatggtcatgcgcacctacggcgcctccaagctgcaggagcacatccggagtgacgtcgccatggccaagatgttcgaggacgccgtacgcgctgacgaccggttcgaggtcgtggttccgaggaacttcgctctcgtgtgcttcaggatcaagccccgtggtggcatgacggaggaggacgccgacgaggtcaaccgtgagctcatggagcgcctcaacaggaccgggaaggcgtacctggcgcacacggtggtaggcggcaggttcgtgctgcggttcgccgtcggttcgtcgctgcaggaggagaggcacgtccggagcgcgtgggagctcatcaacaagacaaccaatgagatcatgctggaaccggaacagatcgttgtggagtagtaatgcac

SEQ ID NO: 1553 - DNA, 2005 bp, Zea mays
ttttgtggccgaagaagttgccttccatggaatggacgactcggcgccgagaatatcctcacttcctcctcactatacattggcggcgcactcctgcctcctccgcatccactatatttggccgggttggagcagcagcgatcgatcgcccggggcgcggccaatggcaatggcgggcgggcagaacatgcaggtgctctcggcactggacggcgccaagacgcagcggtaccacttcacggcgatcgtcgtggcggggatgggcttcttcaccgacgcgtacgacctcttctgcatctccctcgtcaccaagctcatcggccgcatctactacaccgtcgacggctcgcccaggccgggcagcctgccgccgcacgtgtccgcggccgtcaacggcgtggcgttcgtgggaacgctgtcagggcagctcttcttcggctggctcggcgacagggtgggccggaagagcgtgtacgggatgacgctcctgacgatggtcgtctgctccgtcgcgtcaggcctctcgttcgggcgctcgccggcctgcgtcatggccacgctctgcttcttccgcttctggctcgggttcggcattggcggcgactacccgctatcggcgaccatcatgtcggagtacgccaacaaacggacgcggggcgcgtttgtcgccgccgtcttcgccatgcaggggttcggcatcctggccggcggcgccgtcgccataggcgtcaccgcgctgttccggagccgtttcccggcgcccccctacgacgtcgaccccgcggcgtccacgccggccgaggcagacctggtgtggcgcatcattctcatgttcggcgccgtgcccgcggcgctcaccttctactcgcgcatgaagatgcccgagacggcgcggtacacggcgctagtagccaggaacgcggagcgcgccgcggcggacatgtccagggtgctccaggtcgacatcggcaataaggagcagccgggggcagaggaagaagcgacgacgggtacagaggcgcggttgcgcggcgaacaggaagaagcgacgacggggccgccgttcgggctcttctcccgcgagtttgcgcaccggcacgggctccaccttgtgggcacggcgtcgacgtggctcctcctagacatcgcctactactcgcagaacctgttccagaaggacatcttcagtgcggtggggtggatcccggcggcggagacgataagcgcgctggacgagctgttccacatcgcgcgcgcgcagacgctgatcgcgctgtgcggcacggtgcccgggtactggttcactgtggcgttcatcgacatcgtggggcggttcgcgatccaggcggtgggcttcctcatgatgacggccttcatgctggggctggccgtcccgtaccgccagtggacgcgcccgggcaaccagacggggttcgtggtgatgtacgcgctcaccttcttcttcgccaacttcgggcccaacgccacgaccttcatcgtgcctgcggaaatctacccggcgcggctccgcgcgacgtgccacggcatctcggcggcgtcgggcaaggtgggcgccatcatcgggtccttcgggttcctgtacctggcgcagagccaggacccggccaagacggcgcacgggtacgcgccgggcatcggcgtgcgcaactcgctgctgctgctggccgggtgcagcttcctggggttcctgctcacgttcctggtgccggagcccaagggcaagtcgctcgaggagatgtcgcgcgagacggagccgggcgccgccgagccgtaagagaagggccgcccattcgtcctctctggcacctggatgcgtttgcgcgcgcgcagtattaagatttgttaggaatagtcacctagctagaattatattcatagtgtcagataagatagggtcatccaatgtataatgtattaagatttgttacttgtcattcgtcatgcaaaatttattttccaaaactatagcaaaacaaatcagaaa

SEQ ID NO: 1554 - DNA, 2371 bp, Zea mays
gttgccacctacacagcactccccccgtagccatatatagcttgctcgcataaacgtcaaaaaggagactcttttggccctcttccggcaccggcaccggcaccggcaccagcgccaatctagctagtcagtttagcttcgctccttcgcttgcttgcaagtaacagcctctctcgtgtccaaaaagaaagtctttctctggaaaggagagaaggatcatcatcaccaggatcaagaaagaactcgtcgattccttaccccttccgtcttcttctgatctcagctctatccactagctaggagatggacatgaacaacgggtggcttggcttctccttgtctccttcggcagcgagcaggggcggctacggctacggcgacggaggcggcggagcgagcgcgagcgcgtgcggggatggagagggctcttgcccctcgcctgccgcggctgcctcgcctctccctctcgtggccatgccgctcgatgactctctgcactatagctctgctccagattggaggcacggcgcagcagaagccaaagggcccaagctcgaggacttcatgagcatcacttgcagcaacaagagcagtggccgcagcctctacgacagctgcggccaccacgacgacgagcaggccagcaagtaccacgaggtccacggcatccaccccctctcgtgcgggtcgtactaccacggctgcatcagcagcggcggcggcggcggaggcggcattggcctggggatcaacatgaacgcgccgccctgcaccggcgggttcccggaccaccagcaccaccagttcgtgccgtcgtcgcaccacggccagtacttcctgggcgccccagccgcaagcgcgggcccgccagcaggcgcagcaatgccgatgtacaacgccggcggcggcagcgttgtcggcggctccatgtccatctccggcatcaagtcctggctccgggaggccatgtacgtgcctccggagcgaccggcggcggctgcgctgtcgctcgccgtgacggatgacgtcccgccggccgagccgccgcagctgctgccggcgccgttgccggtgcaccgcaagcccgcgcagacgttcgggcagcggacgtcgcagttccgtggcgtcaccaggcacagatggaccgggcggtacgaggctcacctgtgggacaacacttgcaggaaggaaggccagactaggaaagggaggcaagtctacctaggcggctatgacagggaggagaaggctgcgagggcttatgacctggcagctctcaagtactggggcccctcgactcacataaatttcccgctgagccactacgagaaggagctggaggagatgaagcacatgtcgaggcaggagttcattgcacacctgagaaggaacagcagcggcttctcgaggggagcatccatgtacagaggagtgacaaggcatcaccagcacgggagatggcaggccaggattgggagggtcgctggcaataaggacctgtaccttggcacattcagcacgcaggaggaagcggcggaggcgtacgacatcgcggcgatcaagttccgtggcctcaacgcggtgaccaacttcgacatcagcaagtacgacgtgaagcgcatctgcgccagcacccacctcatcggcggcggcgacgcgtgcaggcgctccccgacgcggccgccggacgcggcgccggcgctcgcaggtggcgccgaccgctcgtcggacgcgccgggcgaccaagccgcgtccgacaactcggacacctccgacggccaccgcggcgcccacctgctgcacggcctccagtacggccaccccatgaaactggaggccggggagggaagcagctggatggcggcggcggcggcagcgcggccggtgcccggcgtgcatcagctaccgatgttcgcgctgtggaacgactgttgattgtggcaatggcaacctggttggtagagtacgtagtagttagtgaagaaatgcatgtcattgcacctgcatgcgcatgcgcgagcacgaggtgtaataactttcggcagtagaagtggcggtgaagaagtggacgacacggcctggggaaggacatgcatggcgtactgcctccctgcaagcgagatgcatgcatgttgcacacgctcgccgtttcttcgcaagatggcgacaattttgccgcaatatgtaatgtaatggttccacatgcatgcatgttattcttcaatgaaacaccccactagtagttatctgatttttgtgatgacgttggcaaactaagctcgccagctttttgcggagtagtgatacaaaaacttacatgcatggtcggtgggtgtagtagattgatctaataataaagtgttcatattag

SEQ ID NO: 1555 - DNA, 1329 bp, Zea mays
  misc_feature (1323)..(1323): n is a, c, g, or t
ggccgcatcgtgcgctccgccgccgggcgcaaggaccgccacagcaaggtgtgcaccgcgcgcgggctgcgcgaccgccgtgtccgcctcgcggcgcacacggccatccggttctacgacgtgcaggatcggctaggctacgaccgccccagcaaggccgtcgactggctcatccgcaacgctaaggccgccatcgacgagatcccggccgaccgggtggaggtgcagcagcctcccacggaggcggcagatgccaccgagccggccgagcaggtgacgtcgacgtcgccctaccggttcggcaaccccggtggcgccatcggtgctatggccggctcgttcatgccacattctgtcggcggcgccgatggcggcgtctccggctccgcgaacgtcaagtctttgttcccctcgtcgtcggcagccagcaccacccccacccaggacgagtacaggggctccccgccggacctcctgtcgcgcacgaccaccaaccaccagccgcaggagctttgcctcactctccagtccgctaatagccaccaagcccaccagcagcagcagcagttcttcggccatgtgtccccgaaccagcacggtatgatctctggtgcagcaggcgtccaaggctgggcggcggaacacggccagagaatgccgtcgtggcagcatgcttcggagaacggcgcgggagccggcaatggcggcgacagctacatgttcggcgtgcccccacggcaaggggggctagaccaccagggcgggcagctcttctcccaaggggaaccccttcagtccagtggcggctggccgtctgcggcccgcacttggctcgaccctctggccgcgatccaccagcagccgtcggcgatggctgggcaggtcggcttcagccatctggttggcgccggcggcgggttcatggggttcctcgcgccgccggccgcggcccagcggctccagggccaggaggagcaaggaagcgaagcgatgagagagtgatgaacgtacgtgcttaactacgactacgaggtaaggtgtgcgagcttaacacacacacactgctagctcttcactgatgtgctgctgctcaggtgtatgtcatttcatgtaggagtttgtttattaggtgatgggattttcgcattattagttattagctgctgctgctgcggctatattcgagcgaccgtgtgcctgtgtaactaaggtttaatcaagccgttccctagcttgaaactagacagccgttactgtttcattagttcttgctactgctactaccgttttacactattccatatattattattttttcttcanaaaaag

SEQ ID NO: 1556 - DNA, 1174 bp, Zea mays
atgccacattcggtcggtgccgatgacgtctccggctccggctccggctccggctccggcaacgtcaagtctttgttcccctcgtcgtcgacaacgagcactacccccacccaggacgagtacaggggctccccgccggaccttctgtcgcgcacgaccagcagcaaccagcctcaggagctttgcctcactctccagtctaccaataaccaccaccaccagcagcagcagcagcagcagatcttcagccatgtgtccccgaaccaccacggtagtatgatctccgttgcaggcgtccaaggctggccggaggcgcacggccagagaatgccgccgtggcatgctccagagaacagcggcgcgggagacgacgggcgcggggccgccggaaatggcgacagttacatgttcggcgtgcccggcccacggcaagggttagaccacctgcagggccagctgatcttctcccaaggggaaccccttcagtccagtggcggcggctggccgtcgtcgtctgcccgcgcttggctcgaccccctcgtcgcgatccaccagcaccagccgtcgacgatgtccgggcaggtcggcttcggtcatctggttggcggcgccggaagcgggtttatggggttcctcgcgccgccggcccagcggctgcagctgcagagcgaggacgagcaaggaagcgaagcaatgagggagtgatgagcgtgattagctactactgctgaggcaaagcagcagccgatgcaatctatcagaggggggcaagaagaagaaagaaagcagcggcaaaaggatggagcaaactaaagacgaaataacaaagaacacgaaccgggccggcaggggcagcagggattcaaaatcagttcagtgtccctgtagcagttaggagagtgcaagcgctgtgctgtttgcttctgagttctgactctccatgacgataatgataggggccgcagggcaggcagcagaggaagaagtggcccggggcagacggccgcggtgggggatctgtgtgaactgcgaaagtaatttttagcaggccgaccaaatcattacccgagacaaatgaccgtctccattattggtcacaggagcatcagaacaatgttcgtcttcgaaaattatttacgcagacgagcgttctaaggtgttcattttcaaaaac

SEQ ID NO: 1557 - DNA, 3038 bp, Zea mays
ctgcgcttctggcacgcctgtccgcgtaacgccgttaccgtcggctcacgctgaccacgtcgcaacacgaaacacatgcttgcattccagttccagattccagacacgcgggcccacttcccgcaccaacgcgacgccaccgagcggccacgcttctcctcagtctcccaaacctacccccacggccccacggaccgggaccctcacccccagtcccccacacggccacaccactgcgccgggtccacgcagcagaacccccgcccgccccgcctcccagttgcagcgaagcctcctctggctctacggcgcagtgggtaggtggtttgaccgtgccgggccaaccccgccggccaccgcccggccacctatttaagcccccgcacctcccacgcctcgccggcagcagcgttgcatcagctgttgtaattacgtggtacaggacagtgcccatttgccgttgccgcgtccagcattcattcattcattgccctggccttcttccttcgggccttcccgtgccgtcgcccaacgcctcacctaccaccaccgcccgccaccaaaccaaaccaacccctcggtcgccgacgccgagtgacgtaaacgatggactcggcgacgtcgggggcgatggagctggtggccgcgctgctgcgcggccgggtgccgcccgagctgggcggggacggcgccgagggccgggcgctcgtcgccacgctcgccgccgcggtgctcggcgccgcgctcttcgtgctctggaggcgcgccgccgccgggaagaagcggaagcgggaggccgccgtcgcggccgcggaggccacgcaggccaaggcgagaggcggtaaggccgccgaggaggagaagccggccgacgacggcaggaaaaaggtcaccgtcttcttcggcacgcagaccggcacctccgaggggtttgccaaggcccttgctgaggaggcgaagtccagatatgacaaggcaagcttcaaagtcgtggacttggatgattatgcagcagaggacgaggaatatgagaagttgaagaaggagaagctagcgttgttcttcgtggcaacgtatggagatggtgagccgactgacaatgctgctaggttctacaaatggttcactgagggaaatgagaggggtgtctggctaaatgactttgagtatgctgtgtttggtctgggcaaccgacagtatgagcatttcaacaaggttgccaaggtagtcgatgagatcctgacagaacaaggtggaaagcgccttgttccagttggtcttggggacgatgaccaatgcattgaggatgacttcaatgcatggaaagaagctctctggccagagttggatagattacttcgggatgaaaatgatgcctctccaggccctacatacacagctgcaattcctgaataccgggttgaattcatcaaacctgaggaggcagctcatttggagagaaacttcagccttgcaaatggccatgcagtccatgatgcccagcatccttgccaggctaatgtggtcgtgcggcaggaactccacacccctgcttctgatcgttcatgcactcatttggagttcgacattgctgcaactggtctcacgtatgaaactggcgaccatgttggtgtatacaccgagaactgccctgaggttgtagaggaggcagagaggttgttgggctactcgccagacacatttttcaccatccatgcagacaaagaggatgacacttcactaagtggcagttctcttgctcctccgttcccctccccaatcacagtgaggaatgcacttgctagatatgccgaccttctaaattcaccgaagaaggcttctctggttgcattagcttcttatgcttcagatcctgctgaggctgatcgtctgaggttcttggcctctgctgctggcaaggatgagtatgcccaatgggttgtggcaagtcagagaagcctgttggaagtcatggcagagttcccttcggcaaagcctccactaggagtcttctttgcagctgttgcccctcgacttcaaccaagatattattctatttcatcttcacctagtatggcaccaaccaggattcatgtcacatgtgcgctcgtgcgcgaaacaacacccgctggaagggtacataagggagtttgctcaacttggattaagaatgctgttccttcggaggagagcaaggaatgcagctgggctccgatatttgtgaggcaatcaaacttcaaactacccgctgatccttcagtaccgattatcatgattggccctgggaccggtcttgcacccttccgtggcttcttgcaggaaagacttgctcaaaaagaatctggagctgagcttggtcgatctgtgttcttctttggatgcagaaacagcaagatggacttcatctatgagggcgagctgaacaatttcgttgagcaaggagcactgtctgagctggttcttgccttctcgcgccagggccttgctaaggaatatgtgcagcacaaaatggcacagaaagcatctgaaatctgggacatgatctcccaaggtgcttacatctatgtctgtggtgacgccaaaggcatggccagagacgtacatagagttctccataccattgttcaggagcagggctccctcgacagttctaaggccgagagcttcgtgaagaatctccaaatggagggcagatatctgagggatgtgtggtaaagagcgattggatgaacattcgttcgtattacacacgtgtacaactactaccggaagagcactgacaatggactagatctgatatttttattgcttctatatttatttttattttcttttgcttcgttctcttcaagagctctttgctttctttgcggttctcccaagagttctttgtacctatgtattacaaattctttatatgtataagatgaggacaattttggcaataagcctgtcacgatgttattagtattgccaaataggctttcgtgtgattatgcataatgtataaatgaatccacaaagagtttaggatttgg

SEQ ID NO: 1558 - DNA, 4777 bp, Zea mays
gcggtcgctactatcccggacgcgggattctacggcaagcttatcgtagcgcgaatataaatccagatcccatctgggttaaaggcctaaaaatcgcgtcctcgaaaacctctagtctagttccgaaagcgcgcacacaacgactacaggagaagacacgcgcgacggccacggccaggtagagacagatccatctctcacctcgccccaccgccctcgccgatcggggtccgccgacccccagatcgcttcttcgcttcggtaggtggccgagtgtacgcgtacgaggagcctcccggatcccgcctcgccgtcgtctgtaagatcttctcgcacatctcgatctctctattggagctttgggtttcgtctgtctgtctgtctgtctctctctttgcgaggtttgggttttgtgtcgtggagcggtggaggtgccgtgggagcctttggttaatccagggtgatctctgatctgcgatctgtgttggggcgtatggctctggcgtcttaacagatgacgtgtttttgctgtggcgtgcaggatcggggcgcgatccgcggggaaacagcaatgacggcggaggggacggcgtgcaacggcgccggcgaggcgccgaaggcggaattcgtgcccgagaaggtggtcaccgcgtcgctggaggagaaggcggccggggagcgcgagggcgaggacgtcggcgggccttttgtggtcgtgaacggcggcgattctgacgggcactccgaccgtggctcagatctgggcaaggcgtccggcgaggagtcgtcgtccgaggaggaggacgtgcccggctccaatgtagctccggacttggccgtgggcggagatcacgggtccgcccgaggggaagtgagtgctcagggtgcggcactcggtgcttcgtcggcggacggcagtggtcgtgcttccgacggcgctgagggtggcgcggatgagggcaaaggcgaaccaagttccgattttgatgctgaagcggcgccgcaggaggacgttggtgaagaggacggtggggcagctgctctggcgtccagcgggtgcgaacctgccatcaccggtgctgattctgaggcggcaccagctgtggatgatgaggttgaaggcaaggagggcacggtggatggaagtgctgttgctgatgtcgctgaagcggtggtgcatcaggaagttagcacagagcatgatgatgccctaacgcttcccaagtcttctgcttccatggagtccgaggttattagagaggataacaaagaacagagcaccgctgatattgtggggccacatgagcagggtacatgtggggcaagtgctttggtggagaatgagcatctttgtgctgacatgagggctgattcatttgtagctgttactgagcctgacagtcaagaggattatgctgtggagtcctgcatgcgcgatgatgtcctaatttgtaccgagtctggttctgccgacatcgagtctgaggttaatggaaaggatagcaaacaagaacagagcaatgctgatgtcgtggaggtcatagggcagggtgtagttagggcagatgcgctgatggcaaatgggcatctttgtgccgacatccaagcagattcttctgaagctgctactaagcctgataacattgctaatgagagcaaactgactgaagttgcagaatcaggagaggatgctgctgccagtggagaactggatgccatcgatgcatcatcacaaaccaatgggcatatttatgttgcctcgggtgctgattcttttataattgcttctgagtccaagtctcattcctttgagacggatggacaagaaactgatcagcaagaagaggaagttccacaaactgaagctgaactattggatggagtgctaaaaccaactgaaaggaactgtgcacgcagtgttgaggaactcataggagaggaagttgacacagatgggcatcccagtgtagacggtacagctgatgcttctggggagcaagaagccaagcccatgcaggtagaaggtgaggccacatgtggtattctcgaatttgaagaagtggataaggatggtgaggatagtttgtgtaatgactgcatggttggtgttgtttcctctaatgaggaaacagagcttcctatgaaggaaagaacagatgaagctgtccccagtgttaatgttggcgagtcagagcaagtaactgaggatacaagccaagatatcatgcagggtggattggccaggggagtttttataggcacaatttttgttaagccagtatcagatcctcatgttgaatcaagcctcgtacataaagtcaaggcagaagttcatttagttgatgaaatcacagcagcagatttgaaagctgaaaatatggtcgaagtgaaaagaacagatcgtgaagttgacgaaatagaggtaaaagcgccaggtactcacgaaattgggaattcttcagaagtagaaccgaaggaagagtttgagatggaggttgatgatgctgtttcattgcatgaagctgcagcttctgcatcagaaaatggttctgaagaaaaatctagcaacattgctgttgatcaagttgaacctgtcaacctgaatgtagatgaactcgcggtagatgatgatcaacccagttttaatccaggttatggatctgctaaatcttctgatgtggccgaaacaaaaaatgtggaagcacaagtgacagaacagaagggcaatgcacaccatgcttcaggtgagtggcatggagatcatacgcaagtcattggaccacagaggatctacataattaaagttccaaaatttgccggtgatgatctctgggataagatccaggctgcacaggctcacttagaccaactgacccaggaaagagacgcaattaaccgccgtaggcaaaaacaaaaggctatatgtgatgaatacagggagaagtttgaggcagcacgtcaagaagagcgggaagcaagggctgcccatggagataagaagaatgatttaaacagtgtgcgctcagtattagagaaattgcaccaagcaaattcagttgaagaacttgatgagcttattgcaaagaaagagaggattatgcaacatgagaccatttctttgaaagaagaaaagcttttaattaaagagattaatgaattaaaatcccaacggaagcagctgtccgccaccatgggctcaaaggctgaaatcaatgaggcatttgaccaaaaagatcacattcatgagcggcataaggtgttaaagaaggattctgatgttttattcagcaacctgaaagtcctagaggagaacacaagaaagattcaaaaatcttttgctgatgaaagaacagctctcagaaaattaacagaggaacaccgagcagctaatgaaatacgtcaaaaggcctacagcgattggactgagcttagatcagagcccagcaagaagaatgaatactttttcaagtacagggacgcccgaaatgcagcagaaaatttcagagccaatggagatataaatggacttatatcacactgtaatagtcagattgagagagttatggaaatatggaacaaaaacgaggacttccgcaagcagtatgttgaatcgaacaaggttagcacactaaagagattagggacccatgacggacgaaaacttggccctggtgaggatcctccggtcattccaagccgaagaccaagcaacatttgtccattgtctgcctcaagcccggaaatgatcaccttagcttcaacaccagcacctgtattggctgctgcagctgcagtcccttccaaagagaactcctttcctgctttggcagcccctcagaccagtaagcgcgccaaatcaaaagcatctggtagctctgcccagattaagaacaaatctgttatagtatcagaggaagaagatttggaacagactttaaaggagaaggctcatcaattggagttagctaggaaggcagaggagttagataggaaggcagaggagttggcgcggaaggaggaggaactaagaaaagagagggatgcagctgaaaaggagcggcttaggatggagcagaaggctaaggctaaggaggctgaggagaggaagaggcggaaagcagagaaggacaaggaaagagccgagttcaaagcacgcaaggaagctgaggagagagagaagaagaaagcaaagagagacaaaaagaaaggcgcagcaccagcagattcgagcgccattggtgacagccatgctgctgcttcggctacagcagatactgacagtaatgcatcagacaacccaagggaagctgacgtttctcaaccagcggtggctcccaggaggccggctagaccagcggcggcaatcaagcaactgaacaggttgcagcccatgccagcgcccctgcgtaacaggggcaggaggaaactgcggcagtacatcctgatcgcagcggcggtgctaacggtgctggcgctgttcgtggcaggcaactacattcccaggctgaggtcgcactcctaattttatcgttaggaaaggagtgccagttctgtcgcggtgaacctggtggtggttctacctagaggattcttcttttttcgactgttcgggttggtttgtatttagcttcccttattataggtttgtgataaaagttattaccggatggtggtgaaatattcgttagaacatgataataatgactatagattcttttttgtacataggtctctggtgctaaccttagcgtatatgatatttaatcatattctatgg

SEQ ID NO: 1559 - DNA, 3097 bp, Zea mays
ctttggcgtctttgggatcctggctcgctctcttttcccttctccggttctcccctgaaagcgagcagcggatagataaagctcgggtcggctttggtgccacgtactggccttcttccccttcgctctgacactgttcctcttccctcctcctcctcctcctccccccacccacctcctcctgctctttccccgtgtgtccgtcctctcctccccggcgggcggccatgactgctgtggcctccctctagcctcgctgggcggctgctgtgccagctctagaaagatacgacagctgttggccttcagctgctggcgctgctcgactgcactgcacaccatagagaggaagggagagagagagagagggagggagaggcagaggcagaggcagaggggggagtgtgtgtgtgcgtgtctgtgcctgccatgtgtgatagaaagaatctggaattgctttccaagtcattgaccgcccagttccagtttccttccccccctcgttttgtccccctcctgagcctccttgattcctgtgttgcttgctgttcctccctccctccctgcctgcttgtgtgtgttgttgctgttattccctgcttggctgttcatgcatcaagcaagctccccagcatctttctctcccatacatacccccttgtctgatgcctgcttctgcttctgcttgcccatcccctccttcattcttgacgagttaaatgcatgcctttcagcagattgctgcacacatccctctcgatttattgcctgccaccacacccctttttcttccgctatcttccttctcctagctagctagctaggtagacacacagtcacacacacatatcagtagtggtgtgtatatgatagtatacagcaagtgcaagatcatcaggcgaagctagctactagccgccctcctcagctcggaggcggcttggacttcacctagtatgttccaccatcagcaggagctcctacaggcagaagctgcggcggcagatcgggagagcagcatgtccaacaacctcacctcctccgcgcccggcggccccaacgcggcgccagctgctgctgcggccaccggcaataataacaagcgaaagcggagcctcccaggcaaccccgaccccgaggcggaggtcgtggctctgtctccggcgacgctgatggcgacgaaccgcttcttgtgcgagatctgcgggaaagggttccagcgggaccagaacctgcagctgcaccggcgcgggcacaacctgccgtggaagctgaagcagcggggcgcgggcaaggaggcgcagcggaagaaggtgtacgtgtgcccggaggcgtcgtgcgtgcaccacgacccggcccgcgcgctgggcgacctcacgggcatcaagaagcacttcttccgcaagcacggcgagaagaagtggaagtgcgacaagtgctccaagaggtacgccgtccactccgactggaaggcgcactccaagatctgcggcaccagggagtacaagtgcgactgcggcaccgtattctccaggcgggacagcttcatcacgcaccgcgccttctgcgacgcgctcaccgaggagagcgccaaggccatcggcggcgtcaacgccatggcagcgccggtgcaccaccaccaccacccgatgctcttctcgccgccgcccgcgcacgtcatgcagcagcaggacgtcctcctcctccaggagcatcaacaccaccagcaccagcagcagcagcaggaggacgatgtcatgcagcagccgccgccgcagcagtgcaactacgccatgaagacggagatgccgccgtggccggcgatggcctacgaccacccgctgctgcagccgctctgcaacgccgccgccgcagcggcggcgcagggctcggcggccacgtccgcgccgcagctgcccgcggcctccgcgcacctgtcggccacggcgctgctgcagaaggcggcgcagatgggcgccaccatcggcggcgcgggctacacccagatggcgggtcccgcgacgagcgccaccgccgccttcggcctcggcctcccgggcctgcagaatgcccagcaccaccacccgcagcagcaagatggcggcggcggggtcatggcggccgggctcgcgaggacagccagctcccacggccgcggcggcgacgaaggcggcggaggcggatcaggcgacggcatgaccagggactttctcggcctgcgcgccttctcccaccgcgacatcctcggcctcgctggcctggactcctcgtgcatgggcgccatcaccgccagcgccagcatgggctgctacgagccacagcaacaacatacacagcctcaggcgccgcagcagcagcaaagcagcaacgaaccatggcacggcatggggcagccatagctagcttaggtcgtcgctacccattctggcaccaaagctactttctgtgcgtcttcctctcatcagccgtactacatcgccgtcgctgcttcaattctgattatcgctgccgccgcgcgcggtgcagaggcaaaactagctacggccggccgcccagagtgcaacgcgtggcttttgagtcgggtaatctcatcgtctcccgcccctcacttcggtcatcttttgctcctgttcatgctgtcatcccgtctgaacttttaaccacgcaatgcaagcaagcctgcaagctaggatgaggatgatagattggattggataatacacaagtacgcagggagttgtgtaattttttttcaggttggggaagaagatcgaccaacatgtaaactaataagctcggttcaattaagcagatgggaagaacaccatagctacgtgacagtaataataatacatgcatgcgttcatcgtctcttttgtctggtcactacatccatccatgtgtgcaattttggtgatataaaagtttctctttttttcccaaaaaccagtattatttggtggcattgacttgagagagtagattgtgaatgaactggagatggagtccttggtgtagtatagtagactgcaggatccgtagatgagctgaggtgcattcttgggtctacgagacatgcatgtgtggcctaccggct

SEQ ID NO: 1560 - DNA, 1939 bp, Zea mays
tccaaagttgaacgtgagctcgagatagaacatggcccagctcagccccgagccgaccctgtcttctccgttcagcctccgccctccgctctgcctctgcgtcttccaccctttgccatttgcttgcaatgtctaatacctgagtgagagagcttcctcagtccatggaggtgtcgtcgaggctccaaagcctcctcagacccttcctactctgccgctcccgcgccgcagggatgaccctccaaaccctagctctttgctccccgccgcctcctccgcgcatcccatcttccttcctcctccgaacgcgccgtctacctcctccctttccccatggcggcccatcccgtcttcttttccacagcaccttcgcctccgtctccccggcccccgcccctgctccagggagggaccacctcaactccaaggaacagggacccccgcccgcgcccttgcctccgccaccgccagaggagctcgcctccgaagacgagtcctactaccacgagcaccttctcgaagtggcgcaggagaaccagtcacgggtcgtccccgtcaaggcattctttctatgcaccagcatcgacctgcggagcctgcagtcccagaattccttcaatgtcattccacccacatcgcgtgccaccaactacgttgtccttagatactacgatgtcaagggagaccccgagggttttaagtctggtgtcatagatgagagccattgccactacatggtcgttttccaatatgggtccattgtgctgtttaatgtttctgatcatgaagcagatggatacctgaaaattgttgagaagcatgcatctggtttacttccagagatgagaaaggatgactatgctgttgttgaaaagcctaccctagagacatggatgcaaggtggtcttgactatatcgtgcttcgggatctgagtattgatgggatccgtacaattggaagtgtcctgggtcagagtattgctcttgactactatatccgtcaagtggatggaatggtagctgagttcacagatatcaaccgtggaatggaaaaaactggtaccttcactatggagaggaagaagcttttccagcttgtagggaaggccaactctaacttggctgatgttattcttaagcttggactctttgagaggtcagacatagcgtggaagaatgcaaactatgctcagatctgggaataccttcgagatgaatacgagctaacccagagatttgggaaccttgattttaagttgaaatttgttgagcacaacatcaggtttcttcaggagatccttcagaacaggaagtcggattttctggaatggcttatcatcatcctgatcagtgttgagatcttgatatctgtttataacataatacaggagcagatgtagggctttgttccatcctgaacacgagatgcatatgttttgaccgtggattctgtgatgccctgctgccgttggcacaacctcgatttgtaaagaaacatacgtactagagactggatccgattcgacctctatactccttataaattaattcctcagacatatggtttggtgattgcatttgcatgttgtcagtcagtcagctgtcctttctactggtaaaggaatgtcaccatgttctcgtctgcttgcccactcaaaagtgctgatgctgggcaggtacccttctagaaattgaatgtgcttattagtttactttgagtcctgtagtgtcatgaggtggtagcctagagcatagaggttcatatggataggatcagggttaagattagtagataaagattagataagattaagttagttatttgggattagattaaataagattgagttagttacttggtagccaagtcttcctatctatataaggatgtgttgtacctccttaagaaaaaaagaaataaagaagaattagtcataga

SEQ ID NO: 1561 - DNA, 657 bp, Zea mays
atggaaaagctcgaccccaatgacatgacaattcgagctggccctggaaaggagctgaaaataacaaaggatacggtgcacctaattttgggtttaccgaatgctgggggaggaactgcattgggcatcgatgaagctgttgttgccaacaatttgagagctgaacttgggctatcgaaagaagattttggggttacagctcaacaagatcgtttgaggaaaggttctgacgatgatttaagcatcagatgctttttcttgatattgttcaataggttgttgttccctactgccagctggggaataacgaaccatgaggttcttttaaccgagcagatggatcgtttccaccagattgactggtgtcagcttattttcaatgatttatgccaagctgccaagaagtggcataacaggagtgttacgaacgtttctacaaccatctatggatgttccatcgttattcttctgtattatttggatcatttgcatgactcagcggcacccctgaacaaacgtggaacaccacgaatcaaatactttgataggaatattattcaagccctgacaagagctgacaagggcaagatacgcaaaggagaagaagcatttggacattgctcggtattttttcttatgtgtcaatcatttttttag

SEQ ID NO: 1562 - DNA, 262 bp, Zea mays
atgtacaagtcgcgactgcaggagctgtgccagaagcggcgatgggcgtcgtcgttgtacgagcctacccgagagggtcctgcccacgcgcccctcttccacgccactgtcatcgtgaatggcgagaggttcagttcccgggatgaaggggagaagtcactcaaggaggcgtacaacctcacagcgatggccgccttcgacaatctcatcccgctcccggccgtggcccttgccccggctgctccagcgccgcccccatccg

SEQ ID NO: 1563 - DNA, 1867 bp, Zea mays
caggcggacagttggacccgaggcatttgccaagattgctcctgcatgccctgccatggcacaccccatcaccgtccgtaacctgttcgacgcgatcaccaactccaccggaggacggctgcatttccttatctaccacaagtatctcagaatcctgaacgaggcgttctgctctgcgaagcgtgtgctaggggggcacagagccccagccctccagctctccgacgacgaagtgatccttgacatccacggcgctgcgacgaccaagccagttctccagcacatcggcacgtccacatggcctgggaggctcacgctgacgaaccacgcgctctacttcgaggctatcggcgtcgatttctcgtatggagaggccgtcgtgtatgatctggcaagggacttgaaacagtcggtgaaacgagagtccactgggccatggggtgctcacctcttcgacaaagctgtcatgtacaagtccagcctgacaagtgaacccgtgttctttgaattcccacaattcaaaggccacacccgccgagactactggtttgcggccatcaaagaggtgctgcacgcacacaagttcatcaggaagtacaagctcgccggtttccagaaggcggaggcgctctccgtcgcaacgctagggattctgcggtaccgcaccgtgaaagaggggttccacatactgccggcgcatttcaagaccatcctcgccttcaacctggcggagaaactgcccaagggggacaagattctggaggcactgtatggccagctcaagcagcactgcccgaggttcagaggaggccaggatcttggccagagcagttccgaggaactgatgcttgctgaccccttcccgctctctgcgtataccatggtgacgatgggtttgctgaagctgaaagaggaggacaacgccgaggagagggatttcgctgtgcgtgacgtgcagattggagggactagctcagttcagatggctctagagcgttcggttgggtattcgggtagagtggaagcggcaagggctacgcttgatcaggtcagagtggaagacatagacactaatgtagctgtcctaaaggaactactatttcctctgattgaaataggcaaaaggttgctcgctttgtctgggtgggaagagcccttcaagtcttatgtcttcttgttatgtttcctctacatggcttacagtggttggatctggctcatgtttcctggcttcttgcttggctctactatcttcatgctatggaacaaacactataggcatgggcgctcggtaggagcgtttgagatcataactcctcctcgaagaagaaccgtggaacagctcttagctctgcaacaggccatctcgcagctggaagcgcacgtgcaagcaggaaacatttttctcctgaagctccggtccctcatgcttgcagcgtttcctcagagcaccaacagagttgcagctgcactggttgctgtggctgcgatattcacgttcgtgcccttgaggaccatcgttctactaatccttctagaagaatacacaagacagatgccggtgaggaagaagagcagtgagaagctggtgaggagattgcgggagtggtggctccggatcccggctgcgcctgtacagcttgtaaagcctcgggagacgaggagatggagatccaggttgagatgagataagtaagccaaaaaatgttggtttgtttgcttttagttttacaccatgttccgtgcacattctttgagcggtagggatcttggtatcacgccttcaagtgaaagcaagaccttggtgtaagctgggactggttttaacaagcagaaacagatgaagaaatcgtgtcttattcggtgc

SEQ ID NO: 1564 - DNA, 1602 bp, Zea mays
agcctcccggaccagaagctccacgtggcgcgacagctcgtctctgtcgtctatggcggcggcagaggtgtactcgccgatcgcggcggcggcggcgcagcagcggcgggagaaggcgacgtcgcagatctggcgggcggtggtggggtggtggggtggatcgacgaaacgccgctcccgccgggctcccgcctggacgtccgcgcctacaccaccgtgctgcacgcgctctcccgcgcgggccagtcaaacttcctcagcacaaaatttatgatctctaacatgcagccgccttataatggggctgtagtccctcatgctggccggacaaatcggagattcgactccaggaatgtctccctaagggaggtctcccctaaagtgccaactggtctgcaattaggggatgcaagcaacttggggatgagcgacgaggagctcatggagcagtgcgatatgggcacgttcaaggcgtctggccccggcggccagcaccgcaacaagcgcgagtccgccgtccggctgaaacaccttcccaccggcatcatcgcccaggtcgttgtggaggatcggtcacaacataagaaccgagcgtctgctttatctcggcttcgaaccctgattgctcttaaagttaggaggccgataaacctggaagactacactccacctgttgagcttcttcagatattacccctgaagtacagcgttagaggaaaagatgttggcccccaaatcggtccaaataactcaaaattttctccagaaatgcaagcattattagacctgttgtttgctgttgaaggttctgtatcagatgcagcaaagattttaggcctaagcactggtgctttgtcaagattgattctgtcagatgattctctccgaacggccgcgaatgaactgcgagcttcgaagtctcatgaactctcaattcttattagtggtacttttatggcgatggaatcccaagcagaggcactcgaccagttagcaactgatgatttattagaaggaaagtttgcactgcttgagacttcatctgttgatgatgatctttcacaactgaaaaaggaattgtctggaagctctttggacgtgggagaacctggaacagctgtggagaatgctactatttgtacaaatagaagatataatgcggactacactacctgggcttatttcatcgcctttgctataactcaggggcacattatggaagatcatagtgttgacaccaatactcgagaaatactagaaatccctgtactgtggtttttcttcaacctgctttggtggcagggtgccattttaggagcatatgagattctctttgtttctggtgtcttgctgacccttgggtcaaaaccaactgtgcagttcttcactaagcctaaggatcacaagtgtgactcatcggaacctgatttatgtgattcgggatgcaatggtgtgcagatgacgcgtccttcagtcatctccaaggctggtggccttgaaagagagaaggattatcgttacactgggagtgatggtaaatgcaagtttgacaagtctaagattattgcttcaattcagaacttcagtgttgtctgtggatga

SEQ ID NO: 1565 - DNA, 1255 bp, Zea mays
cgagcgcgcaaaagcctggccgcctcgagtgctccggtgctccccgatgccctcaagccgaaacccgcccaaaaccccggttgccccaaacccccaatcccttaccgatccccaccccaatggccaccgccaccgaatccggcagtgcgccgccggtcgacggcgaagtgagacagcgcggccgtccccgcgggagcgggcgtgggcgtgggcgtgggcgtgggcgtgggcgcgagcgctcgcagagcgcgaggcggagcaaacgcccgcggaagccccggccgtggcggtccgcgtcgccccccgcgctggagccgctagtgcccttgcctccaggcaccgaagtcgaggtccgcattgatgacgacggtttccacgggacctggttcgaggccaccgtcctcgacttcgcgcccgcgcgcggctaccgcaaccccgcgcgctacacagtcaagtacgtgcacctcctcgccgacgacgagggcgcgctctcggagcccttcgcgccgtcccaaatccgcccgcggccgccgcctctgtcgtccccgccgcgcttccaactccacgacatcgtcgaggctttccacaacgaggggtggtggtcgggcatcgtcgtgtccgcccccgacgccaccggcgccggggtcaccgtctcgttccccatcacccgcgaggtcatcgagttcccgtccagcctcgtccgcccccgccgcgactacgtcgccggtgactggattccctcccgggccgcgatggttctccgccccaaccgcgcggtcaaggtctatgaggtcggagagaaggtcgaggtgctgaggaaccgggacgtgtacggcaactcctggttccccgccacggtgagggttgtcatcgacgatctcagctacgtcgtcgagtacttcgatctggaggaggggaagggcggatcggagaaggccaccgagtacctgcattggtggttcatcaggccagctgttgagcattcgccaagcaagcgtgagttccagctccggcctggtgctgccgtggaggcctactgtgatggggcatggtcacttggagtggtgacgagggtcgtcggagaggatgaatatgaggtcggtattattggcaagaagacgagactgctggtgaccaaggttgtggaattgctcaagccacagtatatttggaatggcaaccaatggaggattacaacagctaagggatattgtgcttcatatgatttgtagtactctccagcttctgccaaagc

SEQ ID NO: 1566 - DNA, 1666 bp, Zea mays
tcattgccttctcgcttgcttgattgccttcggacttgggttagcatggatggaggcagtcccatgcagaccgtgctgtcggcccccggcgtcaaggacaagaagctggtctccttcacccgcaacgacgatgcgaccaacgacaaggacgccgtcaccggcctcatccgatccatcgtcggcggcgccacgccgtccagccccgcgcagcggacggccttccacgtcttccacatcaacaccgtcgtcgacctcttctcggcctggcgccgcgggctccccgacgtgcgcccctactacgccgtcaagtgcaacccggagccggcgctcctgggcgcgctcgccgcgctgggcgcggggttcgactgcgccagccgcgccgagatggaggccgtgctggcgctcggcgtcccgccgggccgcatcgtctacgccaacccatgcaagcccgagccgcacctcgagtacgccgcgggtgccggcgtcagcctcgccacctacgacaccgaggacgaggtggccaaggtcgcgcgctgccaccccgggtgccagctcctgctccgcctcaaggctcccgacggcggcgtcagcggcggcgacctcatgaacaagtacggcgcgcacgcgcacgaggtggcgccgctcctgcgcgccgcccagcgcgcgggggtcggcgtggccggcgtctccttccacgtcgggagccccgtgtcccgcgtcgacgtgtaccgcggcgccatccaggccgcccgcgccgcgttcgaccaggccgtcgccctcggcatgccgcccatgcgcgtcctcgacgtcggcggcgggttcacggccggcgccgccttcgacgaggcggcggccgtcatccgcgacgcgctcgaccggtccttccgcgacctgcggccctgcgtcgaggtggtcgccgagcccgggcggtacttcgccacgacggcgttcacgctcgccgcgcgcgtcatcgggaggcgcgcgcgcggtgccgcgcgcgagtactggatcgacgacggggtctacggctcgctcaacaacgtgctcatggaccacaaggctccgcgcccgagacctctggccagctgcccgcgccccggcgaggagacgtacgcgtccacggtgttcggcccgacgtgcgactcccaggacaaagtggtcaccgggtatcagctgccggagatgagcgtcggcgactggctcgtcttcgacgacatgggcgcctactccacaagtgccggatccaggttcaacggcttcgactcgtcggagattaagatctacgtggcctattccagctgagcaatcacatcaatggcggcgtcacgatgatacatataatgatatccgtgtttaatttatttgcacattagattaattaactagtgattcctccatccaaaaaataagtgcagccaaacgatatcaagtttaactagattatactattaacatttatttgtatttctaaatagaattaaactaaaatatatgacgtgattagtgtaatgatgattgtttgttattataggtcttagtatatttttttatatttggtcaaacttaagtttgtttaatttctcacaaaatatcaaatgatggatatcgttttcgcacgacaagctacgaccaaagtcaacccaatcgaaaaaccacgctgaagttt

SEQ ID NO: 1567 - DNA, 790 bp, Zea mays
atatttttggttggtccttgagctcacttggacagagtgcggcttgccgacccagcagtatgtgcaggtgcggcccggccgaagatttggcgcacgcacactcaggtagcccagtggctggctccactgccagacgcgctcggctcggctcggcgcaccaccaccccgaggacacggagtgagcccgactgcccgagcccgtataaatcgacgctgcgaggggtagcgagccgcaccgcaccgcaccgcaacgcgccaccgatccaccccgcgtcctcggcctccctccctccggcgagcggcggcgcgggcggccatggaggtgttctactacgtcgtgttcggcgcgctggccgccatcgtggcggggctcgagctcggcaagagcggcaaggaccgcgtcgccactacctccgccttcaactccttcaagaacaactacgtcctcgtctactccctcatgatgtccggggactggctgcagggcccctacgtctactacctctacagccagtacggcttcgacaagggcgacatcggccgcctcttcatcgccggcttcggatcctccatgctcttcggcaccatcgtcggctccctcgccgacaaacaaggccgcaagagggcctgcatcacctactgcatcagctacatcctcagctgcatcaccaagcactcccccgagtacagggtcctcatgatcggccgcatcctcggaggcatcgccacctcgctgctcttctccgccttcgagtcctggctcgtcgcagagcacaacaaggtacagtaa

SEQ ID NO: 1568 - DNA, 1353 bp, Zea mays
gcagccctgtgcatgcagcacaccctgcacgcgctgccattcatacgcccatgctccacaggtccataaataaacgacagccagttcgttcagttgcaattgcaagcagcacaagctagtctccaagatgcaccgctccttcctcctcgtctgtgcactcgtagccaccgcgctttccaccgacaccaccgttgccgccgcccagagccagagccagagccagagccagaggtcatgggccgaactcagcgggcgggacaactgggacgggctcctggacccgctcgacggcgacctccggcgcgccgtcatccggtacggggagctggcgcaggcgacgtcggacgcgttcatcggcgacccggcgtcgccgtacgcgggcgcgtcgcggtacgcccccggcgcgttcctccgcagggcgcaggcgcccgacccggacgcgtacaacgtgacgaggttcctgtacgcgacgtcgagcgcgcgcgtccccggccagttcatcacgcggccggcgccgccgggggcgtggagcgccgagtccaactggatggggtacgtcgccgtggccacggacgccggcgtcgcgaggctggggaggcgggacatcgtggtggcgtggcgcgggaccaagcgcgccgtggagtgggccaacgacctggacatcacgctggtgccggcggcgggcgtcgtcgggcctggccccgggtggtcgcagccggcggtgcaccggggtttcttgtccgtgtacgcgtcgaggaactccacgtcgcggttcaacaagcaaagcgccagagagcaggtaatctagttttgactcctccctcgtgtgctttattcgccgacacagtctctctagtgtttcctttccttgtgtccttccattccatggcacaatagccactgactgatggccagtaattttgcggtgactttcgtaatttttttgcatgcgcacgagataggacaaactggagtgccgttgtggcgcggtttgttcacacgtttgcatccaaatgttggaccttttgtgtcgtcacaataaatggttgagattccgacagtacgtacaggtagtagctcgtagccccgtatgttttttaggataccgacagagacatttgaagagagcaagcttctttgtttcacacgctgtaggggactggcaaatgatttggctggtgcgttctagtagccatttgtgttgataggaacatgcattttcatcttgtatagaatcttgtaggaacgggaacatcttaggtgttggtgtccacaagaatttgccgagaagcaacaagacagtacgccgcaaactgtttgtccgttaatgataggcatagggtggacgacgaa

SEQ ID NO: 1569 - DNA, 1758 bp, Zea mays
tcatcgcctgcattcctggtacggttgttgtgttactcatgtatgtatgtgtcgttcaattcatcaatcaccacagcgcccagcgcgaagctgttgcccgcaagcaacgtcatcctcgtccgtccgtcgtccttgcgttgttgctgcttccatgcagcaacgcgtctccatctcgcgctactatataaggacctccccggtcgtccccatggctacaacacctcatcatcacaaacacagccagccagccatcactgatcatagcatcagcagcttagtataccgtaccgctccacatccccgagctagaagaagaagcccggccagtacctacatctgcctagcggcgcgagcgaagctagcagagatggcgagagcgctgccgctggtgctcgcggcgtccgtcctgctggcggccgccgcgctgctgctggccgcggcgccggcgccggcggccgcggtcgacttcggcgcggaggacctggcgtcggaggaggcgctgtgggcgctgtacgagcgctggcgcggccgccacgcgctggcgcgggacctgggcgacaaggcgcgccgcttcaacgtcttcaaggccaacgtgcgcctcatccacgagttcaaccgccgggacgagccctacaagctccgcctcaaccgcttcggcgacatgaccgccgacgagttccgacgccactacgcgggctccagggtcgcgcaccaccgcatgttccgcggcgacaggcagggctcctcggcgtcggcgtcgtcgttcatgtacgccgacgcgcgcgacgtcccggcctccgtcgactggaggcagaagggcgctgtcaccgacgtcaaggaccagggccaatgcggtagctgctgggcgttctcgacgatcgccgccgtggagggcatcaacgcgatcaagaccaagaacctgacgtcgctgtcggagcagcagctggtggactgcgacaccaaggccaacgccggctgcaacgggggcctcatggactacgcgttccagtacatcgccaagcacggcggggtggcggcggaggacgcgtacccgtacagagcgcgccaggcgtcctgcaagaagtcgccggccccggtcgtcaccatcgacggctacgaggacgtgccggccaacgacgagtcggcgctcaagaaggcggtggcgcaccagcccgtgtccgtcgccatcgaggccagcggctcgcacttccagttctactccgagggggtcttctccggcaggtgcgggacggagctggaccacggcgtcgcggcggtcggctacggggtcaccgcggacggcaccaagtactggctggtcaagaactcgtggggccccgagtggggcgagaaggggtacatccgcatggcgcgcgacgtggccgccaaggagggacactgcggcatcgccatggaggcatcctaccccgtcaagacctcgcccaaccccaaggtccacgccgtcgtcgacgaggacggctccagccacgacgagctctgaattgcgcactacactactacgtactagctatagcctatatagctatactatgattgatccatgtatgctcggacaggaacatcgccgactgtgaatgtctgaatggcatacgcacatcgtacacctgcattcatgtaataccagtcgagagttgatctaccagcaactttcatttcattcggttattattatattatttaactactgcttcctccgtccatatcagtttgtctttttgattttgtcctaagtcaatc

SEQ ID NO: 1570 - DNA, 1596 bp, Zea mays
ctctagaataacatctgatgtcgagaaagttgagcccacagagagcgaaattgcttggaagcacgatcatttgactgccacgagagcatataccctggcgtcatctttggaatgaggttcccaattcagtacggtggcaggcggagcagcacaggacaggacagccagaggccgggagcagaggaggcggtcgtggcgagcggcgagccacaggcacgggcacctatcgttgaattgaacgaaaggagagcgggagaaagcgactcgtcactcgtcagtctctcgtcctcatgccgtcgccgctgggtggacgaatccaattcgggcctggcaaggctggcatgccgtcggcctccctagctcgccgcctcctctctactatatcatctccagcgatcccttcacgcagtaccagcaccagcgccagcaacagcaacagctgtggtttcagcacaagaagggccaggaagaagcgcagctgcgtttcttggacggtgagcgcggctactccggcggacatggcgaccaacagcggcagtgccctggcgaagctggcgccgctggaagccatcctgttcgacatcgacggcacgctctgcgactccgaccccatccacttctgcgccttccgagagctcctgcagcaggccggcttcaacggcggtgtccccatcacggaggagttctacagcgccaacatcagcgggggccacaacgacgacctcgccaggtcgctgttcccgggcatggatcaccagaaggcgatgcggttcatggatgacaaagaagctatgttcagaaagttggcgcctgggcagctgaagcccgtggatgggctgcaggagctgtgcggatggatggaaggccgcgacctgaagcgcgcggcggtgacgaacgccccgagggcgaacgccgagctgatgctgtcgctgttgggcctcaccgacttcttcccggtgctcgtcatcgggagcgagtgcgaccgggccaagccgttccctgacccgtacctcaaggcgctccagctcatcggcgcatcgcctcaacacaccttcatatttgaagactctgcatcgggggtccgggccggtgtggctgccggagtgcccgtggttggcctgacgacgaggaaccccgggaaggtgctgaaagacgcaggggccagcttgctggtcaaggattttcaggacccggagctgatgtccgtgcttcaacaggtggaggtcgaacccgcagcggcgaatgcgcaaggctgatgcgtcggtcactgcggacaactaagaaatgaaatgtcgtgctggactagccttcagcgattctttcagagtggaatagctgtgtaactgcatcgtgtaataaactaactccggtcggttcctcggctggaacctggagactagcttcttggtggattcaaacagggcccaaatagaccctaagttaagggaggtttcctgtgcccaacaataatgccttactagtaattagcgcgcgtcttacgcgcgtaaaaagaattcgtaatttaagtgataataatattatattattttaaataaaatgtacataaatattttataatataagtgataattcagc

SEQ ID NO: 1571 - DNA, 2729 bp, Zea mays
aaaaattaatcccaaaactattatatatgaacttgacaggcaataagaccatcagcttacctatattcaaactgcacactataaataatacgatctacaatataaaaaagtacagtagttcacccatatatgatcactacaaatacaatgtaaaaaggtacaatgtacacccatatatggtcactacaaacaccttttggactatttttgtagtgtagattatattattcataggtcactatgaacaccttttgcactattttgtagtgtagattatagtttaaatatgggaaagagtaagctactgatggtctaattctcaacccaccggtatcagcttacccatcgcctttactgcaatcaattcccacaccaccatggatttgaaacccttttggaaacttcattttcccaaaaaaaaaaaagaactaattttccttaggaaaccttggaagaataagttcccaaactagccctaatcaaattgaaaatagaaaatgaaacttagcaaaaaaaaagcaacatgaaattgatctccaggggaactcatgctctcgtgcccctagctaaatggatgaattgaactgccaagaaataaattgtctaactgcatgtacagtaccgtcaaaaagcagtaagtataagtaaacctgggcggtacgttctcaaacagtcaacagggcaaagtaaccaatcaggccgtccaacggtagcaaaatcagttccatcagcatcaccattattaataaagcacactataaccaatgagttccacacatctccacagccacgattcaagcacaccataacggatcagttccccatcagcgtagccacgattgaagcgcgccataatttcggttgatgaatagtggaatccatcatactgcagttttgcaaccttctctacacacgtccgccaattgctatggttcaaacatgctaacagacttacaagaaacaagtatccctattgacaaaacatgataaatacaaatgaaaaatgcttagacgtagatacatatggatatctccaacattagtcccaaagcaattagtccagactgaattgtagaaaatgtaaacaattatctaacattaagtctgaaagcaattaaacgagactgaatattacaaaaatataatatagaatatagaatgaaataaaaaagcagtgaccttttcaaaataggagattcacgggaaaaagcaacataaaaataatatacaggggaacacagaatatagaacaccaagcaaaatggacgaatggaactgccaacaaataaattggcaaactgcagacacatgcaccgacaaaaaacactaagtataagtaaacctcagcggtaagttctcaaacagtattacaacacggaaaagcaaccaaggtcaagccgacgtcaacgggagcaaaatcagttccatcagcatcaccagtataaccaatgaggtcaacacatctccacacagccacgatccaagcacacaataaaggaaaagttccccataagagaagccacgagcgaagcacgacataaaaacggttgatgaacagtaaaaaccatcataccttgggaatcgcgtcgtagctccatgtatttgttgtagatctccgtgctcgatgcaaaaatccggcgtgcgtagcggaccaacaggagcggaagcaacgcatacaggaacacggaacaagatgagggaggagaacccggggccaaaaacatcaacccccgtgccatctcctcccccggcacgcaataatcatctttttattattgcctggcctgccatgcgagcgcacccatcatggcaaaggcctcctcctctaggatgtcacatcttttttctcttttttacatgctgcagcttacctcgcctcttccaggcggcatatctcatagatctactaataattatcgaaattgatccaataattatcagcgcaagatgacatcatccatcgaggtggagcaggactgcagaccgagagatcccgccgcctccatctatcgtcgccttcagatccgctccgaaccgaacgacgacgacttcgcgatttctccagatctggatccagaagcagaacatgcgatgctcgaccaccaaaacaaaacaacaagaaccttgcaggcaaggactaaccgatacaggatccaacgcgggtttgccgaatccagcaatcagatatgagcctgcacaacatgaagcaaacggatttcctgataaatcgaaacaaagtagctcaccgagagcactcggggaggcaaggtctcaaggaggacggccatcctggatctggaggacgagatgaggttgcgtgcaggaggggaacgcgtccaacaagggccgtgcaggcaatggtacacagagctagactgcattactatagcagtagtatcaagcatgcattattgtactggtaaaatagctaatgcttgctttaacaacctagctcgccagatatatacacaaaacacaccagctagctgttgcagtgcagtactgccctgcccccacagtcatgactcatgagccatagatgagatcacagcatgagcgtccactgctgggtgggactcccagtggcgggcgacacgatgacttggctagcattagcccccgcagatggcctggcgtccaagaccatcccggtgccggtgttgaagatggtgccgtcgttgcggaacacccagcgctcgcaagacgatccagccccgtcgcagagtttc

SEQ ID NO: 1572 - DNA, 2507 bp, Zea mays
gcacaggtcagtggatcaactgccctcctgctgctttaatctccgtccacccatgaccacgaggttaatttgaaacccacgggccagcaattatttgtggcgggaaagcaagcctgctagaacgatagacaacggctccgatggaccgaaggcaaggcgaggcctccacggctccacctccactgtctccactcaaccgagcgagcggtagaaaaaagttcggaagagcgaaagaggccgcggaaaaggcgtgcaagcggccgcgagggaatccaattccaattccaattccagcctcacgtcctcccctcccctctgccctgccctgccctgccccgctttgttttacattccattccatcccatcccattttgcagctcctccttccgtgctcgctgcgccctcctgcttccacccccggcagcggcaggggcaggaggagacgacggtcgccaccggcgccctgcaccggcggatgtcggatcgggagctccgccccctgcgctccatcagaatcacaggggacggtcgatgcctgttcaggtccgtcgcctacggcgcctgcctgaggagaggaaagcatgcgcccagcgacagcgcccagaaggaactggccgacgagctccgagccaaagtagctgatgagttcgtcaagcgaagaggagacaccgaatggttccttgaaggcagctttgagagttatgtgagacagatgagaaagcctcatgcttggggaggggaacctgagctgttcatgtgttcccacgttctcaggatgcccatcaccgtctacatgtatacgggcagctccgacggcccaaggatcatagcggaatacggccaggaatacggaaaggacgatccagtccgcgttctctacgacggctacgggcactacgacgcactccagccatctctcgtaagaacacaatcatcgagactgcgaggtgtgtaggtcaccgggggctgcgctgcctaagcttcttctacaggacagctgcgtaactgcgagcagctcaagatttgacgacgctatttttttactccagttccacacagccgtatagccaatacgaaactatgcctggcggctttgactgtaccagccttttctgttcttcaacgtttgatgtataaataaacacacacacacacaaaaaaaaactcgtcacccgagtcagaaaatcagttgagctactacctggtaccatgcccagcatcgagtgaccgaccgtgtaaagtttcttcgatcgtttttgctcaacaagaatgctgcatagaaaaaaaaaagctgaataatgctcaagttgtcatactaaaattctcttggacttcgtatggggtggcatgaacgctcggtcagtgctcggtttctgagttacggtcttgtcaaaatccagtgacacacaaaaaaaaagatgagctcgatgaaaaatggagcacagatgatattcctacaacaattttaccagcaacaacaatcccagtcgcgttgaaagggaggacttctttacacgaaagccagagccaccgcgtcgcggtaactaaattacaacatcgtcctacttgttatctcctagtcttcaagccgttggcaccccggtcgctagtccgtggaacaaccaagaaaagaggaagctgagtcatggaagccgctccacatgtcacgcacttctgcccgcggcctggtctcctgaagcaacagctctggtttaacagtcacattgttacggcgtaaaaaccctcctccgtctgcttctccagcatcagcagcagctcttgttgcctaggcaacagcagtttgcttggtcgtgttttagcttctgcaaggatccatgtttttttaggcatggtaagagatagtgtatttttgtttgtaggcatgtcgagataaagactcaagtcacaaatatatatatattttttgtttgcacaccaagcgatacgtacgtacctcaacttggtccttgagctctttgatgtactccacagcaaggtccaacatgtccgacgtattcgtttgctgcgtgttcacgagaaacaccaataaacacgctgacgaaaatgggcgatggcaacgaacaacaacgagaacaggttgttcagcaatcccgcacgggaaaaatctacggatgacgataatgaatggctatggctcattgcagatcttaagctcagcttaccttgtccatgttgggcacgaggtcttgcagcttcttcagcctcttgctgatcctcgtccttctttcctgaacgtacgccagcgaacaaggaaaacgaaattggtttctgtgctgacatccagctagcatcaaagctggcagagtgtggcaccatatattgcgccgtgcttttttttagcgaatcgtttgggaaggaccgaaggatcgagtagatgaactgaccctctcggcaatgctccgtgggtgagtcgcgcagccacgcctcgcacgcactctgcaggcgacggagtcctgctgcagctgcaggtagtcgtccatgccgg

SEQ ID NO: 1573 - DNA, 1908 bp, Zea mays
gaaaacgacaccagagaacgaggtggaaaggtgaggccgttccctcagccgtaggcgagcccatccagcaaagcagtggcccgacgcggcagcgagctcggcaacggaacaacccgacgccacacacacacgcctgctgttcccgtgcacgcatgcaggtgtcaggtgatgtgccgcggctaccgcaggagttaaaacccgagcacatgctatggttaacgagcaaacgccgcagcggcactgcggtagcagcatcgcgcggcaagctcacctcatccctctttcaccccacctctgcaattgcaagcaaagctccggcctccggatcaggatcacactgaccaccgcgagcgcgtgccggcgtccagtggttacgtcgagggagcctaggctagcgaggaacaagcagccaccagcccgccacgatgctcgtgaggagcgcctccacgccggtcctcggcgcgctgcacccttccggctgccactcgccggcggtctcctccccggccgtgcacttcgccgagtcgccggcgtcggccgcctaccacgcgccgcccatctcctgccacctgggcgggcccgggtccgggtccgaccacgagcgctcgcgcagccgcggcgccggcgccggcatgcgccgcacgtgctccgaggacaacctcgcgtctctggccggcggccgcgcggacgaccacgaccaccaccaccttctcctcccgccgtccggcaagggcgcgccacgggcgcggccggtgccgctcgagaccatccagtcgttcaggggcccgcatgcgtccaccgacgacgaagaggaggaagacgacgacgacgaagacgcgtacgaggtggagcgggagctgcgcttcggccagttcagctttgccggcggcgcctactcgcaggagcacccgctgttcctggccaggggcctcggcatcgaccgcctcggctcgggcctcctcagcgccgacggcggcggcgggttcggcggcagcgacggcagcgggagcggcggcggcggcgggaatttggtgacgtcggggaacggaggggaccgctccggcatcgagacgcactacaagaagatgatcgaggaggacccctgcaacggcctctttctcaggaactacgcacagttcctgtaccaggcaagcagcagcagcagcagcatctccttctcgccttctaccgtcaatttggagttttggacgacgcgcagatctcgtatacaaaatttttaattcttcttctgacggcggcacctacctgcgctgcgcattggattggatctcaggtgaaaggggactacaggagggcagacgagtactactcccgcgcgatcctcgccgaccccgacgacggcgagctcctgtcggagtacgccaagctggtctgggaggtgcaccgcgacgaggaccgcgcctccagctacttcgagcgggcggccaaggcgtccccgcagaacagccacgtgctcgccgcgcacgccgcgttcctgtgggacacggacgacgaggagggcggcgccgacgcgctcagctacgcggccttcgctcagccggcgcactcgtctctggcttcggcgacggcaacaacctgaactctctcgccatctcacgagtctcgagagcggttcctccgcagtcgaaatggagcgtgacagtggcctctgctcgtctctgtctgtagtagcataccaataatactactcgcgaactctctttctgagcaaacagattccatagcgccgtgtagccacgcgatgattttgcgagcgagttcgtctactagtactacacagacacaggctcaatcggttcaaccgatacatgctggtggctgtcgcctgtcgcattgcattggattatctctctccccgcgcttctacatatgcgttgaacctggcaa

SEQ ID NO: 1574 - DNA, 4469 bp, Zea mays
  misc_feature (512)..(594): n is a, c, g, or t
agtctcactcgagcacccgcgcggcgccctacccaacccacgctattctcggcccgctcgccaccgctgcacgcgccgccgccgcatctccagcccccgcgccgctcctcatcttacctgggctagctacagcgacacctgcgtgggtggtggtgtccgactacttcattactcactggccgtccattgcagccctaagcgcggttcccttccagctccgctgcggggagcctggtttcgctcgtgatgtcgccggccgccggagagcagctctctggagcccaccgagagggcagggccgtggaggcgcggagggtcttcataggcgccggctgcaaccgcgtggtgaacaacgtctcgtggggagcctgcggtctcgtcgccttcagcacccagaatgccgtcgccctcttctcccccctgagaggtgagatcgtgacaactctcccggggcacaaagcgccggttaactgcacgctatggcttcccacgaagaaggatgtgctccatgnnnnnnnnnnnnnnnnnnnnnnnnnnnnnnnnnnnnnnnnnnnnnnnnnnnnnnnnnnnnnnnnnnnnnnnnnnnnnnnnnnnttgcagtggtttcatgcgttgcagctcccaggaatgcataagaaagggatcacctgtcttgctggaaggatggtgtctgatactattgcaatttttgcttctacttcttcggatggtattgttgttatttgggagatggcaattgagcccaccactggtggcgattgcaaagtgacttgcttgcattctctgtccgttggtttgaaaccaatggtttcactttcattagctgtattgccaggacaaggaggctatctcattttggcgatgggcggtttagatcacaagatccacatctattgtggggataaggcaggcaagttcattaaggcctgtgaacttaaaggtcattctgattggatcagaagtttagatttttctttacccgtgatgatggacggtgaaaggcacaaccttttccttgttagctcatctcaggacagaaccattcggatatggaaaatgacttcagaagctgctgcttctggctcctccttacaattgaggaaagaaactattgagatgacctcctatattgaaggacctctatttgtggccggcagtacaagctatcaagtatcactggagtctcttcttgttgggcatgaggattgggtatattctgtagagtggcagccacctacattgttaactggggatgaagctcatcagccaatgagcatattatctgcatccatggacaagatgatgatgatatggaggccagagaaaactactggcctttggattgattcagtgactgttggtgaattaagtcactccgcacttggattttatggtggactttggcagcctgatggcagatccattctcgcacatggttacggtggatcctttcatatgtggcgagatgttggactggattctgaaaattggcagcctcagatagtcccgtccggtcatttcgcacctgtgtctgatttgacatgggcaagatctggccaatatttgctatcagttagccatgaccagacaacacgcatatttgctccttggagaaatcaagttaaccctggagacatgatctattggcgtgaaattgcccgtccgcaaattcatggtcatgatctcaactgtgtgacattcattcagggtagtgggaaccatcgttttgttagtggtgctgatgaaaaggtctctagagtctttgaagctcccttatcatttttgaagaccctacaacaagcaactctgttgaaacctgacatctccgaggattttgacaatgttcaagtccttggagcaaatatgtctgctcttgggctttcacagaaacccatatatacacatggagtcaaggaatcctcaatcagtaattctaacgatggtccagattctatggagacaattcctgatgcagtgcctactgtattcactgagcctcctgtggaggaccaacttgcatggaatactctatggcctgaatcgcacaaactatatggtcatggaaacgagctcttctctatatgctgtgattatgaagggaagcttgttgcttcatcttgcaaggctcaatcagcagcagttgcagagatctggctctgggaggttggaacatggaaagctgttgcccgcttgcaatctcacagtctaacagtgacacaaatggagttctctcgtaataatgcgtttcttttaagtgtttcgcgggatcgccatttgtctatcttttcaatcaggaaaactgaaggaggagcagagcatcgtctggttgcgaagctcgaagcacacaaaagaattatatgggcatgctcatggaaccccttcggctatgaatttgcaactggatcaagggacaagagtgtcaagatatggtgtgttgaagatgcatcttctgtcaagctacttgcaacattgcctcagttccgtgacagcgtaactgcattagcatggatgggccgtgaccgtgcttctaatgctggtatcgtcgctgctggcatggacaacggattgatcgagctctggagcgtttcaggtggaagagcttcttcaggaacccagctcagcgtggcatgcgtgcttcgatttgaccctctcttgtgtcacgtgtcaactgttcaccgattacggtggcggtgctcaaccgatgagaaatcgacacttgagctcgcgtcttgtggagctgatcacactgtaagggtgtttgaggtctgcggcagcatataggtttatgtccaacctagtaaatcaaaactgttatgtgcgtggcaggtttttattgatatcggacaccgttgggttgtaaaactagtcctggtatgagaatcgagaaaagagtgttttcatgaagcatgtgctgtccatatgtaaccccagtttagtggtaatagattcagtgttgccctcatttgagaagctatgaaattatggttatagatggtgatgtatttgctaaatcacctatatccaaaactctgtgtatcatctcaatctgcaatcaatacaaattcgagaaaaaaaatccactgtaccgcttacactcaagcaaagagttctatgctgtacattacacactttgttgaactctgttcaggttgcttacgatctaagctactgacctactgtgtgttgcagctagccactaggacgcagcaacaactgagcagccaagagatcgacaaagctgaagaaccaacttcgaattcacatgaatcaacaataggtatgttccgctgttctcgggccatttccatcatcagtataaaaaatagctaagattttatatataataacaaaagaaaacgaggggaatttttctagagccagtcattttgttgtgcatctccgggcaacaagaactccagaaggaggggcagtgagttccagctgacagaccgtgtacatccagtacgagtagtggccgaacctgaacctggcctccactttgaaggcgcctctgattgtgtacaccaccctgttgctcctcacctggtccaccatctttaccgccacctggggcggcagcaggacccggctggagagcaggtgcatgttcaggagctgggactggcctcgccgctgcgcgaacggaggcagcgcctgcacggccatgggcctgtcctggaagaagagctcgacagtggcggaccggaacaccaagtcgatctccctgttggggttggagatgttggcaacgagcgtcatgtcgttgttgaagtagggggccggcgagtccacgtagacgctgttgaggatggcgttagcggcgtcgaaggacggcggcctcggcttcaccgccaggaagacgaccagggtgacgacgcctgcgacgatgaggaggatgctgaaggcgaagcaagcgatggccgcgcaccacatcgccggcgaggtccgctggcgcggttgcaggattaccttggaaggcgcccgcgctggctgccggggcgcctgtggctgcctggttatcgtgggtggatccaccggctgcgaccgtggcagcaccggtgtctgctcggtcacctcggactgatccaccggcggcggcggcagctgtggcagggccggtggcagctgcttcatgctcattaccttggttatgatggttcttggtgattggaggtggtagggagcgcccatttcggcaacgccacagctaccaagttcaacaaggcaaagaagctcaagagtgcagagaggcctattgggggaaagcaagctagagaagagcagcaacaacaacagcaacgagaggcagccagggaatggacaatggagtggtggagttaaaaggagtctgatcgattgagcctagtggtggtgtacctccttccaaaatacgtaaagagagagaggcttcgagcgtggggccactgtctcgtgttcctccactgaaaaaaatagagctgcttccagca

SEQ ID NO: 1575 - DNA, 2835 bp, Zea mays
ccacaacacacgccagccccgtgcgccctacgcgattctagaagcctccgggctccccgcatcgcctccccacccccatgtctcccagtccctgtacctccgtataaaccctagtacctcttatccgttcgtcactccccaagcgtcacaccgaatcaccacagtcgagctcgagcaggaacaagccgtgagcgcctgcccccggtgctcaatatctattccacacctcatggcgccggcgctgagcaggaccctggggccgtcgtcggtggccgcgctgcgcccgagcccgtcgtgccggggtctgttacgggccgcgctcgcgccgcagggcaggggcgcctccgcgaggtgcgcggtaggggtgagatgggaggcagccaggcggaggaggatggccggggtgaggtgcgacgccgccgtcgctgagaagcctgccggcgaggaggagacggccggcgagaagtacgagtaccaggctgaggttacccgcttgatggacttaattgtacacagtttatacagccacaaggaagtatttttacgtgagcttgtaagtaacgcgagtgatgcactggataagctgagattcctcagcgtaactgatccttctgtgttggctgatggcggtgagttggagataaggattaaacccgacctagaggcggggacaatcactatcacagatactggcattggaatgactaaagatgagctcaaagactgtcttggaaccattgcacaaagtggcacctcaaagtttttgaaggctctaaaggagaacaaagaccttggtgcagataatggactcattggtcaattcggtgttgggttctattccgctttccttgttgcagagagggttgtggtgtctactaaaagtccaaaggcagataagcagtatgtgtgggaagcagaggctgacagcagctcgtatgttatcaaggaagaaaatgatcctgagaaaatgctttcacgtggaacagaaattactctttatttgagagatgatgacaaatatgagtttgctgaccctaccaggattcaaggcttagttaagaactactcgcagtttgtctcattccccatatatacatggcaggaaaaatcaagaacagttgaggttgaagaggaggaagaatcaaaaggtgaagaggctactgaagaatcaaaaagtgaagaggctactgagggtgaaaagcagaaaaagaagaaaaccataactgagaagtactgggactgggaattggctaatgaaacgaagcccatatggatgaggaatccaaaggaagttgagaaaactgagtacaatgaattctacaagaagacatttaatgagtttctggatccgcttgcttacactcacttcaccactgagggagaggtggaatttcggagtgttctctatgtcccagggatggcgcctcttagtaatgaggagataatgaatccaaagaccaaaaacatccgattgtatgtcaaaagagtgttcatatcagatgattttgatggcgagctgtttcccagatacttgagctttgtgaaaggtgtagttgactcaaatgatctccctctcaatgtttctcgtgagatccttcaagaaagtagaattgtcagaattatgcgtaagagacttgttaggaagacatttgacatgattcaagagattgccgagaaggatggcaaagaggactacaacaaattctgggagagctttggcaagttcatgaagcttggttgcatcgaggacacaggaaaccacaagcgtcttgcaccattgctgagattctactcttccaaaaacgagacagatttaataagtctggaccagtatgtagaaaacatgcctgaaaaccagaaggcgatctattatatcgctactgatagtctccagagcgcgaagactgctcctttcttggaaaagctggttcagaaagatattgaggttctttacctcattgagccaattgatgaggttgccattcagaatttacagacatacaaagagaagaagtttgtagatattagcaaagaggatttggaattgggtgatgaagatgaggacaaggagaaagaaagcaagcaggagtatactcttctatgcgactggataaagcagcagcttggcgataaagtcgccaaggtccagatctcgaagcgactcagctcttctccatgtgttcttgtttctggtaaatttggctggtcagccaacatggaaaggctcatgaaggcacagacccttggtgacacatcaagcctggagttcatgagaggtagacgaatttttgagatcaaccctgaccatcctatcatcaaggacctgaacgctgcttgcaaaaacgagcctgaaagtactgaagccaagagggcggcagagttgctatacgaggctgcgctgatctccagtgggtatactcctgacagtccagcggagctgggaggcaagatctacgagatgatgaccatggccctcggcgggagatgggggaggttggagacagaggaggctgaagtcatcgccagcatcgacgacgcggactcgtctgaaggtgccacgaccacgacagaggtagtcgagccctctgaggtcaggacagagagcgacccgtggaaggattagatagttctgtatgcaaggattatgccctggtgtggtgtatgagcactggatgtaacgaaagtacgaaccagagccaggatagaggaatgcagcgtttgataagaacactggtgttaaaagtgtagatctctggtttgggttgtgctgataaatttttgtaggctataaccatccaatgaaaaatgccctctgcgctttcgtgcattctttct

SEQ ID NO: 1576 - DNA, 2923 bp, Zea mays
cacgttcttcttgctagaagcgaggtgtcagccacgccctcctaacacgcatacgccaggtccatgggaccactctcactcatactccctcgtccctccgtgccaaaacgaaagggaccgctgctctgctctgcctgcctccccttcatcctccacttcttcctcttggtctggttcgggcagagcatccgcacctgctcggccgattaccccggcgttttctgttccctttcaccccgcgtgcgggcgctatccttcccgtggcgacgtctgggtgaccgctgccgcagccctacactaggttcctaggtattcgccgggcccttccccggcgacgagcacccaccatgtatgtccaccccttcctcttccataccttacaaaacctacccaaaccctaaattaaactgtttggctatttgtattcggatctgatctaactacaaatgcttacatgtattactatgcctactatttcgattttcttttgcaaatattatcgggtcttattattgctcggctatcttggtctcacgcctcagttcctcttgcgaagctgttaagcatagcatatgttatgttaacctatcttaaaaggacttccagacatagattttaagagagtcattttgtagggctattctttttctccttgcgagccaataccattagtaaattagtgacttatttgaagttcatagatagtctatcaggctggtctcctgggtcatttccctagcagagcaggtttccggttctctacaagcgttctgtataagaggtcccagttacatcaagttccattccagcaatcaatttggatagtattgatagtttacgctaaaaattcacacttcctcggattaaactcataaatcatggcctttcacagtaatcgaatctaatactcacagcttagcctacgtgaactaatattttttgtatagtggttcagtatatttacgaataactctactatgtttgcatgtatatgacaaaaggtacatgagaaatcctttttcaaatttgtagcttaggctacctctgtggggatcttctgtgaagcaagagaagttacctagcacacaactcaaagttcagtagattattgaggatcaacatttcagccatctgtatgttagttaatatgatggccgatggtaacatctggttagaaagatagaaactcattattgcgctacatatggtagtgcccattcgacataagaactaagctggacattggtagatccaagttattaatggcgcacacttcctgtgatggtgtacatcatgttataagtgtagcacatggggaaactgcatcaacatcaaccagtcatcaagatatgtgcagtgactcggatgaaccacatcaggaagataggctatcaacaagcacacaaaccctgtcatcagagtcttcgccatcaatatcaccaactgcttatagcaccagaaatttatcttttcctagaagagatagtatatatggtcatggaagaagtccatggaattctggtttatggatctcgtttgaaattgtcatgtacattgctcaggttgtagctgctattgtcatcctcatcttttcaagacatgaacatccccatgctcctttgttcgcatggataattggatatacacttggctgcattgctagtcttcctcttatttattggcggtatgttcatcgaaacagacatttggatcaagaacctcagcagccacctacaacatatcctactttgactccttctcagtcatcagaaggacgcaaccatcgtaccagtggtattgttttgcatcttggatgtatctcaatttcttgcccaaggcttagtgtgctggcttatcacttcaagacaggtgttgactgtttctttgctgtatggtttgttgttggcaatgtgtggatttttggtgggcgcagtatttcatcagatgctcaggacgctcccaatatgtacaggttgtgtttggcattccttgcgcttagttgtgttggatatgccattccttttataatgtgtgcagcaatatgctgctgctttccatgcttgatttctgttttgcgtcttcaagaagatttgggtcaaaatagaggagctactcaagagctaatagatgcattgccaacctacaaattcaaaccaaaacgtgtcaaaaactgggggattgaccatgcttcaagctcagagcatcttgatgagggtggcattcttggcccaggaactaagaaggaaagagttgtttcagctgaagatgctgtgtgctgcatctgtcttacgaagtatggagatgatgatgagcttcgtgagcttccttgcacacacttctttcatgttcaatgtgtagataaatggcttaagataaatgcggtgtgcccactctgcaaaacagagattgggggtgtggttcgatctttctttggcttgccatttggccgccgccgtgtcgataggatagcggcaagaggtgtagctagctcaagattcagtgtatagaacaatgctgtttttccgcataaagagctctgctctgttgcaatggtttgattgattgtcaaggaaagcgctgtgtgcatgacttgaagacaatgacacctggtgggagacctgatgcttgtaggggcaaatttctaagaaatgtaacggactgaaggtgctgctatactctgatgaacattttttttccaagtatgtaaataaggaacacgaagttcgcttgccaggtataatgcaactttgcaagcaacttcacaggtgctctagcatcggccttggtgttctttccttccttctggttctgtgattctcttcataacggcaatgcactgcatgcattgtaaggctgtcttcagtagcttactcattctagtttctatcatcatatattctattttaaacttcaccttgtaaac

SEQ ID NO: 1577 - DNA, 2136 bp, Zea mays
gattcgccccagtttctctgaaacgaagtagacagccaccgtcttcccgggccacggcgatcatcaccgccgcggcgccgcccatatcgacagcagagccgctcgcccagtagcctcacctcgcccgcgcttgtggcggccatggaggactacccagaggagctgcggacgccgccggtgtcgctcgtgtcaatcgtggggtgcccagagctgcacccctcgatctcggcggcactcagctcccagcagccgcccatgaatactctggccctccccgacttcgccaaggtctccatcctggcccgcagcggtaagccccgcgaccctctcgcaccgccgcacccccccgcgggaatcctcaagaaggactggctccttaaacaccgcacccgtgccccggccgccgtcgccgcgctgttccgtgctgaccaggtctccgacgatcctgcccagtggctcaaggcctgctccgatctcgaaaacctcaagtctgcaattcagaggaaaaacactaaattattggtggtccttgtgcaggctcaagctagtgatgagttaagtgaggatgtaacggttgccctgaggaaacgtgcggaaatcgattccaatcacttggttgtgttggttgagcacgatgaagcagaatggaacagatctctgaacaagtctgttgctatttatgcggagtttagaagggattggccagaagcattgaagttctatgaggaaggtgttcgtgttttgcgtgagatgattggaacttcgacaaggttgcctccaacccaacgcctagttgagataaaagcagttgccgagcaatttcactttaagatatcgaccttgctacttcatgctgggaaagcggtagaagcaatcacatggttccgtaagcatatcagaagctatgcacgggttcttggaacaccagaagttgcttttcttcactgggaatggtttagccggcagttcctcgtctttggtgagttgatagaaacaacatctacaactattccagatacattatctcctagatttggcactgcagactatggattgactgagtgggaatttcagccagcatactactatcagttagcggcaacttacttgagagagaagaggtatgccatcgaatgttcatcatcaatggctaatcttacaacagaagttaatggagtacctgagtcagtaatgccttctgtatatgttggccaatatgtgcgcttgtttgagcaaggagatacagttagtatactacccctttctgatactgaatacaccagctatgctttgtcagaagctgaaagatttcaagattcttatgagataatagcactgttcagaaaagcttatgaatcatttcagagcctaggtgctacaagaatcgcttctgtctgtagcggtggaatggccatggaatattatgcagctggggattttagcaatgcaaaacagctttttgataatgttgctggtctgtaccgcaaagagggttggaccactttgctctgggagaacctaggatacttgagagagtgctcaatgaaacttaattccccaaaggattttatcagttattccctagagatggctgcattaccattattttctcgtagtgaagaggaaaatcgagaaaacaaaattaagagtgggcctgcaggttcccctaccatttccaggagagagaatatacagcaggaagttattaatgttttggaaagaaatcagtcatcagagggaaccgatgatggatttaataatgcgatggaagaagttactcaccttgatattgatcagataagttcgctaagaatggtacttactacgtctgttgcttttcttgatcaatctgtaaaacctggttcacctttgcttgtcagcgtgtcactcttatctcatcttccttctccagttgtggttgatcagttggaggttcaattcaatcaatctgactgtaactttgtgatacatagtagacaggaagattctcctcctttctattcaaatttgcatgaccaagttgttcaagatacttctcttacactcttcaccaatagatggatgcggttgacacatgaagcaaaatcaggtactaatgtcatgatcaggaaccttgacaatacttcatttcattaa

SEQ ID NO: 1578 - DNA, 1487 bp, Zea mays
atccgcccgcccttcgccaacaggatgggagtagatacgatacgatacgagctcatttgtcgctgcttccttcatttcatctcttcttctccgctgctaggctcgtcctggccctgtcctagccggctagcccatgcctggaagatgatcggcgacggcaacaagcgcgatgcaaggcagttccggcgggggcgaactgagaacacatgagaataatgagatgagattgctcgcctcgcggtcgcccccgcagggccttccttgctgctgttccgcagggtggcggtctgggtggccgcccgtcgtccaggggagtatcgagacacgtacgcacgaattcaccaccacgcgatccagcatgttttgctgctgcagtgctcttcgtcacggttatatatatatatatatgtgatcgaactgccatgcatggtaagaaatcactgcgcgcttgctattaaaaaatatatctgtgtgttagcgataactttattaagctgtactcctctcaattccatattgcaagctattttagcttttcttacgcacatgcatagtttttgttagacgtctagatttgtatacattgtgtctatgggtattttttggttctcgatctactttcctactacaacttacttaaggttagtcagccaaattaaagaactaatcttattgtacagaaaaatagataaattatgtcaagttatcaaacaaagcttaaatacatgcatagttaaaaaaatatatgcatctataaaaatagtgttaactttttttatatatatacatgtatgttgttccctattatgtctaaatatatgtatctaaaagaactaggataatagggacgaatctctagaatcgtttacagtttaaaaatagagataataagcatgtttggttcggcttttttctgaagggttttttctaagaatctagcttcctagataatctatggtcacaagaatctatatatcgtgaggcttgcacgtagaggaagatgaagggatcggtttagaatttaggaggtggcggattcgtctcgtcagggtcccgactcagaggattctacattcatgttgatttgagtgatcacaaaggccttaagttgatccaatttttccactgcaagatcatcatgttttgattctttcttaaattcttcattttatatggtatcaattctagcatttaatagctttttatagtaggggattattttttcgtttcctctcaagctttctaggatcatattcaacatatgtacgggcaatattctttaccatctgggaggttttgggctgccgattcgataaagaaggcccaacgtaagaatgatccggtgcttcactagttgggctggctcatctgatggcgtgtgtttatttgtttcatgtatagactactacaatatatagaaacgtgtgttcctagaggggtccttagagggggaaaaaaaggtccgatttgtaccttcctaaatcata

SEQ ID NO: 1579 - DNA, 3181 bp, Zea mays
ctccgcctcttatcctctacggccctgtctctcgcacgggccggttcgctggcagttaccttacctgccgctgactcgctccagtggccaggacctgctgcagtggacgtggtgccggcggcgggccacggcggaagcagccatggaggcagtgcagacggcactgagtgagagaacgaacccgctgctcaacaggtcatccggtccatccgtcgtcactcggcttcaacctgacgccggcaacggcgcgggcttctatgacggggcctactctttcctcgacaccaccaaggcctgcgctacccggttcagcagcgggtcagtgacatccgacgactcgccggcggtgacgcccaggctgctgtccttgatgtccagctccagccccgacaactgctcctcctcctcagaatggcccgaccgagcggcggcgtcgcgctccaatcggtacctcttcgacgcgaacgcacaggcccggtgcgcggggtacctggacctgatgaggctggaggtggatgcgcagctgggcaggctcaggggcggtgtcactggcctggagagctacgctttgccgggcaacggccgtgcgatcggaggtgcgcacctgggcatgtcgcttgatgtcatgctgattgagattgatgagaggttcaacaccctgaagctgctcatgggctccgtgttccggcaggccaaggagatgcttggttcggtcaactcgtcggtgtctgatctgcagtcggagaatgagctgcagctggaagtgttcggtgccatcatcggagagtgcgtcagtggcctgcaggaggagctagagaggaagctgtacgagcagattagcatcacaaacaccatgggcaggaactggaaggaagccataactcagtttgccgccatgcgcgaagaccttggcgctctttacaggatgaaggacgttaaggcattatcatcccagctatctgaagccagtacagaactgtcaatgcagatgctgtcggaagaagagctcctgagacaaattgataaagttagagaagactccgctcgcccggtcccactcccgcataggcgccgccgccgctacccgctacccccgcagccggcactcggcaggttcttcccctggcatccggcactcggcttcttcttgccccggctcccggcgcggcggcgcccgctcctcctccccccgctcgcccgctgcaggtcctcccccgcggcacgcgcccgctgctgcagcctgcagctcccaccccaactggcgattgcagctcctccggtcctccccctgccggcgccgcctgcgagctgcacagctgcagctccccccctggctggcagagctgcagcttcaactctcttgaaggcaaaagaattgaatcgcactctgttgatgggcagcttgcatgctctgcgggcgccgacgccgctcgttgggagcactaggattggcttcagttcggggctccgcttttgctccaacagagtcctcagagggttaactcccattggcgcgatgaagtcgtataggctatcggagctcagcgacaccgaagttagcggcctcaaagctcgtccccgcatcgatttctcatctatttttggcacggtgaatccaatcgttgaagatgtccgtgtgagaggtgatgcagcagttaagcactacacagaaaagtttgacaaggtcatgcttgatgatgttgtcgtctgtgttagcgatcttccagatgcagagcttgatccagctgtgaaggaagcctttgatgttgcatatgacaatatatatgccttccatgtttcacaaaaaatacctgagaagacagttgaaaatatgaaaggcgtaagatgtaagagaataactagatgcattggttctgttgggctgtatgtcccaggtggcactgcagtcttgccttcaactgcattgatgcttgctgtgcctgcacagattgctggatgcaaaactattgttcttgccacaccacctagccgtgatggtagcatatgcaaggaggttctttactgtgcaaagaaagctggtgtgacacacatattgaaagctggaggagctcaggcaatctcagcaatggcatggggaactgcatcttgcccaaaggctgagaagatttttggacctggtaaccagtatgtaacagctgccaaaatgattcttcagaacagtgaagctatggtatctatagacatgcctgctggcccttctgaagttttagtcattgctgataaatacgcgaacccagttcatgttgctgctgatctgctatcccaggcagaacatggcccagatagtcaggttgttctagttgttgctggagatggtgttgatctgggtgccattgaggcagaagttagcaagcagtgcaacgcgcttccaagaggtgaattcgcttcaaaagcacttagccacagcttcactgtgttcgcgaaagatatggttgaggcgatatcattctcaaatctgtatgcccctgagcatttgatcatcaacgtaaaggatgctgagcagtgggaggagttcatcgaaaacgcagggtcagttttcttgggccaatggaccccagagagcgtgggcgattatgcgagcgggacgaaccatgtccttccgacctatggttacgcaaggatgtacagcggtgtatcgctgaactctttcctcaaatacatcactgtccaatccctaacagaggaagggctgagaaagctggggccgtacgtcgcgaagatggccgaagtggaggggctagaggcgcacaagagagccgttacccttaggctgcaagaggttgaggccaatgtaactgtctagccgctgtccatggtctattgcaacgttcagactcgatgtgggatgctggagttcttccctaggaacctaggggaactggactattgatgtcttccaaacaggctctggaatgttagaaagaggcgtttcaactggtgcagctaataatgttcattggaccctgatttgtttcacgaataaacttgagcagaacttactgtgtatatatgcagtgttctcgtattagttatttccctagttgcttctgtaccgattttttggattgcgcatatgcatctaatgtgcttcgtgacatgtatgtgtgaggttttgatggaaaataaaaaaaatggcatcgagcaatgagattttcattgg

SEQ ID NO: 1580 - DNA, 1676 bp, Zea mays
tgggcatccagttcgtacttgccgttgtccatctgccatcagatcgtttatcctactaatctaggccgtccaaatcggtagtttcagttccttcacttgtctgcatcccccttcccctaactccgccgccactgccgtccgcgctcgccgtcgccccgaacctatcgcccactgcatttttccggcggaggtatgcgatgaggctgctgcaagcggaggagctatttcggaaggttctggaggtcgggtcgaagaataaggcggctcggctgctggggctcgacgtcggcagcaagtacgtcggggtggccatctccgatgagaagaacagggtcgctatgcctctgagtgttttgtgtcggacaaaaacaaacatcaacttgatggcagatgatttcaaaacattggtttcgatgtattccatagctgggttcgttgtgggctatccattcaaaatctatggtcaaccttgtgcaagtgcaatccaagtaagtcttgctggggaactttgtaaaacagggaaacttgatgatctgccctacgcatattgggatgaaaatttcacctcaaagtgtgtagaagccctcttgcatcccctgaatctaaaagacttggacgatgccaaaacaatgacagacaaatttgctgcagtctgtatactccaggtgcgtactcctaagtaccagggtgactttgcgttactgctgcagatttcatgtttttcaactcttcgtgacagatggtacatagtttattcagttaaagtcatctgaagctgctttagtgacactgacgacgatccattactgaacagggttatcttgacaacatgaacagaaaactgagatccacagataagtctgaagcataaaggtggcacctaagattccagtttgaactaaaccaaagagcaagggaaccttttttttgatagaacaggaggggagggcccctactgaaaattttatttaaaatttgaaaagaaaacaaagtttagaacaaacaagaagacaaattacagggggttagggagagtttgtactgccattgttttctactgccattgttgaagccaagtcgggatggcagaatcaaatctacccaaagctctgtgaatgacaaggagcaattcatttgcaaactcctgcttgcaatgttgcaccgttggatctttgttttgaaaaagccaagcattgcggcacttccaaatgctcaaagtcatgagaataataacctccatagagaatgggacattgagttgctgttttaggtttgccgcagcctcctctggattaacaattctaggtggaatcagaccgattgagtgccagcaggccttcgcgaagttgcacctgaggaatagatgataaaaagtttcttccttctggcagatgcagttctcgcaggtgtaaaactcaagagtcatgttcttcctcctaagcatattccttgtgttgagcctattttttagccatagccaataaaagactttatgcttaggttgacatttgttcttccagagcgatctgtaaatctgatgaacttgagactgacccatcaaatgcttgtaagtctgcttcgtagagaagatttcagatccccaaatgagcttccaagtgtccttagcgttggtcactgtgatttgtccctaggtctcgtttagttcaagatactgc

SEQ ID NO: 1581 - DNA, 1442 bp, Zea mays
cacagattgggcaggacatttggagtattcttcagttcaggtccctccaattcccaccatgatctcttggccaaccatctaccatgttcttgaagaaacggttcccctgtatgtagctatgatagtggcctacctatccatacaatggtggaagctgttcacgccagagcagtgctccggtatcaacaagttcgtggcgaagttttccatccctttgctctctttccagatcctctctacaaacaatccttacagcatgaacctgaagctcatattctcagatgtcctacagaaatcgctctccttgctggggtttgcagttgcctctagggtgtgctgcgaggagaagtttgattggctgattacaggtttttctctatcaacgctgccaaataccttgattgttggaatcccattgctcaaaggaatgtatggcgatgaagctgtgaagctgctaagccagatagttgccttgcaaagcctgatttggtacacacttctgttgtttctgtttgagtttcgggctgctagaggaatggctatcacaacatcatctgaagctatagatgaagcagaatcaggtactccaggacctatgcagcaaggacacgaagaggggcaagcgaaaggagtctcggcaagatgttatggtgccttccacttcttactggtggtcagtaggaagctggtgacaaatcccaacatgtatgcaagcctagccggcctgatctgggctctgatcagcttcaggtatgagcataagtttatgaactgtgttaatctgggttctgggatgcagaaagtcatctcgtgctacgtatggcacaccatgatatcctgcaggtggcgaatacagttaccatcgatcgtcaacaactccataagaatactttcagatggagggctagggatggcgatgttcagcttaggtgtcttcactgccctgcaaacgaaaatcgtggcatgtggaaccaaaaggatgctgctatcactaggcatcaggttcttcctcgggccaggcctgatggtgatctcttcctatctaatcggtatgcgtggaactttgctgaaggtggccataatacaggcagctctacctcaaggaatagtgccgtttgtgtttgccaaagagtataacgtgcatgcggatattctgagcactgcgataattctgggaatgatggttgcggttccggtggccctgggttattacttcgtcatggatcatcccagactctaaccatgtcccatttgcggaaaggattatcctctagattcatattgcgggcgtgcttgtgatattatatctttgtggaggctgtatatatctggattcgtgttagttgacccaagctaatgataacaaccagcttggtttcggtgaattgttcggccagtacttgattagtaaataattgatgcaaaagaaggaagaaggggac

SEQ ID NO: 1582 - DNA, 1180 bp, Zea mays
cctcctctagagccttcgcgtctcggcggcagtcatcggatcggaacctgcacaagtagaagtgcgcaacaagccttgccactaacatgccttcagtcgaggtcgaggtccaggtgggcggcgccggcgggtggaggccgaagcagcagcagaagcaccgccaccaccaccatccccttgagatccgtcaggtgtgggcggacaacgtggaccgcgaattcaagctcatccgcgccgccatcgagcggttcccctacgtgtccatggacacggagttcccgggcgtcatccaccaccctcccccggccgtccaccactccacgctcaccgcgccgcagcgctacgccctgctcaagtccaacgtcgacgcgctgcacctcatccaggtcggcctggccctggcgccgtcccctggctccccgcccgcgctcgccttccagatcaacctccgcggcttcgacccgcgcgtgcaccgccacgcgccggactcggtccgcctgctcgccgccagcggcctcgacctcgccgcccaccgcgccaggggcgtccccgcgcgcgccttcgccgcgctgctcgcctcgtcgggcctcatctgcaacccggccgtcgcgtgggtcaccttcagctccgcctatgacttcgcctacctcgtcaagctgctcatgggacggaagctgccaagggcgctcccggacttcctgcgctacgtccgcgtctacttcggcaacgccgtctacgacgtcaagcacatggcaagggtagcctccgcccccgcgctgctcggcgggctcgagcgcgtcgccgccgcgctccgggtgcgccgcgccgcgggccggagccaccaggcggcgtccgacagcgtgctcacgtgggacaccttccgggagatggccaggctctacttccccaaggaaggcagcctggagatgtgcgccggcgtgctctacggcctcgagctccacgacgacgacggccgcggcaccaagccgcgggccgagtacgcgctgctgagatgatcaagaataccatagcttgttcgtgttatcatcttgtacagtgcagtcagttccacccgaactgaattcggggcgggaaataacataaagaaagacaagcaagcacggttctttgattggataataaattcttctaggcattgtttaaaaaaaaaaaaaaaaaa

SEQ ID NO: 1583 - DNA, 1729 bp, Zea mays
cgacagtttctgacactccatttctctgcaggccggagtggcttgcagcaagagctcgcgagagggagaagaagaccaatggctcttgggcagcagctgagagtactgcacgctctggatgttgccaggacacagctctaccactttatggcaaccgcaatcgccggcatgggcttcttcacggatgcctatgatttcttcgccatctccctcgtcatggatctcataagctacctgtactacgaggaacagattgatcgcggcgtcaaagccaccatcaacggcatcgctctgtgtggcgccgtgccggggcaactggtctttggctggctgggcgacaagatgggccgcaagcgcatctacggcgtcacgctgcttctcatggtggtcacctccctggcgtcgggcctctacttcggcaccaacgaagcgtcgaacgtggtggccgtcctctgcttcttccgcttctggcttggcttcggcatcggcggcgattacccgctctcggcaaccatcatgtccgagtacgccaacaagaggagacgcggcgccttcattgcggctgttttcgccatgcaaggtttcggcaaccttgcagctggaatcgttgccgtggtggtatcagcctcgtttctgaggaccaatccaagaaggaacgctaacttcgtctggcggatcgttctcatgctgggcgcggttccggcgatcctcacctactactggcgcatgaagatgcccgagacggcgcggtacaccgcgctggtggcaaaggatgcgaggaaggcagcgtcagacatgtcctccgtcctccacgtggaaatcagcccagaggacgaagcagtcaggcaggaccagtacggtctcttctcgccgcagttcctacgataccatggaacacacctgctcgccaccagcgcgtgctggctcgccgtcgacatcaccttctactcgctcaacctctacatgaaggacatcttcgtcgacgtcggtctgattgaccctccggggaaaaaccacttgttcatgcggatgaccgtcactaccttgctgcacacgggcatcgcgctctgtggtacactgccgggatacttcttcaccgtcgcattcgtggaccgcatcggccgtgtcaggattcagctactgggattcactatgatgtccgtcttgacagccatcctcgcagccacttatgcgtactggaaacggcaggaaacaatacagcgcaagatgggcttcgcagtcttgtatggcttgaccaacttcttcgccaattttggtcccaacaccacaacattcatagttccggcggagattttcccagcacggatgcgcgcgacgtgccatggcatagccggcgcattcgggaagataggcgccatcatcggcgtgtttggcttcatgtccaacatggaagaacacggcgtcgtcccaagaaagctgtgggcactattttcctccaacctagtcggccttgtgttcaccttccttctaccggattccaaaggtaagtcgctggaagagatggccggtgaaacggaagaacagcagcagcaacaggacgctgcagtagttgccgcggccgaccatataaatttggtgcctatttagcacgcccaatggtcactgtttgttgcacgcaatggggtgcgtggcactacttcgtgatatgtgaatatttcatagatcttcttctactgtgctcttcccaatatccatatatatgttagca

SEQ ID NO: 1584 - DNA, 2442 bp, Zea mays
cctcggcgtccgggcatcgccatcgtagacacggcaaaggagacgccggaaggcccggacggaacaagcgagatatttaaggacgcctttttggcgcgaccccacgacatggcggcatatctatctactacacacgcctttaaaacctttcgccctcctccgcgctcccggctcctcccagcaccagcaagcagccttatctatcccctcagctctgcagctcagtgtccaccaccgccgcctccttccagctgggtggaagaaacatgtcgcgaatggcgcccccgtctccgcctcagtccctgaagcccccgacgctgcccttctccccgcccaaaaagccaccgccgatgccggtgtacaaggacctgcacttcaaccgcgacctctccgccaccaagaagctccaggccggagtggacctggtggcacggttgttgggggtcaccctggggcccaaggggaggaacgtggtgcttggcaacaagtatggccctcccaagattgtcaatgacggggagaccgtccttaaggagatcgaattggaagatccattagaaaatcttggagtgaagctggtccgacaggctggagcaaggaccaatgatattgcaggagatggttgtaccacatccataatccttgcccaaggcctcattgctgaagggatgaaggttcttgcagctggaatcaacccagttcaggtcgcacgtggcattgagaagactgctgctgctttggtgtctgagctcagactgatgtcgcgggtgattgaagaccatgaaattgcacatgtggctgcagttagtgcgggaaatgattatgctgttggaaatatgatttatgatgcttttcaaagagtaggtagacaaggaatggtgagaattgaaaatggaagaggcaccgagaacagtctggaggttctggaaggaatgcaatttgaacgcggttacctatctccttactttgttaccgatcgtggtaacatgacggtggagttcactgactgtcagatactattggttgacaagaaaattacggatgctagtgagattataaggatactggacagtgctgtcaaagaaaactatccgttgttaataatcgccgaggatgtggaagaacaggcaatggctgatttgataaaaaacaagctgaaagggacaattaaggttgcagccgttaaggccttctcttttggggaacaaaagactcaatgcttggatgacattgcaatcatgacaggaggtacactagtgagggatgacatggggcatatactggaaaaggcaggaaaagaggttcttggttccgcttctaaggtggtaatcacgaaagattcaacactaattgttactgacggaagcaatcgtcgagcagttgaggaaagggttgctatgataaaaggccaaattgagaattctaaggaaagttacaacaagaagatattgggtgagaggatagcaaggttatgtggtgcaattgcagtgatccaggttggtgctcaaacaatcattgagatgaaagataagaagctgaggattgaagatgcacttaacacaacaagggcagctattgaggaaggtgttgtagttggtggtggatgtagcctactaagactgtcagagaagattgacgcaatcaaggaatcatcgttggataatatagagcaggaggttggtgctgacatcttcaaacaagccttgagttaccctacctcactaatagcaaaaaatgcaggggtgaatggcgactttgtcattaaaaaggtgttactgaatgatgatgcaaattatggttacaatgctgccaagaactgctatgaggacttgatggctgctggaatactggacgcaacaaaggttgtgaggtgttgcattgagcatgctgctgtagttgctaagtcctttctcacctctgatgtggtgattgttgaggcaaaagaaggcaaacctattcgaataagacccccaatgcctcctaggcacttaattcccccaatgcctgcttcaatttcaggtattcgagtgtagcaggcgtcctttccaccaagaatcagcctcaacacaacaagactacgggcccggtacccccaagtttctaagataataaagcaaagaaaacatagtgaaattttgacgtcaaacgtggctttgtatgattgctccaagaagctctatgcacgctatcgcatcatcggagcagcagcaagggtggatgatatgtgttatatagggaatacaaaggtgaacaattcaattttgatgttcaaatgctccttaccgtcataaatatacttctgtttttttaggaacatatactttaatagcttcgcttagtttagaattttttttttgaagagtagaagaattactcattattatattaagaaaaaaagagttttagtcctgaaggaccagtatggagaataaaagagccacc

SEQ ID NO: 1585 - DNA, 775 bp, Zea mays
gtcaaacttggccgccgaggatccagccgactagtccactctttatcagtcgtcacaaacgcccccgccccgcccgttgacaagctgcttcttccttgacctgtccaccaccgccggctgggctatatatggctccaaaccaaacgcgtgcctccgcaagccagagagagccacttttcaccttgcagttccacaacacagagatccagataccaggatgggcgcgacgctcctgcaggcggtggcgtcgctcctgaccaggctgcagcgggcggcgcggaggatggccgccggaaccgctggaggtgggggtgggaagggctcgccgcgggcccaggccgccgtggcgcagtggaagaagaccttttcgtcgctggcgccggcgtctgggacgacgaccaacaaggaggccgccgagcccggggtgtggacaaaggagatcctcatgggggagcgctgccagccgctcgacttctccggggtcatctactacgacgccgagggccgccgcctcgcgcagccgccgccgcccaggtcgcccatgcgcagcccgctcccggcctcacacgggctcgccgccgcccacgcccgcgcctactagctagtggctagggtactaggctactagcttgtgtgcctagctagtggtagtggaggatcacaccgattggatacttgaaaaaaaaacagagtcgtctgtcactcttcttggaccggtggcatttgcagctgtataactgtattgtacatgatatgagattgggtgttcttgtcc

SEQ ID NO: 1586 - DNA, 2065 bp, Zea mays
cacacacagctatgtcaccgtcgcgacgcgcgggcggccgccgctcgctctaccgcgagtccgcgaccgtgtgcctctgacgcgggacgctcccgcaccgcagcccggagcagcctgcggcttgcggccttgcgcctaccttcctgcaggctgcagtagattgacgaatagagcgcgtgcgcaggagtataaaagctagctccggtccccgggggccgcggcctcgggctgccgctggttccgaacgcgtggtgcgacccgggattccctcgcgcttctctgtgtccccttcctccggcctgaggggaggaccccgcagatcccatcgaaattcacggccggcctaacccaagccggtcctccccgactcccggcgacgaccaatttctccttgttctcgcccctccaacccttcatgatgcttagataatatacagtgctgggttttagcactgttttgagtttttaaattgagctaaggcttcagtgttagtcttgaaagatgaacggttcaagtggttcccaagggcatcatgtcagtggagagaagaagcaagtgtgtcatgttagccggcccattcttaacaatggaccaaagcaccgtccattgacccccatgaggcgatgccgtggtgtagcatgtgtagtgattatactgtcaacagcattcctgttggtagtttacttggctcctattactacttttgctgtgcggctgttcagtgtgcattacagccgaaaggcgacttcctttctatttggaatgtggttatctttatggccgttcttgtttgagaagataaacaaaaccaaggttgtcttctccggtgaaaatgtgcctccaaaacgacgtgtattgttatttgctaaccacaggaccgaggttgactggatgtacttgtgggatcttgcactgaggaaaggccatttaggatatatcaagtacatacttaagagcagcttgatgaagttgcctatttttagctgggcatttcacatttttgagtttatcccggtagaacggaaatgggagattgatgaagcaattattcagaacaagctatcaaaatttaagaacccgagagatcctatctggttggcggtttttcctgaaggcacggattatactgagaagaaatgcatcatgagtcaagagtatgcttcagaacatggcttgcctatgctagaacatgtcctccttccaaagacaaagggcttcatttgttgtttgcaagagctgaggagttccttagatgcagtttatgatgtcacaatagcatacaagcatcgactcccagattttctggacaatgtgtatggcgttgatccttctgaagtccacatccacgtcagaatggttcagctccatcacatccccacaacagaagacaagataacagaatggatggtagagaggtttaggcagaaggaccagctcctggcagatttcttcatgaaggggcactttcctgatgaaggaactgaaggagatctgtcgacgccgaagtgcctggcaaacttcttaacagtagtatgcttgacggccatctgtttgtacctaactcttttctcatttgtgtggttcaaggtctatgttgtagcaagctgcgcttacctctcatttgttacctattactccatactaccaccccaactgataggttcaccagagggtgatgtcaaggccaaaaaggttgtgtagatgttgatgtaacttgccatgaaaactgtacatccgcaaacgatttttactgctggagtttctgccttgtgacatttaaggttccctttctgcagtaggaggtatgaatgtatgatagtgcgtatgtaggaattttctgtgattcatcagtgtgtgagggccctatctgaaggcagtaaactgattttagatatatgttcttaacatttttataaacaaaactagaccacatttgttacaaatattgaagatttatttatttattttatttgatctttgttctgatgcaaacaatcaaacattagctatatccaacttgaatatattaatacaaacaaccaaacaaaaacaaccaaacaaacg

SEQ ID NO: 1587 - DNA, 2496 bp, Zea mays
cccttgcttctctcccccggcccgcccgcccgcccgctcgctcgccgctggatcagtttcgtggcgctttggagcagcgaagtggttgctgtgcttggtatttctagtgcgtagtatcgccatcagcgctcaataatactactcctcttcctctatgctgcacgccccggcccctttgttttgtagctcttgtcagcgaaccttccccctgaaaaccccacccacccttcctctccgatcctcctagtagcgcctcacttgcttcattccgatccattccaccacccatctccctcctcagctcccctctccgctctccctccctcgctcgcgctctccacgcggatcaccggaggctagctagcaagctcgaccggcgcggccgatctagctcgcgcttgttggccgcttcagcttagcagcggcggcacgtcgtcaacctgtgctgtgagaaagactagtagagagagatacgtgtaaggatggctggcgcggggggtgcgacggctgtgaagcagccggcggcgggggcgcccgacgctggggccagcaggagcggggtcggggctggcgccgccggggcgccggtcgccgacccgcgcgccgaggcgctgcggtgcccgcgctgcgactcggccaacaccaagttctgctactacaacaactactcgctgtcgcagccgcggcacttctgcaaggcgtgcaagcgctactggacgcgcgggggcacgctccgcaacgtccccgtcggcgggggctgccgcaagaacaagcgctccaggagcagcggcgggcccggcgccggcgggaggaacgggtcctccgctgctgctgctgctgccgccgccgccgccgccgtcacgtcctcctcggcgccgtcgacgctgtccctcccgctgcatacggggtccctgccgtcgttgtcctcggcgctggggctgcccgggggcgcctcgctcgcgtcgctcctcctcgggaccgctggctctggcggtgaccacctcggcctcttccaggccgccatgcagtcggtggtctcctcggaggcgaccgcctacgagatgcagcagcagcagcagacgcaggtggaccacctgctaggcctcggctacggaggcgccggcgccggcgccggcgcgcagatccacctcaagccgtggatgcacgaggcacccggtgctggcgcgggcgggatcatggacagcttctacgcgccgctgctgtccagctccctcgtgccgggcctggaggagctgcacgtcaaggcggaggtcgccggtgccggggatcaccagcagaagcccgcgcccggggaccagcagagcgccagctgggagctgccgacgccgtcgtcgtccaacgtcgacgccaacgtcatcgcatctgacgcgctcatggccgccgccgccgcgtccatgaaccccggggttagctccgccacagccgccacggcgccaaccgtcccctcctcgttcatgtactggggcaacggcggtattggcggcgctgccgcggcgtggccagacctcaccaactgcggatcctccattgccacgttcttctagccgtctggctgtcccgcactcccgctggcctcgcgttaacttcgtttttttaccttaattttctggttaattttttcttgactaaaataacatgtaatttgtggggaaagctgagatgagagagagagagagagagcactgtggaagaagagagctagatcatctcaccacctcatagggcagaaaattggacaaatcaaacaatgatccaatatttcaagaggatttcttcaccgacgactctgagcttcatcggatctatggtcttcgccgtcgagcgatgatcaaggccgtcgacgactagagcatgcatggatttgggaggaggaggaggacaacatgagaccatggggaagctaaagagagctagcaaagaagccaagaagtgtaagtgcagcgctgccatgacactacttgatttcctacttcgttcttggctagctagcttctccttgggtgttttgtacatagagcatatggtgtgtgtggggatacaatagtcaaggtggcccatgagagatcatgcatggtgcaagtcatgaacctctctctctcatctcggcatttgaaatcagtgtgtttaattggttacttcctctctctctctctctctctctctctctctaccatggtttttggaagaactctctagatgtacaagttaatactactagtactttccacacctattgcagctgaattagagaactgtttttgagttctcatgcattattagagttgtcaagggttcatcatgcatcaagttatctagctactttctttctccctgcttctacttctagagtggaattaatttctccttctttctcgggggttttttttgttcaaacttggcttgtacgaattatgatggctttgtgagttatgagaaatttaaacatctggcacttctaatgatggtacatagata

SEQ ID NO: 1588 - DNA, 1640 bp, Zea mays
cgttggatccaaccacccaacgccccggccccttctcataagaaaaaaaatgaagcttgccatttcgctcagggccctgcagcggcggcagctggcgggagagaggcttgggactgggccgcccggccgcgaggaataaactcactcctgtcttcatacgtatccatagccggcaggcggcagtacctgtatgtggttttagctatacgcgacctcagttcgggcgcaagctacaaccccgaccaggcgagaagaagcatcgatagtgtgacgagctaacccaccaccagcaacgtaatccaaatccatggacaaccagccgctgccctactccacaggccagccccctgcccccggaggagccccggtggcgggcatgcctggcgcggccggcctcccacccgtgccgcaccaccacctgctccagcagcagcaggcccagctgcaggcgttctgggcgtaccagcgccaggaggcggagcgcgcgtccgcgtcggacttcaagaaccaccagctgcctctggcccggatcaagaagatcatgaaggccgacgaggacgtgcgcatgatctccgccgaggcgcccgtgctgttcgccaaggcctgcgagctcttcatcctcgagctcactatccgctcctggctccacgccgaggagaacaagcgccgcaccctgcagcgcaacgacgtcgccgcggccatcgcgcgcaccgacgtcttcgatttcctcgtcgacatcgtgccccgcgaggaggccaaggaggagcccggcagcgccctcggcttcgcggcgcctgggaccggcgtcgtcggggctggcgccccgggcggggcgccagccgccgggatgccctactactatccgccgatggggcagccggcgccgatgatgccggcctggcatgttccggcctgggacccggcctggcagcaaggggcagcggatgtcgatcagagcggcagcttcagcgaggaaggacaagggtttggagcaggccatggcggcgccgctagcttccctcctgcgcctccgacctccgagtgatcgatcggcgcgtctcttggtcctggcctcctggcttagctacatgtgcatgatgtcaatcgttcaatgtgccatgctgtgtatactctacagcaaacgtggtaatggagctgctatgcatacagaacgaataaggcgtgacgtgtgagaccgtaagagtacgtagtactaatatgtagatgcacgtgacgtgccaattaatcaaagattaacatgcagttaattaattagtcctcctaccgaggtgcctcaaatctatattttttttccatttatatatcgagttcacacaatccataagaatacaaacttcggcaaggtttaggatttggggaacttgaggcttggggagttagggttccatggctaccggtcgtgatgacacatggggcatcaaggtagattaagggtctgtttgtttgaacttttagagtttttttgaaaagttgttgttgaacttttgatactgagaagccaattcaacgatgttattagttcctaaattaaggaagctacataagtgttgagcaccagttttaatacctagacggtcggaaggtccgacgttgtggcccgaacgattcgtgcctcagac

SEQ ID NO: 1589 - DNA, 3569 bp, Zea mays
tgcgggtgtgctctctgggctgcaaaattccggactgggctacggcccgtccgccgcacggccctttctgtccacggttcaccacttcaccgccccgcaacccgcagcgttctgtctccgacgactccgccgcccccgtcgtacgccaggtgcggaggcctttgctggtctcttcgccggcgacgaacacccaccagcagctgctgtagatgtgcacattcatctccctttactgggtccgcccctggagcatatcatttgactgccgtggccacaactgcgctagttttgctttgatcatccggccttaataatccagcagatatctggtatatagattaacatattcagtacctgagatcttccttcaactagcaaagggaattgggattccactccccagtcctcatcaacagagcgaagtagtgcaatattattcaggaaagatggttgccagctgccctagtttgaccggagagatcaaatatgaagtggctagcagttatttggttggtatggtgattagtgtatatgccaagcttttacagataggcaagaattgacagtagcaaattcttgactagctccgccacctacaggaaaatctagaagaataaaagaaagtcagagatggcgatgtttcttggttgctgtcattagctgccgcttgacacctcggcgacgaaaaaggagccgtccactcactgagccttttgtccccctggacatgcaggtgagtggcatgtaaccaacctgaatgacaggaggatcattgtggtggcaacgccaggaggcagttggatattcaagatcatgacatgaaagactttgggaaggggagagggcaatctccatggatcaaggtgtctgcacatgatccaagcgcacaactgctcaaagcacacaagagatcgtgttgtgtgttgtgtttttgggccgtaccaggaccagagcgggcccctatagctatagctatagcagcaatgagctgggtcgtactctctccacgacaacactgaaccgtccgtgtgcgttcctgttgccgtactgaaatccacagagaggatagctgggctctgatccgggatttatgtcaggcccattggggaggtcatgtgactcagcaggtcagtgcgtttccgctcaccagctaccattgcgagatcagtaggatgtgtcactctctctctgctgctcttttggattcttggcgaggtttcagattctctccagtacccacttgcattgcagctctgatggtcgccaggtaccaagagcacgcctctgcgtaatccactgtgctaataggcacctttgaattgatgcatgcatgatctatctgctgccagtttgctccatcggcaccagcagcaacagctcgtcacgtcacacatgactaggcatatgtattgcaacagccttgttcagttcaccgcagtgagatgtactgatcccccctcacagctgaaatcctgcacacagcaaggtccccaccccactcatcataaactcatgcggtgaaatgcaatgtactcccctcgaatttttgtttttttttctctctctcactccgtgccgaaatatagttatttatagccatcttttttcgtccacatttaaataaataagaatgaatttagacatacgtatcaacaacattcttagattttactaatgaatgtatgtttagtctaaaatgaataatattttaggacggacaaagtaggtatgtaagcacatagcaaaaagcttaataatctaaaaagacaacgccttataatttagaatggaggagaaaatggtaggggggggggggggggggcaacattatccccccctcccccacccaagagatacttacatggtaaagtcggaacataaagctacaatggtcgacagacaaaagttacaatgctatctatagtcagttgtcatgccagatctgtgcctcttcccacatggttccatacccacaaatccaaaatcctcaaggatggatggtaaatatatccagatctacacattgtttgcaaaaatatgaacacagatagatctgggtatcatgagcatgtgtatatatgtagtgcagtcaattaggcatcaataaaaataaataaagcatcaatagatggagggtgaggctgtccatatgttgcaatcaggccaccaccagtggaataaaggacagccaacattgcaagcgttcccagccactcaaaggctaaattcacgtttgcaccagatctcggaggaaacaaaaaagatggcccctaaattagtctttgttcttcctgttgtgctcctcgccttggcgctgcaggcgatcctccggccaccgccgccaaagctctgtggctccccaggtggccctcctctgacatctcccaggatcaagctcagggacggaaggtaccttgcgtacaaagaggatggagtacagagagacaaggccaggtacaagatcatcacagtgcacgcatttgatagcaccaaggacttcccctcgcctgtttctaaggagctcgtggaaggactgggaatttacctccttgcttatgacagagctggatatggggaaagtgaccccaatcccaaccggcatgtcaagagcgaggcgctagatatcgaggagcttgccgaccagctgggccttggccacaagttctatgtgctaggggcctcaatgggaggatactcggtttggggatgcctccagtatatacctcacaggcttgcaggagctgcgctggttgtgccaattatcaactactggtggccttcgttcccagctgaattatccaagcaggccttcaacagactgattgtgccagagcagagaactctttggattgcacacaacataccttccttgctttacctgtggatgacccagaggtggttcccttcttctgcagcagccatgcaccaccctgaaatatttagcaagcatgacatggaggttcttcagaagatgatggcaatgccaagaaccattgagaacaaatcaaggcagcaaggcatttatgaatcgatccaccgtgatttacttgtcgcttttggaacttgggagttcgatccaatgaatgtcaccaatccatttcctcaaaatgagggctctgtgcacatctggcaaggacgcgaagataggttggtgcttgttgagctgcagaggtacattgccaagaagcttccgtggatcaagtatcatgaagtcccagaaggtggacacatgttcgtgatggtagatggatggacagaccgaattctcaaggcactcttgttaggagaagagcccctagatgtgtgacagtagttccattttcaaaatgtcaaaaactgcagctgccagctgttattttacttaattttattcccaatttgtacacttgtattcctacaacaccaagactagtctaattcataatccgatagactttccatcatgtcaactcattacaacagcagtgataccattgtactcatcccatacgcatatgcctttggtccaaaattgatgtcaacccagaaagcacgtagtcaaaacattcaaattggagagaggggtgttt

SEQ ID NO: 1590 - DNA, 2308 bp, Zea mays
gccccgacgaaataaaaagattctctctccttttctttttcttctctccacccgcttctctctgttgatttctggccggggttgcctggcttggttctccttctggctgctcgctcgcctgcaaccgccaagggacaggaagcaagaaggattggaccgccgtccgccgggacacctcttcctgatccaaatccaagggacggacagctaaagtagctgtggaatatggaagtcgagcaggccgccgaagtaagcgctccagagacggctgatcttaacgtgcctgctaagacgccggcacacgatgatgataaaaaaaaagtacccaatggtaatacaaatttgcaagtcaaggaaacacacaatgatgaagacgatggaactggatctgatgggtttgaactgatagatgtgaaggaaaactttgactcagcaaaagtgggggaagaaatcgctgcttcaagaagtactacggttgatacatctcctgttacagaacaaagtgaaacacaagaagaaaaaataacagcacctgaagaacaatcagttgcagcaaacacaagacatgtagagtcctcaatgttgaaccaacaaacagaacagttggaaaagctgacaaggcgtattgaggagcttgaatctgaaaaagataaactagtaaaggacttgacagaagcagaaaacaaacagagcatgcactacagttctctacaagaagctcaaagctctctttctatgaaagataaggagctggctgaagcaacagagtcgctgaaggagctgggttctgagcttgaaacctcaaaaaagaggtttcaagaaattgaagctgaattggattcatcagcagataagcttcgtaaacttgaagagctgaaggatgaaagaagcttgcatgctgcacaggaggcgaagagggcttcagaacttgataagatgctggaactggcacagtcaaacatgaaagaaatggaaaaacatattagcagtcttcaagaggaggtaaagggtcatcaagataaggccactgaccatcagcaaatagaagaatcgctgagaaacacaatctcagaactcaaggtggtacaagaggcactggagctgtcaaagtcacaagtggcagatttggaacagaagcttgcctcccaggatgctgatatcagtaaactaactgaagagttgaatctccattgttcgtctgaagaatcccttaaagagaataatcttaaactacagactgaacttactactgcgcttgaggacctacaatcaaagcttttgagtttgcaggaaatggagacaaaacttgatgaacagtcaaaagacagacaaacaagtgaggctgcactagagaagcaaaatgaacagctacttatcttacaggctgggcttgacaacttgaaggacgaaaatgaaactctccaagggtcacttgctgatcttaattcaaaactttctgagaaagattccttgttgcatcaggcagaagatgagcttgctaaagcacaattggtactctcagaagcactgtcacaaaaagaagagttggagctgaatctgaactctctcaatgagcagcatggtgaatccaaagcttttggagaaaatgcaagtcagaagattattgagcttgaagcacaaatacaggcaatgcgtgcagctgaagaggcactcaacctagagctaaaagaagctgaggcaagtgtcaaagctgctgagaagaaaggctcagacctcgagcaacaactcagtgagattgagaataaattagttgcatcaagtgaagaaatagagttgctgaaagagcgtattcaacaagaagctgctgtatcagcagaaagaggaatgcagcttgaagaaacaatgaccagtgcagagggatacaaagaaaaaattaacgagctacaatgctccctagattcctcgatgtctaaaaaccagctacttgaacaagaagtcaaggagctgactgataaatgttcagagcatcaagaacaagcgcattcagttcagcaaagaagtctggagctggaagatctgcttcacacatcaaagactcatgctgaaggtgcatactctcggacacaggagctggagcaggagctgaacagcacatatgaaaagctcaagggggttgaagaagaacttgagcagtacagaagcaaggcttcgcagctctctgatgatctagaagcttatcagacaaaagcagctagtcttgaagctgtggtggaagcagcaagcgagaaagagaaggagcttatggagtcattgagccaaataactgaagaaaaaaaaaaaaaaaaaa

SEQ ID NO: 1591 - DNA, 1999 bp, Zea mays
gggccggcaggttgtccgccgcatccccttgcgttgcgttcacggttctcctctctgtctctcgcgcacgggatctcgttctccgcggcagctggtgtttcgctcccttctcgccctccgacggctggtgggctgccggcgccggcgccgccaaacgccaggtgctgaggccttcgccagtgtcttcgacggcgacgagcacgtaccaggtattcctataccttctcttcccttgacctgctgagcgaagccgagcactcgaaccctaacctaaagctctttggctatttgatgcctcctaactccgaaattttttaagaagttatggggcgtacatgtgtacaccaatgtccctttgctgggtcctcccccggccatgccatattgccatgccccgaggatgcctggtgttaaccggagtgttgttttaggtccataggaaggacatgaacttcgtcttaacagtgttattcaaccgccactgttacatcattcgatcaatatgccggcttcatgttcctgtaatgatggatccgtttttttttttacttttgttgtttttttccatgccaaagcaccaagcatcatgtcggaaagaggtcgcctggcaggacgattgattgataaccgcagcagagggtaccatgtagtccctctagttgaggatcccagaggccatcctgaagtcctcgtggatggggatcggaggggctactctgacattcgtggggttcagcagcgtcggggctaccctgacacccatctgcttgaggaacctaggggctaccctggtgttcgtgtggtcgaccataggggctatcctggcagtcgtggggttgatgaacgcagggcctatcctgagctccatcaaggctcacgcatgagggcggctcctcccccttacccagctgccttcgaggatgagcttgagttacaggaagttgaactccggaggctttcggcacataaccgtgctctagttgaggagcgtgaactgttaagcagggaaatacaagctggaaaagatgaggtccgccacttgaatgtgatcattgctgacattaacactgagaaagaagcttatatcagtaagcttatggacaagaggaggaagcttgaagctgaacttggagcaagtgagcacttgtgtgatgaggtcaggcatcttcgtggtgaaattgacaagctcgttaccgctcggaaagaactatctgcagaggctgcatctctcgtggaagagctgaacagggagcaatctgttaaacagcagctacctgtgctgaaaacagaaattgatggtctgcaacaggaacttgttcacgtgaggactgcttgcgggttagagcagaaggggaatttggaattgctggaacaaaggaaggcaatggagaagaatatgctttctatggcacaagagatcgagcagatgcgaggcgaattagctaattttgaagttagaccaaggggcccaggtggagcatatgggatgcagattgggagttcggaagtgaccttcactaagaacccatatgaagatggttataatgcttatgtgggggttcctgagaaagatcctttgcatcctcctgaatatgcttcgtgggggacatatgacaggagtcgccttcagtaccgctaagaccagaacttagtcattggagaaagaattgccttctaggttttaatggccatgtcttgtcgtttacagtaccgaagctttatgcctgctgcttggttttccattaagagttgtccttttcaatgcttctaatcataactttttccattacaaactggctagattattaaactattggtaccaagatgtccagcaatgtgcggaaagcaccttacatacatgtggttttgcgtgtctgttgacttcaccttctaccataacgtggatgaggatgtgcatagcttccttgtatcccaaatccacgggtttctttttcttctgcggggatatatatgtatttgcatgggtgttctgctggaa

SEQ ID NO: 1592 - DNA, 1579 bp, Zea mays
acacccatggttgaacttgaactggagaggcagtagccagagtgtgagctgacggcggacgtgctcgcctctcctctcctcacatttccggctcccctctccgcattccatggcaccgcattaccggtatttttagccgccggaggagacgggttgcgtagagagaggggaaaccagagctcctgactgttcctctctccctcctcacgggcgggctccgtctgttccgtccatccaccgccccggtcgtctcccggccagatccctctcctgcaaggtttctttgcgagtggccggagaagatgatgggcgggttcctctccagggtcctcctgctggcttttggctatgcctatcctgcctatgaatgctacaagaccgttgaactgaacaaaccacagattgagcagctcatattttggtgtcagtattggattttagttgccctgttgacagttttggagagatttggagattttacaatatcatggctaccgttttactcagaagcaaaggtgttgttctttgtatatttgtggtaccctaagacaaagggaactacgtatgtttatggaactttctttaagccatatatttctcagcatgagaatgaaatcgaccgaaatcttcttgagctcagagctcgagccaccgatatggttgtcctttacttccataaggctgcttcggtagggcaaaatactttctttgacgttttaaaatatgttgctgcccagtccccttctcggaaatcaaggctgcaccctcatcaggaaccacagcagcagcaaccacaagtgcaggtggagctgcagcagccgcaaccacaaaaacaagcagcacctgttatgcgcagaggagcatctattgctgctcggcaagcagcaatggcacagcaatctctggagactatacccgttccatcttcacccaagatcaagcgtcaaacatcagggagacctggttcggtggcatccacaaagcctgcagcagctgcatccacaccaaaacctggcggtagcccaaagaaaggtgaggtcaaacctgctgtcgacccagttcaaactccagccacaagtgcagattcaccaaaatccgagcctagtgccccaccactttctgagaccgaagaagtagacaacatggcaatcgatgaggtcagtggtgatgctgcagagggcgcggaagagcttgaccctgcgctcgaggagacgccgatggaggagacgatccgtgtgacgcgcgccaagctaaggaggcgcacggccaccgaggattctgctgggaattagctgcatgccgttgttttccctgcacattgtattgatctttttccgagttttaggctcacatgttgtttgctggaatggagatatgttgttgttcacttggttcttgtgacacagagttaattatcttatttccgtgctttcttagtacctttttgtgtgatttaagttgtaaataacagttcccctccgcatttgtatatagtttagcggcatgggcaacgaatgcctgtaattgcaacattacacgcttcaatctggtcactccttgggtatcttctcaagatgtg

SEQ ID NO: 1593 - DNA, 1262 bp, Zea mays
caccgatcactcgtcacagcgagtaccgagtaggagcaaccgcttgcgtcagacgcacactgacggagagtgatcactgatttctggtcatggcaaccgtaactgaggaagttgctccggtcgtcaccgtctccgaggagccggcgccggaagcggcgaaggaggtggtggagaagccggaggaggggaagaagcccgacgaggagggtgacgagaggaagaaggccgaccccgccgccgagaaggagaagaaggccgaccccgccgccgagaaggagaagaaggcgaggaagccgcggagcaggaagcccaagtccgccgggctgcaccacccgccctatttcgagatgatcaaggaggcgatcctgtcgcaggacggcgggaaggtcggggcgagcccgtacgcgatcgccaagcacatgggggagaagcaccgggacgtgctcccgcccaattaccgcaaggtgctggccgtgcagctgcgcggcttcgccgccaagggccgcctcgtcaaggtcaaggcctccttcaagctcgccgccgccgaggagaggaagccctccgcggccgcgaaggcgaagaagaaggcgtcggcgggaatggccaagcgcaagagggccgccgcgccggccaagatgaagccggcggccgctgcctcggcgccgtcgagggaggcacgtaaggtgcgcgcgaagcgagcgaggaaggtggccccggcgcccgcgcagcccaagcccaagccagcccgcgccgccgcttccggtgccggcaagaaggtcaacaaggccagcgcctgattagcggcggccgtcctggtccccccgcgcgcgcctccgtgtattatactagccggtagtagcagtaggagttgcaagtactagcagcgtcgtagtcgtgatgatgttgtggtcgtcgtctccgccggcccgatcgatcgggcgctctgttccgccgtgtggcagagttttgtaaataactagtctggtgtgatgcgctcatggcaataaagcgcgcgcttctagcttccttgatgaaacatccatgatccattatcagtgcagtcttgtggttatcgtgttggttagttcgatcactggaactggctcatcatcttcggcttctgggcgaggatgtggtggaggttgggttctgtagtgagtggagtatgttcacgatttcgtcgttgccaatgaacacccttcacccattgtgactcccggtcttttctacttcagtttcaccgtaatgacggcatgtttggg

SEQ ID NO: 1594 - DNA, 1389 bp, Zea mays
atgaagaacgtagaccgaccaccttccaatccaaaacgcatcataatccagtctactcaggagtgcttcagcgttgacataccccgtgctccggcggggactgttagacccgagacaaggcgtgctgctgatgaggatgatgactttatgccatcatccaagaagcgtaacttggacgacagccctgggaaagttttgaagaaggtagtcactaagcggcggaaagcagtgcccccaccccgacagcagaagctgaacgtcagatgcaacccccaagatgtgttagtaagcatacagatattaaatgacagacagcaacaagcaattgcacgtaggggattttctagtattcttgatatgagactggatgcactcggcagcagatcacacttagcttggctgatggaaaagctcgaccccaatgacatgacaattcgagctggccctgggaaggagctgaaaataacaaaggatacggtacacctaattttgggtttaccgaatgctgggggaggaactgcattgggcatcgatgaagctgtggttgccaacaatttgagagctgaacttgggctatcgaaagaagattttggggttacagctctacaagatcgtttgaggaaaggttctgacgatgatttgagcatcagatgctttttcttgatattgttcaataggttgttgttccctactgccagctggggaataacgaaccatgaggttcttttaaccgagcagatggatcgtttccaccagattgactggtgtcagcttattttcaatgatttatgccaagctgccaagaagtggcataacaggagcgttacgaacgtttctacaaccatctatggatgttccatcgttattcttctgtattatttggatcatttgcatgactcagcggcacccctgaacaaacgtggaacaccacgaatcaaatactttgataggaatattattcaagccctgacaagagctgacaagggcaagatacgcaaaggagaagaagcatttggacattgctcgcataagaccaggaccaacgcttttgatgttcctcgtcctgacccatctggacagcactcaattcacatcgaactcccgctcatcagggatttgatatcaagcaagcttaatcagcttccatcccgccaccgcatgggtttcatagagaagctgtcacattttgatgcggaggttggtaaggcgtgttcagttattaaacagaatcttcagcagattgttgagaaacaattcaatctatctgatgtttttggcgagttaattgatgaggtcctccgtgccgaggcgggtgacaacgaagatgcttatgatgtgcagaaaaccacatcaaaatcagatgatattcttccccagacagctagttag

SEQ ID NO: 1595 - DNA, 270 bp, Zea mays
ggcgcaagcggccgcagcgcgcagagctctggaagggtgcgacaacagcatagggacatgaagagagagaaccacaggagagggagggagaagaacgacaacaccgggggagagggagaaagaggggagcggcggcgtgggggacaaaggatagaggagggtggcggtgctaggggagtgggagaaagagagcggcagcgcgggggagaggcttgctgtgcggacagggtcagggtggtggctgagagggatatgagaagtgtaggttag

SEQ ID NO: 1596 - DNA, 1463 bp, Zea mays
aatagtcgccacgctcatgctcaggcccacttgtgacgaaaggaaacaactagtccgacccataggctcggtcagcccaccccagacctttccccttccgtccccggccggcgccaacgccactccagtgagccgagggcggagacggtcacggtgggcagagtgacacgccgcacgcctctccgccccgctccgctccagattgcgcgcacccacccatggcgctcgccgcttcccaccacggcctcctgcccttcgcccccgctgccacgcctaccccgtcacgggggcacctgcgcttccgcgccgcgcgccctctgccccgccccgcccggagaatttgttgccaatctatcaactcagctaatgtgttgggagcttcttcaacgacatctgatgaggcagtcccagtcccagttgtccagatagatcaggactcagaccgtgatgcgaccattgtgcagctaagttttggagatcgtttgggggcgctacttgacacgatgaaagcactcaaggaccttggccttgatgtcacaaaaggaagtgtgacaactgactcagctgtcacacaaacaaagttccacatcatgcgatttgggcgcaaggttgaggaccctgacatgttagaaaggattcggctaaccatcatcaacaaccttctccagtaccatcctgaatcaagtgagaagttagccatgggtgaattttttgggataaaacctcctgagaagaaggtagatgttgatattgcaacacatatagttgttgaagatgacggaccaaaaagaagcatactttacatagagaccgccgaccggcctggcctacttcttgagataatcaagatcatcgcggacacaaatattgatgtggaatcagctgagattgatactgaaggtttggttgcgaaggacaagtttcatgtaagttacagaggtggaaaactaaacagctccttatctcaggcgctgaccaattgcctgcgttattacctccgaaggcctgagacagatgaagacagctattgattgttgtgtttgtcgaaccttcctatagtgcattagaatcagaaactttggcttcagttccttcgctatgggccccttgtactgctgcaaatggagttttccattgtagctgataaagtgccgacaaggtgcatccatatgtgcataggtggcactgaatcggggctcactggaccagtttgatattgtagtaatatatatacagctgggagcaacataatttaggtttcgatcatcattatcccatttgattcctgttataagggatcacattggaaaaccctcacatgattgatgttgtctgtattctgtaagttggtgcaatccatttgcatgtaaaactcagctgcgtactgtggcgttctatgtagtggaataaataaaagagcattacgaaatcaccgagcagcttgctcctgctttccaatcaga

SEQ ID NO: 1597 - DNA, 2550 bp, Zea mays
atggaggtcccaacatatacctctgaggttctacaccctacagcatatgtatcggaacctgattcatcctctgataacgcatgcgactgggttatccctgaatacaccagtacacctttcatgccagcttcaacacaaactgaggatgtcggttcacccgatatgtctactgagccactaagacgtaaacatcatgttctgcgtggtgaaagacaagctatcttagcccgtcaaaacaagaaatttgaagcaaacgttgcacgtaacgtggctactttgactgaggatactatcagtgacgtcggacaaatggatgattcgacacaacccggttcaactatagagatcaacaacactgttgatgacgatgatgagggtgtcatattcggagaggataatgatgagaacgagggatatatattcgctgatgaggacactaacgaggacttcgagatagatggtactcaagatctatctgttgtcactgatgtgcctgacccgtacgacaaggtctacagtaacatccctgaagaaacacatatgctgaagcacgttcccgactgtggttattgcactgcgaagaagtttgagtatgagccgcttgggttttgctgtcgaggtgggaaggttgagctagccccactagagacccctccccagctcaggaggttgtgggatagtgcagactctgatgctaggcactttcgtgataacatcaggttttttaatggccatttttctttcacttccctgtactgttgcctcgacagtatgacaactaatatgagggattctggtatatacacattccgtgcacaaggcatgatgtaccataatatcaagtcattcggtagtgaatgtggggcagatcataaacacctagagcttcacttttacgatgatgatcccagtctcgagcatcgattccgtaagtgtcgtgaagatcagattcaaaaagaccaagaggttattaaacagatagttggcatacttcgtggaaatccatactctgagcaccttaggagcatgggtcatgttgagaaccttgctgactatcacatcgcattgaaccttgaccagacgttgaatcagaagacatataacacacctctcacttcggaggtggccgctgtctggatcgaggggagcgaacgacgaggccagttcagcaagagtgttatgctacatgggaaggataggtcaagccatggcatccgctcataccatggatgctacgatgcgctatcatatccactgttcttccctagaggtgaacttggatggcatgcaaatatcccaaaggttggtgtatccatggacgaagtggatgcataccgggcgacacatagggcaagtaatgcaaatgatgcagatgcggaacctcctacccatctatgtgtgtccgtgcgtgattactactgctacaaattccagatacgtccaggggtattcaatccaatacttcatggtaaacggcttttccagcagttcgcggtcgacacatacattaagattgagagctcccgtttagatttcatacgtaagaaccaggatcggttaagggcagatctataccggggcttggtggatagcatgttagatggcgatgttagaggagagaaggttggaaagcgaactgtgttgtcaccgtcgtttattggcggtcctcgtgacatgagacgtcgatatatggatgctatggctctggtgcggaagtttggtaaaccaaacatctttcttaccatgacatgtaaccctaactgggatgagatacggagagagcttctacctggacagacaccgcaagatcgtccggatcttgtagtgcgtgtctttcatgcgaaactacaggagctaaagcataggttgactaaacaggatattctcggtaaagtccgagcctacgtctacgtcatggaatttcagaaacgaggtttgccacatgcccattttctactcatcatgcaaaggaagtacaagctcacgtgccctgaacagtatgaccttttgatctcagctgagatcccatccaacaagtaccctgaactgcgaaagatggttatcaagcatatgatgcatggcccgtgcgggtcgctaaaccctaactgcccatgcactaagggtcgttcatcgtgcaagaatcaatacccccggcatttccgtgaggcaaccatgcaagggaaggattcatatcctaattacagacgtcgtgacgatggacgtaaggaaaaggttcgaggatgtgaattggacaatagatgggttgtcccttacaacccttacctccttcggctcttcaactgtcacatcaatgttgaggcgtgtgggagcatcaaggctgttaagtacctgttcaagtacatatacaaaggccatgatcgtgcgtctgttgttatgagagatgcgagtaaggaaaatggtgatgaaactgaagagaagagatgggcgcacctggtgggtgctcgtctctggcgaaggtctggctacctggtgcagggtggcggagatgtatctgagcgaaagaaactgggaatggcaatgcatgtatag

SEQ ID NO: 1598 - DNA, 3135 bp, Zea mays
gctgtgagcggaattagagtcgggcatttcgttccgcttcgccgcggccgccgcctccgcctccgtgtcgccgccgccccgcagaaccctaaaggccgccgccaccatgcgccgcctcccgcccctcccccggcccgcggccgccgtcgcctcgacatccaccccggacatcgtcgcggagctcggccgcgtcctctccacgcgccgctggaacaagggcagcgcctacaagcggctgtccccctccgtgacggccgcgcacgtggccgacctcttccgcgccccggtgtcccctctcgacccggccaccgctctggccttcttcgagtgtgtcgcgcgccgccccgggttccgccacaccgccgcctcccacgccgcgctgctccagctcctcgcccgccgccgcgcgcccgccaactacgacaagctcgtcctctccatgattagctgctccggcaccgcagaggacgtgcgcgaggccgtcgacgcaattcaggcaatccgtcgagtgggtggtaagcgactcgtgctgtccccaaagtgctacaacttggcgctcaggtcgctgctgcgattcgacatgacggagtatatggggaagctgtactcgcacctcgtgcaggagggattgttgccagacacggtgacttacaacactatgatcatggcatactgcaagaagggcagtctcgccatagcacaccggtatttctgcttgttgagggagtctgggatgcagatggatacatacacatgtaatgcactgttgctggggtactgccgaacaagtgacttgagaaaggcttgctggctactcatgatgatgccgctgatgggttgcaggaggaacgagtactcctacaccattttgattcaggggctctgtgaagcacggtgtgtaagggaggcacttgtgcttgtgttcatgatggtacacgatgggtgctccctgaatctgcacacgtatacactcttgataaaaggtctttgtaaggagggcaggattcatgatgccagggggttgcttgatgaaatgcctttgagaggggtggtaccaagtgtttggacttataatgcaatgattgatgggtattgtaagtcaggaaggatgaaggatgcattggggattaaagcactgatggaacaaaatgggtgtaatccagatgactggacatacaacagtctgatttatggcctatgtggtgggaagctagacgaagccgaagaattgctgaatggcgctattgcaaggggcttcacacctacagttatcacattcactaacctgattaatgggtattgcaaggctgaaaggattgatgatgcactcagggtaaagagtaatatgatatcaagcaattgcaagcttgatttacaggcatatggagtgttgattaatgtcctcatcaagaagtgtagattaaaagaggctaaagagacgctgaatgagatgtttgcaaatggtttagctcctaatgttgtcacttacacttctataattgatgggtattgcaaggttgggatggttggtgctgcactagaggtcttcaaattgatggaacatgaaggctgccatccaaatgcctggacttatggttctttgatatatgggttaattcaggataaaaagcttcataaggcaatggctttaataactaaaatgcaagaggatgggataactcctggtgttatcacttatactactctgattcaaggccagtgcaaaaaacatgaatttgataatgctttcaggttatttgaaatgatggaacagaatggcttgacacctgatgagcaagcgtacaatgtcctaactgatgcactatgcaagtctggaagagctgaagaagcttattcatttcttgtcaggaagggagtcgtcctcacaaaggtaacatatacatctttagttgatggttttagcaaggcaggcaatactgactttgctgccgtccttatagagaagatggtcaatgagggttgtaaggcagatttgtacacatatagtgtattgttgcaggcattatgtaaacaaaaaaaactgaatgaagctttgtctatactggatcagatgactgtaagtggagtcaagtgtaacattgttgcttatacaataattatcagtgaaatgatcaaagaagggaagcatgaccatgctaaaagcttgttcaatgaaatgatttcatcaggacataagcctagtgcaaccacatatactgtattcattagctcgtactgcaagataggtcgaatagaggaggctgagcatctaattggggaaatggaaagagacggtgtcacacctgatgtggtaacctataatatattcattaatggttgtggtcatatgggatatattgatcgtgcattttctactctgaagcgcatggtggatgcatcatgtgagccaaattgctggacttattggcttttgctcaaacattttctaaaaatgagtttgatcaatgctcactatgtagacacatctggcatgtggaactggattgaactgaacatggtttggcagcttcttgaaaggatgatgaagcatggtttaaatcctacagtagtgacatacagttctatcattgcaggattctgcaaagcaacacgactagaagaagcatgtgtgcttcttgatcatatgcttggaaaagatatatctcccaatgaagagatatacacaatgcttatcaagtgttgttgtgatatcaagctctttggaaaggctgtgtcatttgttaccgacatgatagaatttgggtttcagcctcagcttgagtcctaccactaccttattgtaggcctctgtgatgagggggactatgacagggctaaatcactgttctgtgacttacttgggatggactataatcataatgaagttgcatggaaaattttgaatgatggtttgctcaaagctggccatgtggatttttgttcacagttgctggctgctatggataatagacactgtcggattgactctgagtcatattcaatgttgactgatagcattcgtgaggcttctggcagtgtggtcagcgaactcagaggagaagctgcctgaccgatggtaaatttcattttatatcatttcctactgtgcacaatttttttctgtgtgtcaggctc

SEQ ID NO: 1599 - DNA, 2427 bp, Zea mays
agcacgttcacgttccgcctcagagccccactgacattgtggtcccatctgatgtggtccccgtcagtaagtgacgccattgcttgagaagcgcccccaccctagacgctgctggcactaccggccgctacttaaatggcagcccagccgccgagcaaccactcccgtccgcttctcccctctcctcgactcctcctcacgtcacgcaccccatctcttctctccccctctcgtctcgtccagtcgtcccccactctacccagctgccctgctctgcgtcgctcgccatggcgtcctccacggggagcttggagcacggggggttcacgttcacgccgccgcccttcatcacctccttcaccgagctgctctccagcgcaggggacatgctaggagccggcgccgatcaggagcggtcgtcgccgagggggctgttccaccgcggcgccaggggcgtgcccaagttcaagtcggcgcagcctcccagcctgcccatctcgccgccgcccatgtcgccttcctcctacttcgccatcccgccggggctcagccccgccgagctgctcgactcgcccgtcctgctccactcgtcctccaacatcctggcgtctcccaccaccggcgccatcccggcgcagaggttcgactggaagaaggccgccgacctgatcgcgtctcagtctcagcaagacggcgacagccgggctgccgccggcggcttcgacgacttctccttccacacggctacctccaacgccgtgcgcgcgcacacgacgacgacgtccttaccttccttcgaggaggagcagcagcagcaagtcgaaaaagccgccgtcccgtcgagcaacagggcgagcggcggcgggaacggcaacactaagctggaggacgggtacaactggcgcaagtacgggcagaagcaggtgaaggggagcgagaacccgcgcagctactacaagtgcacgtaccacagctgctccatgaagaagaaggtggagagggccctggccgacggccgcatcacgcagatcgtgtacaagggcgcgcacaaccaccccaagccgctgtccacgcgccgcaactcatccggcggcggtgcggcggaggagctgcaggccggcaacagcagcctctcggccgtagcggcggccggctgtactggaccggagcactccggcgccaccgccgagaactcgtctgtcaccttcggcgacgacgaggcagagaacgggtcgcagcggagcgacggcgacgagcccgacgccaagcgctggaagcaggaggacggcgagaacgagggcagctctgcaggcggcggcggcaagccggtccgcgagccccggctggtggtccagacgatgagcgacatcgacatcctggacgacgggttccggtggcgcaagtacgggcagaaggtggtgaaggggaacccgaacccgcggagctactacaagtgcaccacggcggggtgcccggtgcggaagcacgtggagcgcgcgtcccacgacaagcgcgccgtgatcaccacgtacgagggcaagcacaaccacgacgtgcccgtgggccgcggcgccgccagccgagctgctgctgctgctgcggcggcgggttccggggccttgatggccaccggcggcggccagctcggctatcatcatcagcagcagcagcagccatacaccctggagatgctgagcagcggatcgtacggcggcggcggcggctacgcggccgccaaggacgagccgcgggacgacctgttcgtcgactcgctcctctgctagcgtcggggacgcggagtcggtcggtccacccaatctcgctgcggcgggcgtctgtagagcctgcgttacgtgtacggcgcgtgtacgtatacggccgtagcgtacatgctcgcctttgcactcagatgcacaatataacacacagtcacacacacacacacacacacacgacacacgctgtatacactggatcctaggtgtttttttagcttagctaggaatgcaaatttcttgattcgttggagggttttttttctagcacgcggcgcggccggtgcccatctgtctcgcaccgtcgcacgcctcttcatacactctctcctgtactcggctactagtgctactgcatgtagacatgtagtgaatgtgaagtacaaagaatacaatacaacggagtatagtagtgtagtcttgtatgcatatgtaaactactatactctgttttacgaaatgggaaaaacgtagattgtttgggtttcttcgtggcaggtgtttgggttgtacgtaccatgcatttgaattttatatattgaacttgagaggtgacatgccgccgctcttggtccggccgctacggaggctacctcagctgctcatccttatcgcaatgaggcagcgccatagtctaatccgatctcgcgtc

SEQ ID NO: 1600 - DNA, 2103 bp, Zea mays
ttctcgacttgaacacggccagcgtctcatcggctgggcgtggtctacactgcacgcacacttaccaccagccaccgcaagtgaatcactagccggaagacaggccaaccccactgctagtgctaggaatctaggagcgagaacgagagaccatgtcctcagaggccagcagcgtcgtcgtcgccgacgagaatggagcggcggagacggtcggcgtcgggcggtacgtggaaatggagaaggaccaagagtcgagcgcagccaagtcgcggctctccggcctgctctggcacggcggctccgcctacgacgcttggttcagctgcgcgtccaaccaggtggctcaggtgctcctgaccctgccctactcgttctcgcaactggggatgctgagcggcatactgttccagctcctgtacgggctgatgggcagctggacggcgtacctcatcagcgttctctacgtggagtaccgggccaggaaggagagggagaaggcggacttcaggaaccatgtcatccagtggttcgaggtgctggacgggctgctcgggaggaaaaaaatttgttgcagccgggctgcaaacggcctggtttgcagcccggctgcaacaaatttttttccgctcgggaggcactggaggaacgtcggcctggccttcaactgcacgttcctgctcttcggctcggtcatccagctcatcgcatgcgcaagcaacatctactacatcaacgacaagctggacaagcggacgtggacgtacatcttcggcgcctgctgcgccacgacggtgttcatcccgtcgttccacaactaccggatctggtcgttcctgggcctcgtcatgaccacctacacggcgtggtacctcgccgtcgcgtccctcatccatggccaggttgatggcgtgaagcactccgggccgaccaagatggtgctctacttcaccggggccacaaacattctctacactttcggagggcacgctgttaccgtggagatcatgcacgcgatgtggcggccgcagaagttcaaggcgatctacctgatggcgacgctgtacgtgctgacgctgacgctgccgtcggcggccagcgtgtactgggcgttcggcgaccagctgctgacccgctccaacgcgctggcgctgctcccgcgcacggcgttccgcgacgccgccgtcgtgctcatgctcgcccaccagttcatcaccttcggcttcgcctgcacgccgctctacttcgtctgggagaagctcgtcggcctgcacgactgccgcagcctctgcaggcgcgccgccgcgcgcctccccgtcgtcgtccccatctggttcctcgccatcatcttccccttcttcgggcccatcaactccgccgtcggctccctcctcgtcagcttcaccgtctacatcatcccggcgctggcgcacatgatcacgttccggtccgcaacagcccgtgagaacgcgatggagccgccgccgcggctgctggggcgttggacgggcgcgtacatgatcaacgcgttcgtggtggcgtgggtgctggtggtcggcttcggcttcggcggctgggcgagcatgacaaacttcgtccgccagatcgacaccttcggcctcttcaccaagtgctaccagtgcccgccgccaccgcccctgccgttccccggcggcggcctcggcaacatcacgatgccattcaacggcgacgggctccctcctaccccggctccttcgccggcgcattacttcttccgccaccaccggcatcacagccaccaccgcgggctctgatgagagacgatgaaatgaacccggcttaccaccagtagtgcgtgcgtggcacactgctgctttagtttgagctgatcccttagttaagtctagcttaattagcacctgcatgcagcatcttcgttctctcctctagcttgctggtgtcgaacgcatgctttcccggtttcagtgactttagagaccctgcctgagcctgacacgaggggagtatcactgtatcagtactagcatgcagtctcttgtgttccgggctgtgtcctggcgtggagctcaaagaaggggaatccatttctacagccgcatagag

SEQ ID NO: 1601 - DNA, 1148 bp, Zea mays
ccacagacaaagttgacaaagggcgcccaacccacggcggaaagcgacgcgcgccagataaatggcgggggagccagcagcaacctacttcctgcttcctccagaatcggtcagccgcaatccttccaccccgtaccacgcctccccctacccccaccaccaacaagcatgatttccccacgccccgcgctctcccccagcttcctcgccttccggtccggctccccggccgcgtcgccgccgtcctccccgcgcctccacgcgccgccgcccctctccgcctccttctccaccgtcgccaccgcggcaccgggccacgcagctgccagctccttctacgacgtcctcggcctccgccccggggccagcgcgcgggaaatcaaggccgcgtaccgccgcctggcgctcgccgtccacccggacgccgccccgcaccccacatcgtccgccgaggacttcatccgcgtccacgcggcctactccacgctctccgatcccgacaagcgcgccgactacgaccgccgcctcctcctttccggcgccacagtacggcgcaccgtcgctctaggacgctcgccctcgttcccagcgcaccgttcccgccggacatgggagactgaccagtgctggtgatatgtgagaaagatcttcgacttcgacgtctacgactggtgcggtctccgcagtctccgtcgggccgcagaaccttccaatgaatgggaacgcgaagatccccgcaaacctctggactcacacaaagcgtagcgcagccttgcatgcttcgttgcgggcttgcggcctgtaatgtaagaatgttaaaatatatgatgatgtgtaacgtcctctgttttgggtcatggatgtgttgtatgtagtgttagatttagggtctaaagtgctaaactttagtattcaataacagtttagctccttaggtgagctaaatttatcctgcaaaagtttagcacatgagattcaaatagatccttgatatagacataattcatactacctctatctcaaactaaaatttccttttttggtaattaatagaatcatataatacttgatgtatttgttttatatatgtgtctagattcaccatggaccatttgaatatacacataaaaacgaacaactaaaacaaa

SEQ ID NO: 1602 - DNA, 1838 bp, Zea mays
atgccagttaaccataaactaacccccttgccccaccgctgccctacgcttctccctcctacgccgcaggtctctctgtcgccgcctcgtatggctgctacagctcctctaacctcccaacaccatgccccaccaccggctccctcccgctcccctacttcgcctcttctccctgcattccctgctttaccaccgcgccacgccccttccaccacctccgcccatcctcctcctgttggtgttacccccatcagttccttgtcggaaactgtcgagtgtgcctccctgactagctcggtccgccagggatccctcgaagtttttctctctctcggccggcacgacgtggccgctgcattcgcatttgttcgtataactccgcaattggcagtgtctgccccggcaccatttattcgggaggcgatccgtgctgctttcccgctcatcaccttcgaggttctcccctcgtcgttcggatcgttgctggtgcgctttcagtcggcaggtgattgtactgctgctgtgagtcgctcccccctattgcatgaggatgtggcgatcttcttcgagcgccacgacgggaggagtgtcaaacagccggttgatgtgcttgcggtcttgtctgttcatgggttccctctgaccttctggcacgaggagttcatccgccaggcgttccaagtattttgctcagtcgtggaagtcgactggcgttgcacctcgggcctcgactactcgtctgttcgggttgtggtccgcgtggaggaagtgacaagcattccagcagacctttgcattcatgattcttcatctggggattccttcgtttgtcaggtgaagctggttgattcgtggccgctgccggtggattacggccagcatggcacgctccgcccctacttcggatggcctccccatcctgtgctgccgccacctgcccccacgccccaccgcacaacgcccctgcagcccctccgccaccacctatctcgcaaccttgcccgccagctcacagtcgtccccctcgccaccctacagcccgatcagtcgcttgtgacgtgcctcgcccgcacactactggctctggtccttaaccagccccaccgccttctgctcccctgcctaccatccttccccatcataatccacaaaaatatcctccccctgcatcctgcacccgccttctcagctccattccctccctttcccctcacatcatgctcgactgttgcgcctgcgatcgctgacgttgaagtgctctccccctcccccctccccccctcctccctgcaacctgacccagaccatgaatcttcagcaagaaaatctcgcgcacgcaccaaacgtactgctgacctcgcagccaaaaacaagaaaatagctccagcttcacgccacagtgtccgtctgcgggataaggaacccgcgaactacgtggacatgtcctctaaggcgaccaatctgaaagctctgaagaacgagctggcaaactgctccaataatctcaaggcaaaggtcaagcgccatggtctgctgcgcaaatgcactctgaatgctgctgacctgagggcgctcgctggcaccatagcgttgccggctctggctactgctgaactggagcaggcgctggaaagttccacatgttagaattcaacttctgtgctatggtgaggctaggctcacatcctcctagcaagttatccccctgtatttcctattatgtttgtttctcctcagacttaatgtatgtcgctcttttacctccagttgctcttcacattcctcttgttatctggatgttctgctggtgttaatcatgagttcaaatcgtcttataa

SEQ ID NO: 1603 - DNA, 4141 bp, Zea mays
tcggctggagatggcctaaagagcaccgcacggagcacctccattcccacctctcccctagcctagcacacctctattcaaaactaaaatcaaaactaaaacacaatcacctccacaccactcatacagcagcagagccgcattgccaaaccgggccagccgcagtgcagcgcccccacaccgcgcacgcgccgcgccggggaggcgccaccacccgtccaccctacgcgctttcgcctggcgctagcgctcggtagtagtagcaggctagctgcgggaggaggcgagattccaaaggggaaaaggcgccgggagcaaaagcgtaggcgaggtgcggagggggaaaagcggcagtgggcagcggggaggagtccagtccaatccagccggatcacggccgacgcggaagcgcaggtgtgactggctggaaggcaagtgtgctcggcaagcgacgcacgccaccgacacctctcccgtggcgatcggagccgcgcgctagatccaacaccctcaccggaatcgcggcggattccggcgccggcggccccgctccggatctgcattccgcgcaggggcttctcctgactgcctcgcgccctcgtctctccaaatactctgcaagcaatggatcggcgcagctggccttggaagaagaaatcatctgatagatcatcaaatgcagatgcgttgcagaattctaatcatgctgaacaggaagataaagctccaaagtttgtgcaaatttcacctcaaacatattcacatcttactgagtcagaggaaaaagtaaaagttttagaagaaaatgtgaaggtcttgaatgaaaaactgtctgctgcacaatctgagatcacaactaaagatgctcttgtgaagcagcatgcaaaggttgctgaagaagcagtatcaggttgggagaaagctgaagcagaggcctccgcactgaaggttcagctagaaactgttacattgtctaagctagcagctgaagaaagaggtgctcatctggatggtgcattgaaagaatgcatgaagcaagtaaggactgttaaagaagaaggtgagcagaagctacatgatgtagtatttgcaaaaaccaaacagtgggagaagataaaggccgagttcgaagcaaaattacttgaatttgaacaggaactcataagggctggtgctgagaatgatgcactcacaagatcacttcaagaacgggcagaactattgatgaaaattgatgaggaaaaaggtcaagctgaagctgagatcgaaattttaaaaagcacaattcaatcaggtgaaagggagataaattcgctaaaatatgaattgcatgttgtctccaaagagcttgaaatccgcaatgaagaaaagaatatgagtgtgcgctcagctgatgtagcaactaaacagcaccaggaagatgtcaagaaaatatcaaaactcgaagctgaatgccaaagattacgcggccttgttcgaaagaagttacctggccctgctgcactagctcaaatgaaaatggaggtggagagcttgggtagagaatatggagaccacagagtacgaagatcccctgcaaagaattctagttttcatcggcctatgtctcctgttcctgattatgcaatggagaacatacatcacatgcagagagacaatgagtttctgactgctcgtttattaacaatggaagaagaaaccaagatgcttaaagaggcattggcaaagagaaacagtgagctgcaatcttcaagaagcatgtatgctaagacaacaggaaagctccgaagcttggaagttcaaatgttgactggaaacaaacataagagtccatcaactccaaacatggatattcactttgatggtgcatttagccaaaatggaagcaacccacctagcatgacttccatgtctgaagatggggtagatgatgaaggaagttgtacagaatcttggaccaatgctctggtatctgagccctgtcaattcaaaaaagagaaggcagccaagagcagcacgacagaaagctccaataggttggagctcatggatgacttcttagagatggagagattagcatgtctgtcttctgaagttaatggcaatggcagtactgttgacaagatgaaggtagacaatgttggggctacttttgctggctttactgaaagagatggtgttaaagatttgcagtcagcttcaccaatgtcagaaactccatctaataaacagtgtctgtctgagaaatctccgcttttgaatttccagtcaagaatatcttccttactggattctgaatcaccagagaataatgctggaaaggtacttgatagcatcagaaacattctaaaggatattgaagatgaggcagattcggtgaatgtaaatgggactcatccttcagatgggaccttaagttcagagagcaaatttgccatggatcaagatcttaagaatgccatattgaaaattctagactttgtgaagttacttgatcaagaaatctccaagtttcaaggccagtcacctgattatgatggactatgtgagaaaacacaacagttctctgcattagtcgataaagttctgtcaaacgttgatgttctaaatgatattgtcatagcactgtctgttatcttgtcagaaactagccagattaagttcacattgttgagagacaatagcaatgaagcagaaagtaataacttagattgtgttgataaagtgactctacttgaaaataaggtgcagcttgagccagtaaaagacaatgttcctggtatctgcccactgttgcctcattcatcttctgatcctgagtttgaggggcctgctgatgctagattcgatgttaagactgcagtgaaggtgtactcgccggaggaatatgaacaacttaaatctgagaaggcaaatttggagggagaactagcaaagtgcaacaaaataatagaagaaacaatggctaggttaagtgatatggagaaaaaactggaagacctgacatctaagttggctgacagtgagaaatcaaatagcttgaatgagacacagttgaagtgtatggctgaatcctacaagtcacttgaatcaaggaaaattgaattagaaaatgagatagaagcgttacggtccagaatagatgctctaacagctgaactctttgatgaaagacagagtcatcaggaggacttagttaaatacagagatctcgaggagaagatggaaaggtatgagatggagaggagttcaattcttgtggatgaggacccagacaacaagtcaaagcaggagagagagatagcggctgcagcagaaaagctggcagagtgccaggagaccatattgattcttggccgtcagctgcaagctatgcgtcctccagccgagtcgctaggctcttcacctaatcggcaacgcatggaggagtttctgaaggatgcggcaggaacaaccgcaggagaatatttccagaaaccttcaggccaacctgatacagaccaggatatgcttgggacaggaaatgtgtctccgatcagtgggtacaagacacacatgatcccttctgatgcggacgttagccctttcccttctccaaacacctccaagcgcccgaagcatcgatcgagatcctcttcgtcttcctcattcaccaaccaccagttgccagacaaacagaaccgaggattcagtcggttcttcgcgaagagcaaagagtgaaactattccggatcgcggtgttaggtttgttgatttttggcgccaattgggtgggatggtggtcatgaatttctgtagagctagtgagggatgcttgcttgtgcgttctctcaggtcaggtgattcctttgggttgctggaataatactcagcttgcagtcgagcgggttgtggcgagagtgtgtgggggaatatttaagttgtcagtctcttctgctagagcttttctgggtttctgtgtgctcgaaacctcactaaaacctcactgtacatgtgcttacttgcttgaaggagcttggctgttggtttgtgtttaatcctcttgtgaattagcccgtgtattgtgcttgtactggtttggtgtacaattaacctgcgcccatttcaagggtattgatgtcttccctcggttctaaaattg

SEQ ID NO: 1604 - DNA, 1475 bp, Zea mays
ttttacatagtgtactatatgccattcggacgacgaagaaaccagtatttacatggaacagaatttaacagatctacatagggaaagtggcctcttgggtaggagtaagcacaattgtttcagttgttcctttccattcgtgtggtcagcgcattgaagtcaccaaagcttgggtgctggtgctgctgaggtctgaggcgttgggcctgtcacctcccgcgatttctctattgctttcagtgagctgggagtaccataggccatacgtctcccctgaaatcctgcagcaggtgatgggtttcagtgacaagatgtcagctccgaacgcagcaggagcaggggtgaccatctgttttgccgacagccatctcagaaaagaggagccgcatctgctctagataggctacatatatactaggggcatgccccagccctagcatacaagaacaaatataaaaggccatcgctggcagtaccagttggataactgaaaaatgtcttgacctgatagttctattgcgtatatatatgtgtccctctgtccttccatgttttcatgaatctgtcacaacatgtttctgccgtgtgtccctttgtttcatgctcaagtatgaacactcgaaggaacactaacaaacatcgcttaagacctcatccatgtcagtatgtcactttgttgctgccataaagtactagtagcgaacaaagccatgtcttgtctgcaccaagccaaatcgacggtagtacagcgcaaccagtaacaatatatatatatatatatatatatatatataatgaatgctgaggcgactgaaacacctgaatgattggacgaagagtgcatgcagatggagcaggaaccggtacacctggaggacgagagacttttctgaacgaaatccagactcctccaactcatcagttctattggggacttgaagtcttcaatgcggggaaccagaagagaacctactcacttcaagttttttcacttttcagcactgcagttcggtacaccggcaccccctacctacacgacccagtacagtatataagtagaggcacgtgcgagactgaaaaaacaaaggcaggcacgtgcgctgcccattcctctgtgcagtcaaaccctttagctagcagctagaggaagagtatgggctgcttgtttacacttgagctgtgaaacctagagctccacagtgctcatggatgcatcattcatgcctgcatgtggaagagagactagggatttggcagtgattagtttaatgcggagcggagcggaggagacttggggtgctcactactggccaccactgctcccaaagagatctgaattagtgtaggacccaagggaactccaaccgaggaataaacaagccggggtactactgcatgctttttgatgcaaacattcgaaggaactggaggaaagagacgctgaaagactagtacaccagtatactctagtgaat

SEQ ID NO: 1605 - DNA, 3019 bp, Zea mays
gaaaaggactttgaaaagagagtcaaagagtgcttgaaaatgcccgggagggaagcggatgggggctggcgacgcgcaccggccgtatgcggaacggctcctgctggtccgccgatcggctcggggcgtggaccgttgtcgcccgcgccggcggccaaagcccgggggccctaggcgcccccggcagccgtcgtcggcgcggacggtatccgcgcgcctctggcgcgcccctcggggcgctgcgccgcaacggcctgcgagctccccatccgacccgtcttgaaacacggaccaaggagtctgacatgcgtgcgagtcgacgggttcagaaacctgagatgcgcaaggaagctgacgagcgggaggccctcacgggccgcaccgctggccgaccctgatcttctgtgaagggttcgagttggagcacgcctgtcgggacccgaaagatggtgaactatgcctgagcggggcgaagccagaggaaactctggtggaggctcgaagcgatattgacgtgcaaatcgttcgtctgacttgggtataggggcgaaagactaatcgaaccatctagtagctggttccctccgaagtttccctcaggatagctggagcccacacgagttctatcgggtaaagccaatgattagaggcatcgggggcgcaacgccctcgacctattctcaaactttaaataggtaggacggcgcggctgcttcggtgagccgtgccacggaatcgggagctccaagtgggccatttttggtaagcagaactggcgatgcgggatgaaccggaagccgggttacggtgccaaactgcgcgctaacctagaacccacaaagggtgttggtcgattaagacagcaggacggtggtcatggaagtcgaaatccgctaaggagtgtgtaacaactcacctgccgaatcaactagccccgaaaatggatggcgctgaagcgcgcgacccacacccggccatctgggcgagcgacatgccccgatgagtaggagggcgcggcggccgccgcaaaacccggggcgcgagcccgggcggagcggccgtcggtgcagatcttggtggtagtagcaaatattcaaatgagaactttgaaggccgaagaggagaaaggttccatgtgaacggcacttgcacatgggtaagccgatcctaagggacgggggaaacccggcagatagcgcgatcacgcgcgtcacccgaaagggaatcgggttaagatttcccgagccgggacgtggcggcagacggcgacgttaggaagtccggagacgccggcgggggcctcgggaagagttatcttttctgcttaacggcccgccaaccctggaatcggttcagccggaggtagggtccagcggccggaagagcaccgcacatcgcgcggtgtccggtgcgcccccggcggcccttgaaaatccggaggaccgaattccgtccacgcccggtcgtactcataaccgcatcaggtctccaaggtgaacagcctctggccaatggaacaatgtaggcaagggaagtcggcaaaacggatccgtaacttcgggaaaaggattggctctgagggttgggctcggggggtcccggccccgaacccgtcggctgctggcggaatgctcgagctgctcgcgcggcgagagcgggccgccgcgtgccggccgggggacggaccgggaacggccccctcgggggccttccccgggcgtcgaacaaccgactcagaactggtacggacaaggggaatccgactgtttaattaaaacaaagcattgcgacggtcctcgaggatgctgacgcaatgtgatttctgcccagtgctctgaatgtcaaagtgaagaaattcaaccaagcgcgggtaaacggcgggagtaactatgactctcttaaggtagccaaatgcctcgtcatctaattagtgacgcgcatgaatggattaacgagattcccactgtccctgtctactatccagcgaaaccacagccaagggaacgggcttggcggaatcagcggggaaagaagaccctgttgagcttgactctagtccgactttgtgaaatgacttgagaggtgtaggataagtgggagcctccgggcgcaagtgaaataccactacttttaacgttattttacttattccgtgggtcggaagcggggcaccgcccctccttttggctccaaggcccggcctcgccgggccgatccgggcggaagacattgtcaggtggggagtttggctggggcggcacatctgttaaaagataacgcaggtgtcctaagatgagctcaacgagaacagaaatctcgtgtggaacaaaagggtaaaagctcgtttgattctgatttccagtacgaatacgaaccgtgaaagcgtggcctatcgatcctttagaccttcggagtttgaagctagaggtgtcagaaaagttaccacagggataactggcttgtggcagccaagcgttcatagcgacgttgctttttgatccttcgatgtcggctcttcctatcattgtgaagcagaattcaccaagtgttggattgttcacccaccaatagggaacgtgagctgggtttagaccgtcgtgagacaggttagttttaccctactgatgaccgcgccgcgatagtaattcaacctagtacgagaggaaccgttgattcacacaattggtcatcgcgcttggttgaaaagccagtggcgcgaagctaccgtgtgccggattatgactgaacgcctctaagtcagaatccaagctagcaaccggcgcctctgctcgccgcccgccccgacccacgttagggcgttcgcgccccaagggcccgtgccattggctcagcccgcccggccgacgcgccgcggcgggccgcctcgaagctcccttcccaacgggcggcgtgctgaatcctttgcagacgacttaaaacgcgacggggcattgtaagtggcagagtggccttgctgccacgatccactgagatccagccccgcgtcgcacggattcgt

SEQ ID NO: 1606 - DNA, 1731 bp, Zea mays
cgcttggctttcgaggcacgcggatgccagatttccccggatggggcgtgtgcggctgccggggccgcatcgtgtgcacgccaaattctcccgtcctcgacaccagctagcgaggctacgcagcagctgatgataccttatcccccgctggcactctggcagctagctattacccccctgctgcgccgcgcagccttctggtctacccccgttggctgcttcttctacctaccctcgccgtcgcctcaacttcccggccgccgtcccctccgatcaccagctgctgcttgtgctgctgagccaagagcagctagcgatgaacatcttgaacctgcagcccatcaacccaggcgggcacccggcgttcccggcggccaaggagagcgggcacctcacgccggcgtcggtgcgcttcgacggcgtgccggtgccggcgcagtcccacgcgcactgtccgaggtggcaggctcagacgctgcgccgggacagcagctacgtcggcgtggagcacgaagggaccaggaccaccgcgtccgtcccggtcccggtcccggtcccagccgttgccccggtgcctgccccgttcaagccgctcacgctcgacttcctgcggtcgctcatggacaggagctgcagcatgagccccgccgtcgcggagtacggcgaggacagcgccccgccgccgccgcagatggtggcgctccgcgtggtggtggcctccgccgtggagctggacgcgcgccagaccgagctcatcgcgcgcaagatgcgccgcctcaccgggttcgtcaacctcaaggtcgacaacgtcgtggacgcgtccctcctcgccggcttcgtcgtccgctacggcaccgacgactcgcacgtcatcgacctcagcgtcaagggccagctcgccgcgctccagaaccgcgtcgactccatcgaccaccagaccgcccacgtccacggacacccgcaccactgatcatccgatccaacacctctggactctggtgcacatgcaccggaaccggactacaccggagcgaagcgcgccattgccaaaccgtgctacagcttgcagtatacaagagcctatctccatgactgtgattacgagactatatacagaaccgaattgaacgccatggcaacaacagttttcctgtctaatgttgttgtaaatcgcgactgctacctatccttcctgctgagcctatatatgtttctattgctaaaaaaacgaacgttattgtataatatgatcgatgtggagacatcatcctctatggcgtaaagtgcaatatactatctcaagggccaaggccgaggtttgtatatggaggaggattcaggggttgcagcactgcaatggactctatgaccatgagaaagatggctaaatgagactgtatcactctgcaccgatcagattagagacgcaaacacatcaggattattaattcgatgtttctctaattatcgaagaacatcagagcaagataaagcatcatcatgaacgaagtgcagtagcggtaggatcggaccgaagcctgatcagcatcagcagcgctggtggccgttgacatcacggcgccacggggcctcgtagagattcttgaaggccttgtcgaagttcacgaacggacgaaccccatgaaccagaactcgtggttatccatggtcatgatctgaatgtacctctccgcccggttgtgcatgctggaagaagcgttcactgacgtc

SEQ ID NO: 1607 - DNA, 2062 bp, Zea mays
cgactgtcgacgccttcttcgccctctccgtccggcttccgcctcagctgaactcatgcgctatttcccaggccgccattcccactagggttttcggattattaggtttctagaacctttcttcgccgccccccccccccccccccccagaccccatgcacgctccgccgctggtcgcgttcgcagggggcgcctgccccgcttccgctgcctcctcgctgtcgccctggttggcctcgctgcggcccgccatcgttgctgcgccggcgaggctgctatggttccgccgcggggcactccggctggaagccaaggccgcgtggagggctaccggagggggacggggcccgcgggtcccggccaagggcgctgtgctcgcctcctatatgggtgccgaggaggtggtgggacccttgtcgctgctcgacgaggaagagctcattttgcacataagaaaggaacgggataatggaaaacttcctgcagatgttgccattaacttggaggagctgtattataattacaggaatgcagtcctgcaaaatggtgatcctaatgcatatgagatcatgctttcaaatatgacagctttgtttgatcgtgttctactggatgtacagaatccatttacctttccaccgtatcacaaagctgtgcgggaaccatttgactattacatgtttggtcagaactacattaggcctctggtagatttcaggaactcctatgttggcaacatttcccttttccatgacatggaagagaagctccaccagggccacaatgttgttttgatgtccaaccatcagacagaagcagatccagcaattatcgccttgcttcttgaaaaaaccaatccatggattagtgaaaacatagtttatgttgctggcgatagggttgttaccgatccactttgcaagccatttagcatgggaagaaatctcatttgtgtgtactcgaaaaagcatatgaatgattttccagagctaattgagatgaagaggagatcaaacactcggagcctcaaggaaatggccttgcttttacgtggtggttcacagctaatttggattgcaccgagtggtggtagagatcgcccaaatccttcaacaggagagtggtacccggcgcattttgattcatccacagtggacaatatgaggaggcttctggagcatgctggtgttcctgggcacatatatccactatcattactgtgctacgaggttatgcctccaccacaacaggtcgagaaagagattggtgaacagagggtgatatccttccatggagtaggcttgtcagcaactgaagaaacaaagtatggggatattacttgtcataccaagaatgctgatgagggaagggagctattcacaaatactttgtacaactcagttgttaatcagtacaatgtcctcaaatctgctatctttagagatcgtggagcagctgtatcaaacaatgccatctcactgtcacaaccatggcgatgaatgtagctttcccagtccagattcgatactgaagttaccttttcagaagaacaggtgaactgcaattgtgcaatttttctgggaaaaactcttgaagtttaatctttctgatatcactggactttaccaatcatggtggagcttattactctaatgcagatcctcgctaagatgtctggctggtcaagggtgattggtgattctgcagatagggatcctcgtaacattgcatgccgtcgtccgcaaattactgctccctcaggttgttcagtaatgtgctggttgggcactgaggaatccatcaggttgcatccttttgtctagacgtcgatttgtgttgttgaagtggtaaacattttcatcctgggctgtatcgtcatcatgtatagataggctcgagtctctctcttttttttttggctccacaattttttggagatataaaagcggcaggagttatgacatgcccacagtcggccctccttgtagaaatcctttggatgtaacctgtctctttcttatatacatactgaaagtcaaggcagatatcccgtgtttcgagt

SEQ ID NO: 1608 - DNA, 2799 bp, Zea mays
tattttttttttgccttaggacgctcgtttagaaccgtgcacgtctctcggtctaaaaaccgcagcattctttggcggctggggctggctttgggtagggcgccatttgtttttgctgggtttgttttgttcacgccacgccacgcgccgccctctcggggtcaaacggtagggtgagcgagggacaagatatggcaatttttccatcgcccattctccccagtcctcaccccccacagaaaaggaagatgatctcccctcttgcctcacaagatcgacggcacccaaatacacaaggatcggatcaccaccgccctcacccaaatagaaatagggtgctggaggctgaggttgtgatgtatcacccaaatagaaatagtgcgttggtggattggtttggttgccggtatggcgatacgcgggccgctgtgcgcgccagtgcgggtgacgacgggttcctgcctgcctgccatcgtctcattgaacgccggccgttgctgtggacccgaacgaacggatcgcgagttcccgtcgcaacgtgccgccactcgcaaacgacgaccgaacagacggcggcgtggcctgcgggcatggcggcactgggccgcgatccatagcgtcgtgcacggcgtgggccagccgcagctatgcctatctcgccgccgtcgtcgtccctcccagcgcacgtttctgaccccgaggcccgagcgatgtgctacgtacggtgatcacagacacagagcaggtctcgatcgtagctttacgtactccccactcgctgttgttcctgtcatcccttccctcctgctgcctcttggtgatcgggcgggcacggcatatcatatgcaaggtcagagcgtgaaagaaatcgtctgaaaaaacaactgcttctgtgccttaacttgttagccagaaggatccagaagaaagagcactaccaaggctcggcacgacggcaccatccatcggcgtcacgaaacgaaccgttccatccctcaccacctgacgtgaaagcaccggagcgagctcttttcttttttttttcttcctcttcttctcagggggcgcagccgtgcggtaatcatcctggaggcgacggcgggagagctttcggggtgcgggcggtgggcggtggcggcttttagccctcccccgaccccgagtgctgctgttgccggtttctgcttccaagttccaaagggcctttctatctaggcatgcatgccttctatctattccttctctggttgcttcttctcccgtggctgctagctcttctccacccctgcttttgtcatcgccacggctcctccaagatgagtcagatgacgtgggaggcagccaggcgtcggtgcctgcttatatagctgcgtattcacaacacgccacggcatcctccccctcccttcctctcccttctcttctcttcttcacttcacagcacgatcgagccagttgcaatcacacagcgcagacgatgccgaccatcatcgtctcggtggacctggaatgcagccgctgccgcgccaagatccagagggtgctcaacaggatccaagagaagggcgagttctgcatcgatgacatcgacttcgacgagaagaacaacaaggtgaaggtcacggggcccttcgacccggacaagctcgccgacaagctgtgctgcaaggcgtgcaagatcatcaagcagatcgagatcgtcgagcccccgcccccgccgccgcccaagcccaaggaggagccgaagaaggaggagcaagccccgccgccgccggagaagaaggaggaggccgccccgcccccgccggcgaaggtggagccgcccaaggaggagccacccaaggagaagcccccgccacccaaggaggagccgcccaaggagaagccacccccgcccaaggaggagaagcccgccccggcaccgcccaaggaggagaagcccgccccgccgccgcccaaggtggtggaggtcccctacccgtggccgtacccgtacccgtaccctgcgtggccgtccgactgctgctgccaccacggccacggcgggtgccactgctgctcctgcggcaaggcccccgagccggccccggcccccgccccggccccacccccgccgcagtacttcccgcagtacatgccccagccgtacccctgcaacccctgcggcggcggctaccggatcgtctgcgaggaggacccctcctacgcctgcgccatcatgtgattcgtttattatcaatatcatcccttgatgagtgtaccgtccgtgtgcgtaccatggccttaattaccattatacccaaccccaccctaaaaaaaaccccagtacgtcgtctcatcatcattccgtacctcctcctgtataatcgccgtacagattcatcatatatatactctatacatatatagcatcatgtatacaccgccgtaccccctgtcatctctttatgtagattgtgcattatgttctgcgcgcttcgttttggtaattacagtatatgccagtcaggctaagtgagagaataaaataagcaatgatgctgttgttttttttttcttctgtgtgtgtaaagaaaaagggcaaggtgagagagttcatccgttgatggcagcagaaatgtcctaccttgcacaccagcatccctttctttatgttgcacccagggaaaaaaaaataaacagttgcttttatcaacgctttcgtttatctcgcttccgttttgtcaccacaccacaagcgatgtaacgtggcatggtttggcctagtgtttagggtttatgacgtgtaaaggagacagg

SEQ ID NO: 1609 - DNA, 1746 bp, Zea mays
ctagcgcaagccgcacggcagcaaagcaaaccaccgtgcctcaggcagaggcctcagcctctctctcgtctttgcgttgcgccgctgctttaaacaaacgtcaggtgaaggctgcggcacgcgtcccctcctccgcctccagtctccgcccatctcaaaaccctagcaaccgcgcctccacccctacccgaatcccaatccaggtccgatcccccggcggcgaggacacccggcgccgattcgtccccgcagatcggcgggcaggacagattcagattcgggttcggggtccgctcgggtcgcctcgccggggtccaccgcggcggtcagggagcatggtgggcggcgggaggcggggtggagcggcggaggaggtcaagctcaacaccggcaacgtgttcgcggcgctcgagtccctcaagaagaagaagaagggcgacaaaggcaaggcggccgggtcttcctccaggaagaagcacggcgagggggccgcgcagcgacaagagccaccgcagaaggagctgttctgggcgcccgcgccacttaccaccaagtcctgggcggacgtcgaggacgacgacgacgacgactacttcgccaccaccgcgccgccgcgccccgtctggggcactgccggtgagcccgccaaggaagaggaagacgtcgatgatgctgtgcgtgccgcccttcaggaggacattgagagtgatgatggggaccttgatgatgaggttgatgatggacctgaggatgaacctgaacatgatgcggaagatgccccagccgaacctgctatcaggacagctgcggccccggctgcgccacccaaggacacagaaaggcagctgtctaaaaaggagttgaaaaagaaggaactagcagaacttgatgcagtattggctgagctgggactctctgcaaattctagcagcactgcacaggatgctgagaagaaaggtaccaaccaaattggtgatgcagagaagaaggaagatgctcctgctcctcccgagagcaaggcctccaagaagaagaaaaagaaggacaagagttcaaaggagggaaaagaaacacaagaagcacttgatgggtcagaggagactgccagtgcaggacctgatgaagatacttctgctgtggatgtgaaggagcgcttgaagaagatggcatcaatgaagaagaagaaatcgagcagagagacggacacagctgccaaaattgccgctgccgaggctgcagcaaggagtgcaaggcttgcggcggccaagaagaaagaaaagagtcattacaaccagcagcccgtgcggtaaatgggcataaagttttgagtttgggtgctgtgagtttgatatccccttgttcgttttggactcgcaataaaacttttttgagttatcgtatttatgactgggaagtgcctttctgagtttcattttcagaatttaatgaaaggcctttgtggttgcaaaacggtggtgtaattgtgctttaaattgttcatccaatgataaacttcgtgaacaactccagcaccgcctgtagtccgatttttaaatccttgcattgatgaggagggcgggggtacacttgccgaaattatccccagcctgatttcttttatcttatatatataaatgtgccttttatacttctatagactgcagtacctttgaggcgatccccgtggctttgttcggttactagggaataaatctcactatatatttaatctgggtctgtattgta

SEQ ID NO: 1610 - DNA, 2876 bp, Zea mays
gtccgttccgtctccctagccagtagccaccaccagcccaccacgcatggctgcccggtgtcccggccacttcgcctgcctccctccctccctcactctcttccgtcttcccaatgaaaacctgcgaggaaaatgtgaagacgggaccccacgcgaccaacagcagacccacagggatgctgatcggaggcggtgtcttctacttgtaggcgcaaccgcaggccgcagccccaccgctcccccgtccatcttctccaactagtggcagcgcggtcgcaaccgctcacccaccgctccctcccccaaatttctccgcaatcttagcactacccgttagggagcaacgccgacacagcaaaggcacaagaggaggccaggcaacagctgcagaaacgcaggcgccgcaatgcagggctccaataccaaatctagctccgccgaggcgaagagcaacagcaaaccggacaaggagaagaaggggggcggaggcggcacgccgccaacccccaaggacagcaagccgcgcaagccggccgtgcccaaggcaagcgccgccggccatggcacgccgcgggcggctgacaagtcccccggctcggggtcggccgaccgcaaggcgcccacgcccaaggccgccgcctctcgcctcgccacgcctcccgagaaggggaagcccgcaaagcggccgcaggagcagcaggcgcagcttgccgagatccgtgaagagctcgtgaaggccaaagagcagttgctggagaacgagaaggagaagtgcagagttcttgctgagctggagcgtgccaagaaggtggctgatgaggccaatgccaagctgcaagatgctcttgatgtgcaaaggagggctattgaggcgcaggaggcagacaaactccctgccggagagtcgaagcaggcaagcatccacgaccagcaggaggatgatgacgctgtgctgcggtcgacagtggagcagcttgagaaggctaggtacgagctggccgatgcagtcgatgccaagaatgaagccctcagccaggtagatgatgccgttagggcttctgaggtgaaggcccaggaagttgagcatctcattgcagaggttacacgcctcaaagggctggttgattccaaggtggatggcaacaggaagaagactgcagagaggattcagaatcttgaagaagagaactttgcattaaagcttgagcttcagaaaaaaaaggctgctgaagaaaaggcggttcgattggagcgcatgattgatgaacttgagagtgatgttgatgatgctaggaattttggttccaagtcaaagcagttagctgatgaatggcagaagaaggcacagcttctcgaggtcagattggaagaggctgatcagtctaatattttgaagggtgaatctttgaattcagcaatggaagaattggattcaacaagtagtttgcttcgtgacagagaatctgaagttgctgctcttcgtgacaaagtaaggttctttgaggatgagcagacaaagctcaagaatgatattgttgtgtccggccaacgggcagatgcagcagagaaagaggcggcggatctatggacagaggttgaagggcttaggctgaagctccatacagtggaagaagagaaaatggaggccctgaacagtgataagagtactaccttagaaactgagaccttgaatgaacagaagaaccagctgactgacaagcttgaggcaaacaaagatgagcttgagaaaactaagaaggcaatggagggtctggcctcagccttacaggaaatgtcagctgaatccagagaggcgcaagagaagtaccttctcaaacaagatgagattgagcgtgctcaggcacaggtagaggagcttagcttgagtctgaagaatactaaggagaactatgagctattgcttgatgaggcaaactatgagaaggtttgccttacgaaaacagttgaaagactgaaagcagaagcaaagagtgcacatgaggaatggcattccaaagagctaagttttgtcaattctattaagaattcagaggaagagatagttgctatcagagttcagatgatcaggaccttggaggttgttaaagagaaagaacgtgaaaacactgagttgcaggagaagctgcagcagcttgagtctcagctaatggaagcaaacagaatcagggaggaagccagcgctgaaactatccgatggaaggagaacatattagaccaagagaatgaattacagaacataaaacaggagaacgacgacctgcaggcaaaggaattagcagcttctgagaaggttaaggaactctctttccagcttgctaatgtaaaagatagcctgataaatggtaacaccaaggaaggagataatgagaaggggggtactgaagaggatgatgaacctgttgtggtagttgccaaaatgtgggagaacggcaagtttgctgactgtgattcatctaaggagaaggataatgatggtgactcgcaggttgatttggaatcaaacaagggggatgcaggtcttgacagcaatgggttgcactcaactaatgagagcagtggcagagcatcaactaaacagccgcaacagcataagaagcctttgctgaagagattcggtggtttgctgaagaagaaaagcgaaaagtagcataaaaccatctgatgatattctttgttctatcttttgacatatttctacatatttctttgattagctatctagttcctgagtcttcccccgatattatggtaaactgagtgatggatgcttcaaagaatacaaaatgtcgcctgtatttacatcactgccatgtcttacttttttgtatgtttggcgatcatttgtttgccagccc

SEQ ID NO: 1611 - DNA, 306 bp, Zea mays
atggtatgcatgggcgacctaatttcattatgtggcttcgggaccgtgatgccgccaaaatcaaagaagtcagtaaaggggctgttcaagggcctgggcctttttcagggcagttcttcgagcagcagcagacgtcgagagctgttgagcgcggtacatggagatgaggatgagcagcacactgaggagcagcacattgaggaggagcagcacaatgaggctgagcagcacaatgaggaggtggagcacgtgacatgggaccaggccgcacagcatcaccagccatgggaccagtgggaccactag

SEQ ID NO: 1612 - DNA, 1806 bp, Zea mays
atggaaggacacgaagcctgctattacgggaaaatcaaaaatataatcgagattacatttgctggaaataagcctttagcgctagttttctttgagtgtaaatggtatgacccgaagtattataggaccgaatttgggatgacacagatccaacctgagaaattgcttcaaggacacgacacgatgccgccaaaatcaaagaagtcagtgaagggcttgttcaagggcctgggcctttttcagggcagttcttcgagcagcagcagacgtcgagagctgttgagcgcggtacatggagatgaggatgagcagcacactgaggagcagcacattgaggaggaggagcacaatgaggctgagcagcacaatgaggaggtggagcacaatgaggaggtggaccacgtgacatgggaccaggccgcacagcatcaccagccatgggaccagtgggaccaccagagagagcagcaacaagcgtgggaccagtggggccaacagggcgaaccggctgacaacccgatggatgatggctcgggaggctcttcagcgacacgcacacgtcgctcaagaaaaagccactcagtaaagcctcgtcacgcgatagagcgagaggctgataggactttaatcatgccacatggagatcggaattgggaggacctgtcctttgacggcaagggacaccacactcaggttaaccttacgttgggttctctttgccgccttcactaccctggtatagtgaaggtgtcaaacggtgataccgaggatgaggtgctcgtcagtacctgggatgagtacaagtttaaaaaggaacgaaaccacaccgacagacagggacttgtgcgaaatgacttttggcttcgatatcggttgcctgacggagaggattacatggggcacgctgaacgtgtcttgcaaaacaatgcaaagaagctggtgaaggatgccatatactatgcgaaaattcaggctacaaacctgtattttcaaaagcatccggaagaagcgggccccttgaataaaaaggaagggtcctcaaagatatatttgactgaggatcaatatcgtgaggtgatggttccatggatggcgcccgtgcctgatgcgtactatgcttggtgtcgatattgggcttccgaaggcttccagaaagcgtcaacgcatcacagacaatgtcgaggaaccaatcctaaccacaagtttggcggtgacgacatgatacgaaaagctaaaagaatggaagctacgagtggccaaaagcctaatgacattgaggtgtaccaggagggccacaaaggaccagacccgaacaaccctgaccagctctgcatccagacagccacggatcgcttgatacgcactcttcgacggacaaaagactcgtcgtcggtgagatctcagaggacgggttcatcttcccgtagctcatgctctcgtcgaccgaacgagcaggagttggagattatgaggatgcgtgaagagatgagacaacaacgcgaatttatggaggcttgcaatgctcataatcaagcgatgtatcaacaacagggcatcacatcaaattttccaccgccaccacaatggagccaatttgcaaacacaccagttccaccaccacagttcaccacccctccgacacatatacctgcacctggagatagggttacgcctgaagcgggtggcagtgggtctgatccagcagcagggactggatttgttgactcgctcttcgcgttccctcctcctggtggtgaaggcggcagcggtcaaagctctaaccacccaagtggtggttatctctaa

SEQ ID NO: 1613 - DNA, 1170 bp, Zea mays
atggttttggagactgcagggggtcacggccgcaaccccaatggcatcctcggccttctatgccgggaacactttcctggacttgtcgagtacgccggagtgacgagcccagcatacaccttcgaccactacgccgtcgcccccgatgcagtagatcgggacggcagacaattcaacaacaaggcggagcgggtgaagcaagagctgtgggatttcttcaggtgcgatgctggatacgaggccagggcggatgtggtgtctacgacgtgctgtaagaagctcgtcgtggacatgcactacgaggcgcgcatccaggccatcgtcacttaccacggctccgtccttggggagaaggtgaacaagaaggacgcccgaaccatgtcattgactgcggaccagtacttgcagtgctgggagaagatggtgcagaggtggtgctcggctgattgggacgaggcgcacaacgctagccgggaacggcgtttgctgatgcaaggtccctcccaccatcaaggcagccgcagcctgggcaaatacgcggaagcatggtcggcggcacatggtggcgcgccttgctccacgttctcggcatatgccatggcccacaaggggaaggcgacgtccgacgtcacctacaacccggatgacgggcccgaggcgtacaccaaccccgccatccacagccgactcagtgagtacaccgccatggccaaggaggtccatgggccagattacgatccgaggaccgaggacatcgacggagatgtcctcatgagggtcggaggaggcaagaggcatgggcggtactggattgccgacggggcaatcgactcgtcctccactcccactctctctcaggtgcgagcaaggagcacgagcgcgagcccagccatacgacctcggcaggacacctcacagcatcgtatccagcaactccagactcagctagatgatgagaggaggcaacgtgaggagctggagaataggatggcggagatgttcgtgtacatgcagagccttggcgccgcacagggtcatgctccaccacctccgttgttccctgcagctgaccctacagagttcactactcctggtcaatcgacggcgtcgaacaaccctcatgcttcgtccagcccttcgccgaaccagtccagatgcccacctcgttga

SEQ ID NO: 1614 - DNA, 2437 bp, Zea mays
gttggtaatactgtacaaattttcgtctagttgcgtgctctcgctagggttccgccccgccggcatacccgaccataaaccccgcgccgcccgccagcaaccttcagtctcatttctcacgcgtagctcggacaggcagcttgaagctcgcgaaccagccatggcgaatggggacgcggccgtggaggtcggcgggaacggggagcaggaagccgcggcgcgccaggcgtcgacgttcgcggagctgggtatctgcgcggagctggtggaggcgtgcgacgccatggggtggaaggagcccaccaggatccaggccgaggccatcccccacgcgctccaagggaaggacctgatcgctctggcgcagacggggtccggaaagacgggcgcgttcgcgctgcccatcctgcaggagctgctcagcaaccgccaggctgaacagtctttcttcgcttgcgtgctctcgccaacaagagagctggcgattcagatcgcagagcagtttgaggcgcttggatcagctattggtttgcgttgctcagtgcttgttggaggagtggatcgggtgcagcaagtgttatccatcggaaaacgtccacatattgtagttggaactcctggccgtcttttggaccatttgacagagactaaaggttttagccttaagaaaatcaagtatttggtattggatgaagctgataaattacttaatgtggagtttgagaaatcccttgatgacattctaagcgagatgcctaaagacaggaggactttccttttttcagcgactatgaccaaaaaggtaaataaactgcaacgtgcttgtctcaggaatcctgctaaggttgaagtgtcctccaaatattctacagtagattcacttaaacaagagttctattttgttcctgcagatgacaaggattgctatcttcttcatgttctgaacgagaggctggagagcatgatcatgatctttgtgcgcacctgtgaatctactagactccttgctcttatgttgaggaatcttggtttgaaagctatgtctatcagtggccagatgagtcaggacaagagattaggtgctttgaacagattcaaagcgaaagattgcaatatccttatttgcactgatgtagcaagtcgcggcctcgacattcaaggagttgatatggtcatcaactatgatattccaatgaattctaaggattatgttcatcgggtgggcaggactgcacgtgcagggcgatcaggatacgctgtatctttggtgaaccaatatgaagcccagtggttcgtgctgatcgagcagctccttggcaagaaaattgaccagtgtaaggtggacagagatgaagtccttatacttaaagggcccatatccgatgcaaagagaattgcgctgacggtatgccctcctaaaacatcagtatttgattctgtaaatcttttgcgccatgtttgtaatacgaagtatgtgcaaaaggatgcctatctgttggctattcatttcatgccacgttatctcgctttgtagaaattgaaggattccggtggccacaagaagcggagaaatgtgggagatgacgatgaagaggttgaagatcattcttctcattctagaagaccgaaatccttgaagagatcaaacagacgatgaaggctctggagcatgtctggactgcctcgtttcgtgcaagtcctttgtggttcagcgcagatccaccctgtggtggtttggagtgatgctttgcctatttatactagggccagttaagacgttcacttgacaccattccttgggttgaaagcaagtctcccccaattttgtcatcccgacccaaaccatgcttacataaggaatcattttttgctgatggctgccattggtgtattgtagcttctgagtcgcatgtgcggttttgcccaaggcacaggcagccgttgctttgtgtcaacacggaagtgctagcttgacgttttaccggccatatcaccgtatgtccggtatggctataaagtttttaataatgctataaaaatatcgtctcagtctaaatacattctagtggtcttaatagtgtttatgaatgtccagtactcgataggccctcgaaaacacctggaacggttcacgaaaaatggcgaaaacctgaaaattggcccgagaaccgtgggcaccaaaaatctacaatagaaagtgggtcaaagaaaaacgacatgaggttcagtttctagattgttatgtttgacacgttggaacaaacaaaaagcatagaaatcataaattcaaaatagaaaaaaaaactaatgatttgagctcctcacacgtatagtaaataaagaactcttatgtgaggagaaactaactaaaaacattatgttttattaaaataaaatttatcatagtacaaaattaaagaaataaaaactacatgat

SEQ ID NO: 1615 - DNA, 2538 bp, Zea mays
aagcaaattgcatttcaagtcttttgggtttatacagcacagataaaggcggcagcggcagcagcagaccaccctaccttttcccctctccacctcccgcaagcaaactcacggcaccgcccccgcacccactgtcctctagcttcttcctccccgctttcatggcaggaaaggctgaggcgatgatgcccataggccatccagtttgatccatgccatcctggacctctatacatactgcctcagcccgggcactcgcgatctctacttctctaccgccgctgtgcctgtgctagctcctctctctgcttctgcttttgcctcactcagcctgctgcaagcttttgctttggtttaggtgcttcttttgcattcctttactgttccccccccactttcgctcgctttgccacgcacacgaaaagctcctgcctttaccttctcggaccttatctccgccccgtagtgggatttggtgggagctgcgctgcagctgcttgccccctcgcgtttctttgctcaattgggggggtcacagcccgcgggtgtcgcgcgtgctcgtgggcggaattcggtgttcttgcttgcgcggtcctcgtccccgtccccttggcgcgattgcggttgcggacgctcgctgcagatcttcgcgcgactccgggagcgccggagatggactgcgggccgcccgaccagctgccgccgtcgtcggcgccggcgtgcttcctcaacctcaactgggaccagtccatggccgccgccacggctggcgaccacctcgacctggtctcctccccggcgtccaactcgacggcggctgacggcctcgctctccacgggatctcgccgcagccgcagtacggaggcactccgctcagctcgccccgcaagctgaacctctccatgatgggccagttccaccactacccgccgatgggccatctagaccagttcctcgccgacccaggcttcgccgcgcgcgcggcgaggctctccggcttcgacggccgccccggtgggagtggctacggcggcgccgtcccgggacagtttggcctccccgacgccggccccatcggcggcgcattgagggagctggagctcgggaacggccgggacgagtcatcggtgtccgatccggcgtccgccagcgccgagatggcgctcaaggcgccttccgatggcaatgcgaagaaacggaaggctagcgggaaggggaaaggcaaggacggccccgggtccaccgccgccaccaaggaggagtccagtgggaaacggtgcaaatcggcggaggagagcaatggcgcggaggagaactccggcaagggtaaggccgccgcgcagagcaacagcgacaacggtgggaagaagcaggggaaggacggcgcgtccaagcctccggagccgcccaaggactacatccacgtccgggcgaggcgcggcgaggcgacagacagccacagcctcgctgagagggtgagaagggagaagatcagccagcggatgaagcttctgcaggatctcgtcccgggctgcaacaaggtggtcggcaaggcggtgatgctggatgaaatcataaactacgtgcagtccttgcaacggcaagtcgagttcctgtccatgaaactggccaccgtgaatccccagctggacttcaacaacctgcctaacctccttcctaaagatatgcaccagtcctgcggcccgctgcagaactcgcatttcccgctggagacctcaggcgcgccgctgccatacctcaaccaggggaaccctctaataggctgcggcctacccaacggcatggacaacagccagagctccatgcacccgctcgacccggcgttttgccggccgatgagctcgcagcagcaccctttcctcaacggtgtcagcgacgcagcgtccaaggtcgggactttctggcaagatgaccttcagagcgtagtccacatggatatggggcagcagagccagcaggagatggctcccacctcctccaacagctacaacgacggttcgttgcaaacagtgcacatgaaaatggagctttgacgtagctagctgaagaagtccagcccaaagcttcgacgcctcctccccccctgtatatacagaacagagagggagagagaggaggaccagcctgcagcggaaaaaagcactcttgagattccccaccccactggtgtgatgattctttggacagagatgtgaaagatcaatcgccacgccggcggccggtcgatcgcaccacccccgccgcctgttgttagccgcaagatcgccggcgaccaaacgcggtgcatcgcatcccccggtatattctcagatcagacctgaattcgtcttcctctcaagcgagagggggaaaaaaagacctgtaatatcatttgtatcgccattatatttgtagctgattatatataaatatataaaatatcatccctcgtattcctgtcacccctcgtctccctgggctggaactccccccgctgctgctggatgaatcatcgtagactctttcttcactctgat

SEQ ID NO: 1616 - DNA, 1798 bp, Zea mays
agacatagacagaacgcaccctccagtaaagtccccatggctgctttctggttgctgctgctgttcgtcgctagcgcagtccttgttcttcgtacatggagagctcaaagcttcgtcaacaaggcgcggcaggcagggccgaggtacccgccggggctggagccgtacccgctgatcgggcacctgccacagttcttggctaaccggcaccgcgtgctcgactggatgaccgaggcgctcgcgcgccagacgaccacgtgcacgttcgtgctgcgccggccgggaggcgtgcggggtgcgatcaccgcgaacccggcgaacgtggagcacttcctgcgcaccagcttcgaccactaccccaaggggccccggttcgcgtcgctgctgcacgacttcctcggccggggcatcttcaacgccgacggcgaggcctggcgcgcgcagcggaaggtcgccagccacgagttcaacacgcgctcgctccgagctttcgtggcgcgctgcgtgcacgccgagctacacggccgcctgctcccgctgctgcgccgcgccgcggcgtccggctcccccctcgacctccaggacgtgctcgagcggttcgcgttcgacaatatctgccgcgtcgccttcgaccacgaccctcgccagctcccggacgatggcgacgacacggcggacagcagcttcgccgatgcgttccgcgacgctgcgaatctcagcgcgggccggttccggtacgcggtcccggggttctggaagatcaagaaagcgctgaacttgggttctgagaagcggctgcgggagtccatcgccatggtgcacgacttcgccgatcgcataatccagtcgcgccgggaggagatgttgagcgccggttttgagaagcacgatcttctgtcgcggttcatggctagccaggacgagacctactccgagtccaaggtgcccctccgcgacgtggtgatcagtttcctactcgcggggcgcgagaccacgtcctcggcgctcacctggttcttctggctgctgtcctcgcggccggacgtgcagcgccgcatccgcgaagaggtcgctgctgtgcgcgcccgacgggcacaggacgacgtcgatagcgtcgtcgggttcgatctggacgagatccgcgagatgcactacgtgcacgcggccatcacggagtcgatgcggctgtacccgccggtgccggtgaactcgctgctggcggagacggacgacgtcctgcccgacggcacagccgtgcgtgcagggtggttcgtggcgtacaattcatatgggatggggcggatggagtcggtgtggggcgacgacgcgcgggaataccggccggagcggtggctgaaccccagagacggaacgttccggccggacagcccctttcggttcgtggcatttcacgcggggccgaggctttgtctgggcaaggaaatggcgtacatccagatgaagtccatcgtggcgtgcgtgctggaggagctcgacgtggcggttgacggcgcgtaccggccccggcaggttgcgtcgctaacgctgcggatggcggacgggctacctgtgaccgtgaagcagagacgggactgacgagctgctgtcacaaacctgcaactccatcagccacccatgaagcctctgcagcagcacaaggcaggcaaagctgttgttcaccgacgagcctgaacaaaactgtggtttgctcaatgcgcttgtctctgaaccaatgttttcaaatcgtctcattaatcgtggatagtcgcgattaatcgtccaagtcagtttggaccaa

SEQ ID NO: 1617 - DNA, 1136 bp, Zea mays
acaccaaattcatattcatcttcattagaacgttactcacggttccaaaccgaagtgaaagcactgtcccaagtcttgacatctagcgagcagggtgctcctcctacttaggaagaatcaatcagattcaggacctagtcagaggagattattacagacacagagggcttcagatgccatctcattcgcaccgctatttacgaaagattatgatctaagtaacagcgcaaaaaggcaaaaagtgaaagaagatgctaattggctgagctgcactgcacaagagacctaattaacatctcgatgatctacagagtaacatagcccatctgatggatcatcgtccctccctccaggctccagcctagtagcagagttgtaacaaggccagtcccttgttaaaaaaacacaacaagaatttaagcctctccctgactccgatccatcgacggcctccatctccaccgatccagaccaaacatcaagaaagcaagcgacaaacctacaggcatggacaagatctgaattcaaggagccggtccagcgaggacatgctcaggccggtatcagctttgggtctccgagctctcgaggatgctctcgaggcgcggccgccagccggccttgttgtcgccagcgaaggagccaccgccgccgccagctcccttagcagcctgcatgtgctggagcacgtcctcgaggcgctgctcgccgctcttgagctgcgccatgagccactccagctcgccgcgcgtcagcacgatcttcaccttgagggccctctgcgggcgccgtcacccccggagccacggccaccacctcctgcaccagctgctcggagacggagtgcatacccaccacctcgtagccgtcctcctcctcctcccgaagcagctggcttatccttcttatctccgagaggctctcttcctcctccggcaaaagcatgccccggtgactccgcttggaggccgtgttgaggcagttgcccatggcttggctaacggacggaaaggcaaacgacgacaaccacagaagaggtgcgaggggccttcctttggttggtgtgtagtgactagtgagcagtagtaaggaaggtgagtgagcagagagcaggggtggctggtttgtttgcctaa

SEQ ID NO: 1618 - DNA, 1911 bp, Zea mays
caccgccaacttatccatcaatggagattaatgatgatttgctcttaccatccaccctctaccatgcatctttctcacactgtcttctcatctttttgtttttccttatataaaccaccatgagcagccagcaaccttactactctccacttcctgccaagtgccaacaagtcccctcttcttcgtctccaaagagacaaaacccaagagaggatcgtacgtcgtagggatcttgttcaatggcggacgcggacctgacaccaaaccactcgctcctcctcaagatgcctgcggcttcggcccacgcccactccccaagcctctcgagcctcctgttatacggccaggagagccatggcgaagcagcgcctgcaaacgcaaatgcaaatgcggcagcagcaacggtggaggacgccgcctcacttgagacctcttctgcagtggttgacagtgcatctccaatggagaggaagaggaaggctacagcagaagacagtgctgcaatcagctctcctcaaccaaaggactgcaagcaggagagcaagagcaggagggggaagaggccccgaaaggagaccgaggagaagagcagcactgatgaagacgaggcctccaaggggtacatccatgtgagggcgaggaggggccaggcgacagacagccacagcctcgcagagagggtgaggagagagaggatcagcgagaggatgaggatgctgcaggcactggtccctggctgcgacaaggttactggaaaggccatggttttggacgagatcatcaattacgtgcagtccctgcagaaccaggtcgagttcctttccatgaggattgcctccatgagcccagtgctgtacgggttcggaacgaacagtgaaggccttcatgatcatcacgcaccaaagatgggaggcgtgtcgttccaggaagccgccattgcagtgccagcaggtccagcggcagcggtgagccaagctagcagtaggccggctccatctgaagccaccatgaacaccgcttgcactaccacgccctactcagtctcactgcaggcccaggcttccatctcattctctccctctcaggaaaacggcggcacttattacctggtgcagcaagcggtgggggagcaggcaacgaggcaggaggagctgctgctgagccagttggtgttcagcaacatgtgctcgttccagtaggggggcagggcaggcaagagtgtttgcgcgagcggaagcgaggaaagagacccccacccacacacccatgcacattgagtcattgacaataggtactgttgcaagctaagtttcattgattgggaggccgacgactgaaaggtgaaagctgcctctgccacctctgccctctcatgtctgaaaactacacttaacctactatgatttgaattgttaggccatcatgctaagatccgctaaaactaacagaacagcatgttctttgatggtctctggacaggaggaaatgatgctgcaagatttggctagtaggagcgccagatgagtttcagatccgagcggcaagcggagcctgctgtttgtttgcacattttgagagactttgtagtttgtaatgtttctagctcctgtatgacgattttctcggcggctgcacctgacctgcccaccgtcaccagctcaccgttgtagtagtctccgatgagcaaatcggttgttaatacgtaagagaggagagctatttttgttcttaggcaaacaatgcttaactgtttcattattcaacgacccaactcccagcatctcaacgaatcatagagtgatggacgatcagttttttccccccatgctatctcttgccgtcgggtatgggcagagctgtcgactgacttcgtgtccttgcattgggtttctttgactagtttttgagacg

SEQ ID NO: 1619 - DNA, 2291 bp, Zea mays
ctcaacccacccacctcccactctcgccaccgtgtggtccagacgaccagtcctctaaccgaaccaggaagcaccaggcagcggaagctcgcgctgggatcggctaccaacaataatatcgttccccgcctccctcacctctgaacgagaacgcgaacgcgccctgtgatcactaccccacagcatgtgctcaggacctcgcaagccgtccacaccccctctgccggcggcgacggccaaggactcctcggcgatggcggtgctgctggagctggcggcggcggacgacgtcgtggggttcaggcgcgccgtggagggcgacaaagccccagccttggacgacgcgggtcactggtacggcccgtccgccgcggccgccggccgcctccgcctgcgcctcgaggcgcgcactccggccatggtggccgcgctctacggcagcacggcggtgctggcgtacgtgctgtccgccgcgccggcggaggccgcgcgcgcctcgcccacggacggcgccacgccgctccacctcgccgcggccggcggcgcgccgggcgccgtcgcggccgcgcacctgctcctggccgctggcgcgtccgccgacgcgctcgctttctcgggcctccgcgccggcgacctcctcccgcgcgccaacgccgccgccgacagggaccgcgcgctccgcgtgctcctcaagtcccccgcggcgtcgccgtcgtcctcgcccaagaagtccgcctcgccgccaccgccgacggcggcagctgcggcgccggagccgaggaaggagtacccgcccgacctcacgctcccagacctcaagagcgggctcttcagcaccgacgagttccgcatgtacagcttcaaggtgaagccctgctcgcgcgcctactcccacgactggaccgagtgccccttcgtgcaccccggcgagaacgcgcgccgccgcgacccgcgccgcttctcctacagctgcgtcccctgcccggagttccgcaagggcggcgcctgccgcaagggcgacaactgcgagtacgcgcacggcgtcttcgagtgctggctccacccggcgcagtaccggacgcgcctctgcaaggacgaggtcggctgcgcgcgccgcatctgcttcttcgcgcacaagcccgaggagctgcgcgccgtcaacccgtccgcggtctccgtcgggatgcagcccaccgtttcgtcgccgcgctcctcgccgcccaacggcctcgacatgggcgccatgctcaacccggcctggccctcctccccggccagcaggctcaagaccgcgctcgccgccggccgggagctggacttggacctcgagctgctcgcgctcgaccagtaccagcagaagctgttcgacaaggtgtcgtcgccgagggccggctggggaggcgggatgggctcgccgctgcccgccgcggcgcccagcaccagggccgtgccggactacgcggacctgctcggctccgtcgacccggccatgctgtcccagctgcacgcgctgtcgctcaagcaggccggcgacatgccggcgtacagctccatggcggacacgcagctgcacatgccggcgtcgcccatggtcggcccgaactccgcgttcgggctcgaccactccatggccaaggccatcatgagctcccgcgcctcggcgttcgccaagcgcagccagagcttcatcgaccgcggcggccgcgcgccggccgcgcgctcgctcatgtcgcagcagcccaccgccggcgcgccgtccatgctctccgactgggggtctccggacggcaggctggactggggcgtccagggcgacgagctgcacaagttccgcaagtccgcgtctttcgcgttccgtgggcagtccccggcccccgcgccggctcccgccgagccagacgtctcgtgggtgaactctcttgtcaaggacggccacgccggcgacatatttgcgcagtggtcggagcaggagcagatggtggcctaatctatcgaccgtcactgctggctcatagcatctagctgaccaaagttcattcctttccttcaattgttttccccctttgtttgcttaattcgattcatatgagatgttttttactagtacatatatataggacgttctataatatttgttcatcaccaagaagcatggatgcccaaagggagctctgtattggatgaggaaggaacacccagtattttacttgtacgaatttataaatattttttatatttatttatatcacttgatatatatataaaagatatcgagaggacagtaatatttg

SEQ ID NO: 1620 - DNA, 2277 bp, Zea mays
acagctagttttagcacatgaatctataaattttacgagaaagataagttcgattggtcatataatatcaataaagagctaaataacatatagatagactgaaagattgctgcagtacagctgtgatttgaggggcgtgttagttggggttggggcgcgtgtgcgctccatttcacttcaccgttcgagtgggcaaaaagcagaatcctgcctttccaactccaagggggagttgccattcctgtcatccggtgtggcctttgggagagggagagagaaggaaggggaggcttcttccgttccggcagcggctccctccgctttcggttctttgcaagatcgagcgagcgcaatcatcgatcgctgccatcatcaccaggcaagcatggcattagcggatggagaggcggattattcttcttgggacagtgacgacgagtaccagaaattcatccaaaacatgaaccctccaagggtcaccatcgacaacacatcatgtccaaatgctacagtcatccatgtggacagcgcgaacaagtatgggatactgttggaggtagtgcaggtcctcaccgacctcaagctcatagtcaagaaggcatacatatcctcagacgggggatggttcatggacgtcttcactgtgacgaaccaaagtgggcacaagataacggacgaatctgtgctgcaaggaataaaagactacatttacaagtctatcgggcctgactcctgcttccttccctcgcggaggagagccgtcggggtggagccgtcctccgaccacaccctgatagagctaacggggaccgacaggccgggcctcctctcggaggtgagcgcggtgctcacgagcctggagtgcaacgtggtgagcgcggagctgtggacgcacaacgggagagccgccgccgtgatgcaggtcaccgacagggagtccgggctggcggtctcggacgcggagagggtcggcaggatcaaggggcggctctacaacgtgttcagagggaggagccgggacgccaagaccgcggtcgcgacgacgggcgccacccacccggagcggaggctgcaccagatgatgttcgaggaccgggactacgagaggcgcggcaaggacgatggcagggcggcggcgagcggcagcaaccccggtccggtggtttcggtcgtgaactggcttcagaaatactactccgtggtgacggtccggtgcagggaccggcccaagctcctgttcgacacggtgtgcaccctgacggacatgcagtacgtggtgttccatggcagcgtggataccgagggccccgaagcttaccaggactactacatcaggcacatcgatgggtgtcccgtcaattcggaggccgagaggaagaggatcatccagtgccttgaagcagccatagaacggagagtgtccgaggtaactcagcagcatgccagcatcaagcacatatgcgattactttcatttttttttctttatcatcgactgtatatatatgcacttgcagggcctgaagctagagctgtcgacaggcgacagggtgggtctgctgtcggacgtgacgcgcatcttccgcgagaacggcctgacggtgacgagagcggaggtctcgaccaggggcgacgaggcggtcaacaccttctacgtccgcgacgcggccgggagcgccgtcgagctgaggacgctggaggccatccgccaggagattggccagaccgttctccaggtgaaggggcaccccgagcagccgaagccgccggtagccgcgcaggactcgcccaccaggttcctcttcagcagcctgttgttcagaccgaggtcgctgtgcaacctcgggccctgatgatgagttccagctccagttccagctagcgcagcgcgtgcatgagaattgagaactgtctgttgtcgggagatgctgctgtaccccaagggcccaagggcaagagttgtacaacgcgatcaggagtgttcattcgtcagaagctcagaacaggtgaccagaagtcgtttaaagcgaagcccacacccaacagctggtgaatactgaatacaccctatagcatcgtccaccgttgagtagtgaaaggtgtagttctgtaaggctatctccagtcctgtcgacatggtggtgccccattgcaagtatgattcattcaagcttgctgtaaatactgcctcccacggccatctccatctatttattctctagacatcagcagcggtcactgatggcgttgcctcttggggatattcagaggctgggtc

SEQ ID NO: 1621 - DNA, 1694 bp, Zea mays
atggtaatgaatcacgatccaaaatatttctcttcataataagttaagacccttaattagttttattttaaaaataaatagaaatatagactaatcatattttgattcgatccttaaattttatattgtaaacatctagatcacattacccccatagtcatgactctcgagtctccatcgatttagtagatatatggagttatggacaccttttcccgagcgtccacctctcccatcccatgtggtgtggcctgtctctggtcctgacgcagcttcttgttccactcgtttcctcgccggctcaagcacgggtggaaatgcgacgaaattgccttttgcatatatacatccccctatgtcttctgcatgcgagcaatgatgtcgtgtgtgtctatccatgcacggaaatttcagaacaaaagtttcagttgggctgggctggtactgcggcaaacataaagccagagagagccggggtgcatcaccgcgtcccccggacgcgctcctccaatcatcgccacagggaaaaagaaggtggcatggcatggctataaacagaaaccagcccgccgtgtcgtgcctactctctccttcccccaaaataaaagaagcgattttgaacggctccgctagctaaagcagggcaaggcggccggaaggcaggaaatccgtacgcacgccgaggtcgaggtcgaggtctcagcagggaggatggaaacggagcagcagggcgtggttgcgggggtgaagccgacgctggccaaggggacgccgtcggcgtcgttccggctccgcaacgggagcctaaacgcggtgcgcctccgccgcgtgttcgacctgttcgaccgcaacggggacggcgagatcacggtggacgagctggcgcaggcgctggacgcgctgggcctcgacgcggaccgcggcgggctggccgccaccgttggcacctacgtgcccgacggcgccgcgggcctccgctttgaggacttcgaccggctgcaccgcgcgctcggggacgccttcttcggagcgctggcgggccaggacgacgcggccgcggacggcgccggcgccggggaggacgacgacgagcaggagatgcgggaggcgttcagggtcttcgacgtcgacggcgacggcttcatctctgccgccgagctgcaggaggtgctcaagaagctcggcctccccgaggccagcagcatggccaacgtccgggagatgatctgcaacgtcgaccgcgacagcgacggccgcgtcgacttcgccgagttcaagtgcatgatgcaggggatcaccgtctggggcgcctgatcgatctcatcgtcgtgggatcggacgagtgtgtgtgtgtcaagcaaattgaacccacaaagctccgcaggacccgtatttccttcctcgagacagcgatgcgaccttcattcttgtcttgtcttgtggtggcaccggtgtgtctctacttgtgtgtgctcttcttttaaattcattaattaatcttgtcgtctttcgctggtcaagcagaggcgatgagaatggttcatgcatgcccggtgcatgttggtggatttgcaattttgcattaacccgatcgcgcctgatctgcttgctatgggccttctgtttttttgtgactggatggccctctgctttgtggaccaaaaagtggttcaggaatagcaatcagttgggct

SEQ ID NO: 1622 - DNA, 1869 bp, Zea mays
cgtcggcatccatcacagatatcgctcggaggcccgcgggtacgcagaccaccacggcgccgttacttatacgctcccctttcgcccacgatgaaataccgagacgaaatcctcaagccccaaccccaaccccaaacccaaacctctctcggaagttcctctcgcgtggccggtttcctcaacctccgtgtcggctcaatagtttcgcgagcgggcggggcgggggtctgagctcgatggccacttctggcgagcaatcggctggcggtgggtctgcggcgagggcgtcgaagctgcgctacccgctgcggtcggcgagcaaggggaaggccgcggccgtttccccggcggcggatgcgcctcccaccaccatctctgctccgcgtcgggtaaagccatcttcagatgtcagcaagagcatgtgtttagacctttctgtgaaggataagtctgtcaagcctccacggaggcactcaatacaaactaagccaggagctagcccaaggccaataccttctggaactgtgactccggtgtctggggttcggtcaaagagatcggacggccaggggaggtttgatactccgacatcagaagtgtccatgtccatgtcaaggcgcaagttcagcacgctttcttcaatctcgtactggatgacacagatcaggcttgcagaggctgcttccaaacactcagtttctctgggcttctttaagcttgctcttgaatcagaatgtgagcctttggaccggatgagggaagaactcaagtcctatgtagtccgccattgcttagcgacagaattggaggacccagtcaaggacattcttcaggtttatgatattgtggacgattttgagaagctgaagatctctgcagagccctcagagcaacaaaaaaagtctgaaaaggctgctcgtaatgtctccaatgtgtcagccaattgtaatctgaagccaaggtcactaaactctggtgctactgaaagtaaggaagctgggaagaaagagggcattcagaaagcgaaacctgatgcaagggtcagaggctccaataacaggaatccagtaaaatgcaccaccgcaaaggaagtagttgctaagaacactggtaagaaaaccaagaaagaggccaagggtcaggaggaagttagcaatggagatagcgatgcatcctcagcccttccagatcaggaatctgttgatgttgtgaaggagatcacccatgaagataaagagaacatggacgagaatgaaatggctatggatgttgccatagcgcaagaattctagaacagccggaccagcttcagattcaatcgttttttattgctgaagatgaagtattagtgtgtggttgcttattttggttttcatcattgttaatatgatagtagagcttgtctgtgtgattgctgaaccatatacgctcctgaagagtgtgtcataagttgatgattgcctgtattcctttttcaagtttgcagctttgcatgtggtaatcgtgcatctgaatatagtcggatttatcttttctcgcgattcgaaccgacagaagatcctccctggtatttgtgttgtgttaatcgcgtcaagagttgttgtacgagatgttgagggatgccaggctggtgagctcaccgaggatcgagatgctgccgcagaggccattgctcgcgaggctgagtgactgcagctgcgtcagaccggacatctcgtcaggcagctcgccgacggacctgttcgagctcaggtccaggctgatgcccaggttcgacagcgcgccgatctccggcggtatggggccggagaagctgttgttgctcaggtccagcattgtcagcttcttcaggttccgaatcgacttggg

SEQ ID NO: 1623 - DNA, 1704 bp, Zea mays
ttgcatcgttcgtgttttgtcccctgctgctctttttcttcagagtctagagagaagcggttcagacagacagagagaggcaggagctgccctgcactgcatgcttgctctgcttgtggattggattggagtggagtcggagatggtcagatggatgtgtatataagggaaagcttgtggcctttggagccatacaatgatcaggaactgggagtggcaagcgccaaggagtagttagagctcagtagggatacagcagtttctgagtcacttcgtctctgacatccacgagtaccagctataccagttttgattccactctgatttgctcatcaagcgtcaatgctccctccaatcattcttaatctcaggaagttagcagtgagatgctttcagtcacacttgttttagtcttctcctttcagaaggctgatagtcttagccttataccgttggtcttctctatttctctccttcctctgcatgcaatgttgcatttctcgattccagttcagagacttccattcctagagttgcgtggtactcacctcttgtttaaatccacttcattgcatgcaggttgaaagagataggagtgagaggcagttcccttccctactctcacaatgcccatggagcaagcatccaggcactgcgataaagacacgctgaagatggccatgctgaaacacgaagagactttcagacagcaagttcacgagctccatcgcttatacaggatccagaagctcctgatgcgagacctcacacgggagctcaagctcaagagccagaggagcctgcccaccacctcgccgaacggcagctgcgccgagtacagcagaggggctctcggcatgtgcgcctacgagcgcctctacgccgctctcggccgcggcggacacgtagcagcagcagcgacgccgacgccgacgccgcgcaccgctctcggcctcgacgtcgtggcgccagtcgtcgagtacgtgcggagcgcggaggaggaggacgacgacgacagggcggaggaaaccgacgaagacgcggagctggagctcacgctcgcggtgggcggaggcggggccaagaagcggtacgacgagtacccgtccggtggggagagtctgtcttcgtcgtccacggagtccgacgtgctcaccgtctccggccgtgagtggcgtcgggcgcgcggcacgccgtatcacaagatgaggccggcgaccgggctggacgtggtgcaggtggaggacgacgtcggggtgccgccgccgctgctgttccactggctcagcctcaagatggcatgacgcgatgcgaggaagcaagagcacattgcatgtgtgttcgttgctgcttgctgtgtcagggtgttgacttgctactgttcttcagttgaatgcttttgtgtgttaggttttagtggtggatcaagtctagaaatcaataattggctggctgttcatgataacatgtaggagagtcttccctaacataagccgggtgtgggggcctttcagatgaagctgtgtgactgactttctgccaactacaatctgcaagtgttaccttctgccctgatcgacggacgtaatactgcaagacttcagtctaaaaatacgagtaaaaatgaacttctgacagtttttgcagatcaagtaaacaaataagtgcttctttggaacatagcaaagaaaaacatgggaaata

SEQ ID NO: 1624 - DNA, 1533 bp, Zea mays
gattccacgaacacatgagtgagggtgaggtgaggtgagtacatgatgattatgatggcatggcgatgcccgatgcggatgcgctcgggcgacgctcctctctctctctctttctctcgctacatattcttcctctctctatctttgttctcctccgcccagctttcagacgcgacactcatcgcacattcccgtcaggccggtatccgcctcgggcttcgccgaaatcctacgctacctctctgatctctcccccggccccgagagcaccagattcacaacgcgcccgccgtgccgtgcggcagctgccttggcctagcctaggtgcgtgtgcctgcggaagctggttgctagctagttgctgctcgagctactatctgtttcgcgcggtgatcgacaatccggcagcgggagcggagctaggagtacgagagacacaaggccacgcgcgcgatgaacatgttcgatgggatggagagggctgggtacggcggcggcgctgggccgatgggcggggtggtgctgtcgcgggaccccaagccgcggctgcggtggacgcccgacctgcacgagcgcttcgtcgaggccgtcaccaagctcggcggggcagacaaggcgacgcccaagtccgtgctgcggctgatgggaatgaaagggctcaccttgtaccacttgaagagtcacctccagaaatacaggcttggaaagcagaccaagaaagacacgggtttggacgccggcagaggggcattcgcggcgcagggcatcaatttctccacaccagtacctcctcctagcattccatctacggccagtgacaatacgggagaaacgccacttgcagatgcgctgaagtaccagattgaagtccaaaggaaattgcacgagcagctcgaggttcagaagaagctgcagatgcggatcgaggcgcaaggcaaatacttgcagacgatactcgagaaggcccagagcaacctctcgtaccacgcgactggagccgcaaacctagaagcaaccaggtcgcagctgacggacttcaacctcgcgctctcaggcttcatggacaacgtgacccaggcgtgcgagcagaacaacggcgagctggtgaaagccatgtccgaggacggtctcagagcgaacaatctagactttcagccgtaccatggagttcatgacggggacgatgtcaagtgcgctacggacgaagggttgctacttctggacctgaacatcagaggcgggtacggtcatcggatttcgacggatctgaagatgaatcaacacatgcggtgaaaagttcagtagaaagaaaggcgaggacagtagtttaatcttgggtaacccatcaatctaagagaagaggtgcccttgtgtttgtgagaaattctttcggccatcttgattcctaacgatgcttctttatggtgatggtcagcgtattgcttatgtaaaatttggtgagaggctccgaataagggtaactaatcttatacaagatctttatatatacttggatttgtatggatctagggt

SEQ ID NO: 1625 - DNA, 2177 bp, Zea mays
tgttgcccgtgtggtgtcggcctcgaccgtcgccgacgccgcgcatccagcgtccctgtctacgttaccgactcctcacgctggccggaccacgtgcccccacgtctcgccgtccccggttctcatccaccccgagctcccccaacgcgttttaccacagaccaataagtggccaatccctcgctgcccccacactccagaagtccagaccaaagctctaaagtccaatccctcgctagccacttgccatctgatcaaccagccagccgatctcagcgatccgccatggccaccgcgtattacgagaggccccgtggcggcgccgtcgaggaggcggacgacttcgatgagttcgaccccacgccgtacggcggtgggtacgacctcgccgtcaccttcggtcgcccgctgccaccgtccgaggaaacctgctacccgtgctcggcgccctcgacctcctacgacgcaccgcactacgccgcctccgagccgtccccctacggtcaccacgccaagccaaagcccaactatgggttccgcccccagcaggagcaacagccgtcttacggcagcggctacggatccaggcccgagcccgctgcggaggagggcggtggctatggatctggcttcggatccgggtatgggaggaagaagcaggaggaggagagctacggctctggatatgggaggaaaccgcaggcggaggagagctacgggtccggcgggtacggctctggctacggcggtcagacccggccggaggagagctatgggtcagcagggtatggatctgccaatccgcaggctgagacatacggctctggctacgggaggaagccacaggtagaggagagctacggatcggagtatgggtctgggttcgggaggaagccgcagattgaggagagctatggatcggggtacgggaggacgccgcaggttgaggagagctatggatctggttacgggaggaagcctcaggttgaggagagctatggatctgggtacggcagcaggccgcagggtggggaggagtatggcagtggtggtggtgggtatgggaggaaggcacaggaggagacctatggctcctcggggtatggctatggcaggaagaacgaggagcagagctatggtggttctggctatggttatgagaagaaggcatctgaggaggacgaaggtgcctttggctctggtggttaccggaagccaaaaccctatgacgaggagacacagggttcatacggttatggagaggagcagcccaagtatcagagtggcgggtatgagaggccgagctatggtgggggagaggggtactatggccgcaagaaagatgatgacgactcggatgatgagaagaagcggcgtcattctaagcaccaccaccatggccaccactacgatgactaagcaccagtgccttctgctgggcgttgccctggttcaccgctactgctactatatccattcgcttgcataaataaagacggctgtgtaccttctggacactggaccaccgttgcgacgttgcctctgcattgttacagccgagccgtgagtgtgctgtttattatctaatgttcaaatcgttgtgatgaaccaccgtccacgcctgttgatgccgaaccgaatgtctggatttactttgcgcctgttcttgtggtgtttgtcgccttccctgtcacagttatgtttggtgtcgtgttgttgtttctggaacgttctcgtggtggtggatagatatccccatttctgccagctgctcttgtcgatacctttcaacacctcgttttggtgctccaagtccctccaaacaggtgcccctgatgtaactgcgaacaacaggtgtctctgatgtaaggccggttgctataggtcgtggcagtctgctcagtaacgagcgaagtgattgatctacgcttcctttgggaggtcaattatctagtttcgcaagtgaaggttttgctttgtagttcttgtgtcaaatttgcagcgacgaaccgaaacgattcgtttattgacatatcctattcatcgacatacctcgtaaattgtaattgtgtgtttctatattttgtctcagcgatctgattttactagcctccgtttctatatattgtccctagcagacttctgttttagccataaacctaaatcgaaagattcag

SEQ ID NO: 1626 - DNA, 5451 bp, Zea mays
tccaaatcactcgacgcagcaggcagcacacaacccaacactactctccctcccagtctcgccaacgccaccacccccaccattccaaacccccgtctcccaccggctgccgtttccctcccccctccctccctgcctccctcggcggctcctcgcggacggagagaaccccgctcccttgcctagggttcccggaaccctagccccgatccgtacgcgcgagggtccccggcgacgaggaggctgctgtgaggggagggggcagaaggcgcgggaggcggaggcctgtgctgtatgtcagatcgtgggagccggcgaggcggaggcggaggaggagactacggacacggtcagctcgcgaacccgctccaatggccgcagctaaggaaaaggcgtcggtatgctgccgcgatgcgcccgcgcgtgtcgctggcgccccagtcgtccccatgcgcgcgatcgccgcgtccccggtcggcaaggtcgtcgccctcgccgcgggaggcggtgagcgcgtttctgcgtcggctgctggctcaagcggcgccgtgatcgaggagatcgccgcggtccagcccaccaccgcgaaggcatcctccaaagggataccaataatgacaagagcccagaggtgtcaccctttggacccattatctgctgctgaaattgcagttgctgtagcaactgtaagagttgctggaagatctcctgaggaaagagacagcatgcgctttgttgaagctgtgctgttggagccagaaaagaatgttgtggcactggccgacgcctacttctttccacctttccaaccatcactgctccctagaagcaaaggttctgctgttattccaagcaggctacctcctaggagggccagacttgttgtctataacaaacaatcaaatgagacaagtatttggatagtggaactatctgaagtgcatgccgctactaggggtggacatcacagagggaaggtgatatcatctgaagttattccggatgttcaacctgccatggatgctatggagtatgctgaatgtgaggctactgtcaaaagttatcctccatttattgaagctatgaagagaagaggtgtggatgacatggatcttgttatggtggatgcttggtgtgctggctactacagcgaagctgatgctcctagtcgcagacttggcaagcctttgatattttgcagaactgagagtgatagccccatggagaatggttatgctcgtcctgtagaaggaatccatgttgttgttgatatgcagaataatgctgtgatagagtttgaagataggaagttggttcctctaccccctccagatcatttgagaaactatactcctggggagacaagaggaggtgttgatcgaagtgatgtaaaaccacttatcatcaatcagcctgagggtccaagttttcgaattaatggctattttgtggaatggcagaagtggaacttccgtattggcttcacccccaaagagggtttggttatctattctgttgcttatgttgatggtagccgtggacgtagacctatagcacataggctgagctttgttgagatggttgttccttatggagatccaagtgaaccacattatcgcaagaatgcatttgatgctggagaagatggacttggaaaaaatgctcattctcttaagaagggatgcgattgcttgggctacataaaatattttgatgcacatttcacaaacttcactggtggtgtggagacaattgagaactgtgtttgtttgcatgaggaggatcatgggatcctttggaaacatcaagactggagaactggtttagcagaagtaaggcggtcaaggaggctcactgtttcatttatctgtacagttgcaaactatgagtatggtttttactggcacttctatcaggatgggaaaatagaggcagaagtaaagcttactggaattctcagtttaggggccttgatgcctggggaatcgaggaaatatggcacaactattgcccctggtctgtatgcaccagttcatcagcatttctttgttgcccgtatggacatggctgttgattgcaaacctaatgaagctcataaccaggtggttgaggttaatgttaaagtggaaagtgcaggcacacataatgtgcataataatgctttctatgctgaagagaagttgctcaaatctgagttgcaagcaatgcgtgattgcgacccttcatctgcccgccactggattgtacgcaacacacgaactgtgaatcggacggggcagccaactggctacaggctcgtacctggttcgaactgcctgcctttggctctgcctgaggcgaaatttctgaggagggctgggttcttgaagcacaacctctgggtcactcaatacaagcgtggcgagatgttccctggaggggagtttcccaaccagaatcctcgcatccatgagggtctgccaacatgggtcaagaatgataggcctctggaggaaaccgacattgttctctggtacgtgttcgggctcacccatatccccaggctagaagattggccagtcatgccggtggagcacataggcttcatgctcatgccacatggattcttcaactgctcgcctgcggtcgacgtgcctcccagctcgtccgatgcggatgtcaaggaagccgagtcgcccaaggccatccagaatagcctcatatcgaagctgtgagctttgctgttctgccgaggaaaaaggatccgcgcgcggctgctctccctactatttttttatcgtattccgcgagtaaaaaggaaaactgctcgatgtccttttgtttgttgcttggtaataccgttctgtttgctataattatcgatcagcgggatgtgaagtactgtttacattgctcgcgttctaataaagtactgtttggacttgcttaacaccacattgcatatattttgcctccctgttcgtgcgttcagttacatttcgccgacctattatttgaatgtctccacctttgtgcacaaaaatgcgaacagtaacatgtctgtcaatctctattattgcctgccttttcaatcagttccagaaaacatgtctgtcaatctctattattgtctccgtttgcatcactccactccgactcgtccgtcaactgccgtggcggatcgtggtccaagaagtccttcacgctggccgggaacgcaacggctgccgtgtcggcggcagccctggcgagcagcaggtgcgccagcctcgcgggctccctgcctcccccacggtggtaatggcggatccaggcgtccagcctccccttctccctgtcgcacttggggccgaccacgcccacgaccttggccaggaacccgtcggcgccgctgcagtcgcacccgcctccgtcgtcgtcgcggcggctgctgccaccgccgccggatgacaggccgagcagctccatgagccgcgcgatgtcctcctcatcgccgtcgccgccgccatcgttgtcgtcgtcttcctgttggatgtgcttgccctcctgggtggcggcggtgaggaagtccagcgccgggccgctgctgctgccgggcgctggtgcgggtgctgctgggtcgaggaagaggagtggggaggcggtcatggtgtccgagaatggcgacgcctcggtttggcgcgtcgttgccgttgcctttgctgtagctggcggcggcgggctctccttctgctcctgatgttgctgctccgactccgacgccagccggtcttccacctggaggagcgcagacgaagagagctaccggcgtcagggccgagggagggcggcggctttgtctgcgatgagagaagagaagaggaggaggggaaaacggttcggggcccacccgctggaggcaggagaagaagccggcgtgccgcgagaaaggctgccgccgcatcgtgccgtcgccggggaccggagcggtggtgtcgggcggcgccgcgccgcgtgggttgggggttgcttttagtttttctggcggcgacgcgtttaggtaggtcacggtgaacgagtacgagacgagaatgagagtggatcgtagatcgtttgtgttgttttgtttctacggccgctggaatgaacaaatcacacgcaggcagatcagatccatcgattccaacgtttgaacgcaagtggcgagaaaaacaaggggggaaatttgtgcagcgccgctgcaatgtacttcaaagcacatgaatgcgaaacggagtatccacgagttcgctgcgaaatgtcagctgcagcacggctacacaacacaacacaacacaacaatgtgcatttggtaaattggcagtcgagactagaaaaccaagactctgcatacagatgcagtggagccgccaccgccaggcacgaatggatctctctcctctcctcgtctctccactcctcctcacactcctcctcagtagtatgtgcaggagccatagcctgtgcgaaacgagagggaagcggcattcgatgagaagacagatggacggacgaaggatctgagagcttattagagagaatgaatgggggtacttacttgggtcggactgcacgacgagcgcggagttgttgaagtagcagttccaggggtgcctgccgctgtaggcgtagtagaggttcatggcgacggcggcgcgggacacggggctgtccgggtagtagcacggcccgcccttctggatcacggcgcagctcacctgggagcacgcgtagtccaggttctgcgccaggatctcgttcgacgccgacggcttcgcgatgcaccacgtcttctgcagctcgtcgttggcaaccaagtccaaccagatcagtacttaagtattcattcatttgcgagttggcgggcatacatacatagatagatagagcgtcaagagccaaaggccgtacctgtccctccacgagaccaacggtgctgcctgcaaaacacccgagagagagagagagagatggtggcccattcttttcagacgaacggcgtggtggttctgcttgagcgcaatgatctatctatctatctcataatgatagatggagtcgagccgagctcacctgaggtgaagaagtagaggagcacgaggcccagcgagaggagctggagcgacgccgatggccggtctcctccccgcatcttgctccgctactgtgcgcttgcaccaggattggagctgtgaactttgagagtcggtcagatgtggggatgcggactgcaccgaagagtactactagtagggaggtggagattgcggaggtggagattgcggagagcattttcagattgccttgtcgagcagggtagggtaggtgacagacactcacaccacacagattgcttgctgggatgcatgcgcgtgcacgttacacgcatgtgacagcgtgaatttgtttaatggctctccgtctctctggcttcttggacccaaggcaaccaac

SEQ ID NO: 1627 - DNA, 3061 bp, Zea mays
agtggttaggtcacacgcacgcacctcatcgcccacccctccaccgccgcgcccgcgccggtccccagccacagccaagagaacacgcacgaaagacgaagaagaagaagaaaaacggcagtagatgagcggcggcaagccggcagccggttgatgaccgaaagatttttaaccaaaccacgagcagcagcaacgagacgtagctttccatacatcggctgtcctgtccttccttgtttatccccacagcaataacttcctcttctgctgacactggcctgggaagtgggattctgatgccaatttaattggccaggtaggcgccctgaattgccacacctaccggcccgccccaacccaatcatacatccatacggctacgagcgacggagcgagcgagggaagttgatgttgtagatgccatccttcctctcctccttccggatcgtagtcgtggcttgactcagcgtagcggccagggcagcggccatgtcgtcgtcggtccggcacggctcgtcgaggggccaggcatggtgagttaagtagtgagcgccgctggctgtactatttgaattgcggccggtgtttcgattccatgcaggattccgttgctttcccctcgcgtgtccgtcgtgttgacgatgcgttccgtatctcgcgccaggttctgcaccacgggcctgcccagcgacgtcgtcttcgaggtgcacgacatgaccttccacctccacaagttcccgctcatgtccaagagcctcaagatccaccgcatgctcagcgagcaggaggaccagcgtccgacgcggggacggcggcagcggaggagacaggtgaggagcagtgacggagacgatgacggtgctgcggaaacagagatcgaggaggaagaagccgagcctgagcagcagcaggttaggacggagggggagggcgacgggcagccgtactgcattgcgttccccgacttcccgggcgggccgggcacgttcgaggcggccgccaagttctgctacggcgtccgcgtggacctcaccccctggaacgtcgcgccgctgcggtgcgcggccgagtacctggagatgacggaggaccacgccgaggacaacctcgcggcgcgcgcggaggcgtacctggaccaggccgtgctgcggcaccccggcgacgccaccaaggcgctcaagtcctgcgaggagctgctgccgctcgccgaggacctcggcattgtgtcccgctgcgtggaggccatcgccgcgcgctcgtcgtccgcgtcgcggtcctggttcgacgacctggccgtgctcggcctgcgcatgtacaagcgggtgatggcggccatggccgcgcgcggcgacgtcagggcggaggccagggagagctgcctcgtgtcctacgccaggggcaccatcccggggctgtcgaggtccatgcggcgccgcctcgcgtccgcgcccgtgtcctccgaggtggagcagaaggagctcctcgaggcggtggtcgccagcctccccgcggacaagtgctcggggcgcgtcgtcaccgccaagttcctcttcgcgctgctgcggacggcgcacatcttgcgcgcgtcggacgccgcgcgcgcggcgctcgagcggaaggccgccacgcagctgcagcaggccgcgctggaggacgtgctcatcccgagctactccggcaccgcggagacgctctacgacgtggactgcgtccagcggatcgtcaggtatttcctcgcggaggaggagctcggcggggaggcgtcgtcttcggccgcgatcgaggaggaggaagcggtggccgtggcgcggccgtccgccgtggtcatggtgcaggtgggcaagctggtggacaattacctcgccgaggtcgcgtcagacgccaacctcaagcccgccaagttctgcgacctcgcgctttcgttgcccgaccatgcccgtatctacgacgatggcgtctaccgcgccgtcgacatctacctcaaggtacgtgccagatcaccacggaacatgtcgtccacgctaaaaggacaaagaaaatatgtctcctttcgagctgtcacgctcacgcccaaagacctccgtctcttttggccacccaccgactggctactaaaatttgcaggcgcacccgcggctgacagcggaggagcgggaccgggtggtgggcgtggtggactgccggaagctgacggtggaggcgtgcacgcacgcggcgcagaacgagcggctcccgctgcgggcggtcctgcaggtgctcttcttcgagcagctgcagctccggcgcgccatcgcgggcacgctcctggcgccctccgccggcgccgctccgcgcgaggctgcggcgtggcgaggcgcgacggcgctggcgcaggacagccaggtgctgcggctggacatggacagcatggcgagccgggtgcaggatctggagcgcgagtgctccagcatgcgcagggccatcaagaagatcgacgggcgcggcggcagcggcagcggcagccggtcccccggcggccgcagcgcggacgggtccaggcccgcggcgggcgggtggagggcgcggcacgggtgcaaattcagcacgcaggtgtgcgactcgcacgcgcgcaacgtggtggcgtccagggcgtccaggatggggatgagcccgtagccaccgctcgtgcagtgcggccgtcctctccgtccggcgctctcggtccagacatgggatttctcacgcgatcgcgattcacagtgacacacgaccagagagatcagcacgggaagagaatggctgagaagttccagatcttttaccgctccaagtctcagcaccagcctctcaggtctcgcacgtttttacatctctcgttcgtggacgtgagaggtgtgatggccatttgttcgtttgttgtgcgtgtcgtgtcgccccaaatgggcgtggatccgtgtgagttgtcttgtctgtgccggagggagggcggtctgtaactcgccagcaagccgtttccattcagcttgtttctactactcgattgcgccgtgcatatccggttggattttttactgtactaatg

SEQ ID NO: 1628 - DNA, 2117 bp, Zea mays
tcccactgcactgctgctccgctgccgctaccctttccctctcccttctcgtcctcggtcctccccaacccatggccacggccaccaccacccactgccccttctcccaccacgctatttatcgcggctgcacgactcctgcccatcaggcgccatagagacgcgtgggaccgaagccgccgatcaagcgctgctcggggcggagcagcggccggcggtggtgagtgctggcagacaggccggcaggtcaggcagagtgaccagctggtgagtcgaagcttgagcggggagctggactttggcgggttccggcgggctccggagcggagatggtgctggatctcaatgtagcgtcgccggcggactcgggcacgtcgagctcgtccgtcctcaactccgcggacggcggcttccggttcggcctgctcgggagccccgtcgacgacgacgactgctccggtgagatggcgcctggcgcgtccacggggttcatgacgcggcagctcttcccgtccccgaccccgccggccgagccggagccggagccggtggcggcgccggtgccggtgtggcagccgcagcgcgccgaggatctcggcatggcccagaggccggtggcgccagcgaagaagaccaggcgcgggcctaggtcgcggagctcgcagtacaggggcgtcaccttctacaggaggacgggccgctgggaatcgcacatctgggattgcgggaagcaagtctacctaggtggttttgacactgcgcacgcagccgcgaggttagggagcgtttgcttgtttgaattcgcgtccatttgcatttctgtgatcgataggcgcgttgacacggtcaagtttggatcaagcagggcatacgatcgagctgcgatcaagttccgcggcctcgacgctgacatcaacttcagtctgagcgactacgaggatgatttgaagcagatgaggaattggaccaaggaggagttcgtgcacatactccggcgccagagcacggggttcgcgaggggaagctccaagtaccgtggcgtgacgctgcacaagtgcggccgctgggaagctaggatggggcaacttcttggcaagaagtacatctatcttgggctctttgacagcgaagttgaggcggcaagggcttatgacagggctgcccttcgcttcaatgggagggaagctgttactaactttgagcctagctcctacaatgcaggagataataacctgcgtgacaccgaaaccgaggcaattgatgatggtgatgccattgatttggatttgcggatttcacagcctaatgtgcaagaccccaaaagggacaataccttagctggcctccagccaacatgtgattcccctgaatcttcaaatacgatggcttctcagccaatgagctcatcatccccttggcccgggtatcaccaaaacccagcagtgtcatttcaccatcagcgcttgtactcgtcagcttgtcatggcttctttccgaaccaccaggtccaggaaaggccggtggagcgaaggcctgagctgggcgcccagccattcccctcatgggcatggcaagcgcagggctcccctcacgtgccgttgcaccactctgcagcatcatcaggattctctaccgccgccggggccaacggcggcatgcccctgccgtctcacccgccggcgcagttcccgactactacaaacccgttcttcttcccctagaccgcttttgacatgacagcttgctgttccggctcagctctcggcgtctgggatggcagctggtcttgcgtgtggcgtctagcagctctggtgatggaagaaagtgattgtgttttgtgtgtgtgtgtgtgagagagagagagagccataataagaagcgacatggctggtctccctctggtatgtgcctgttaggatatgggatatctccatgcatggattgtttccgagacagtagtagtattttgttgtagtcgaccatgcgtgtacatcagtataactggatctttgaagagctgagattttatgactcaacaagcattgacataatggcatgcactccaggaccactgaagcaaaaggccaatttgacatcattgctgcgtttcagatggt

SEQ ID NO: 1629 - DNA, 1580 bp, Zea mays
acgtcgaccagtacgtcgaaaaggaacacgtcgcccccatttcccacccgctttctccccctttggcctccccccctctctctctctcatctcctgccgataagaagcttcgccgccgtctcctctttctccgtcctagcaaaatcctccccgtattgagagccaaagaagaaaaaaaaaaaaggcaggaggccggcgaactacgcgaggaaaaattttctttcccgggaggctcgggagtcggacacgccacacgctttggtcaaaatcgtttccggttgttagcgcggctgctgctgccgctgctgtcgggggcgagcaggaaggggagcgaacgagcttgggcagctcaagaagaggggacgggggagggagcctgtggaaggcacctgagtacgcgtgaaggagcccgcgcgagagtaggggggaaaccaaatcgagagacatggactcggagcactggatctcgcgcctggccgccgccaagcgttactacgcggcgcagctcggccgcgtcgacgatgtgcccgggatggggacggaagaggtggagatggaggtggaggacgacggggacatggagatggagttggagatggcgctggagctcggggacgcgacgtggccggaggtcgcctgcccctactgctacgaggaccatgacgtcgcatccctctgcatccacctcgaggaggaccacccctacgagccccacgccgcgccctgccccatttgctcccaaaggattacaagggatatgcttaaccatatcaccatgcaacatggttacttgttcaagaatggtcacagatcccgtagatttattgttccagagagccatgcgatttcattattgagtcgagatctacgtggtactcatttacaggctcttctagggggtggtcatggccacagatcaaataacgcagtgaccacaaacatttccagtgatcctcttctttcatcgtttggcctgagcttctcagcatctgatgcaccagaaccatcaaaatcagcatcttctattccagacggtaccgcaatacgtaaggagacaccagttcagccttgggaatcaagtattgattcatctctcacgagcgaggaaagggagcaaaagcggaaacaggccaccgggagggcaacctttgtgcaaggcctagtgatgtctactctattcggagattgatcgctcaagcagccctaggttcttgcacttgctagatcggctctttctcctgcctggtccgtcgtcagatagtgctccacccggttcggactctgatggcagggaaaattcgccccaggaaacttagccgcgttcacctttttttttttcagaaaagtgcgccgttgattctagcatgatgcagcttgatttaagctagctgttgctgtacctgtacctttgtttttatcaatttatcggccagcaattcttatctgtaactcactggtacatcgtgttcgttaccaacatacatggtagctgtggcatctgcttacacaatgcaagaaaagacttgaaaattgctgctttcgtgaaggccccaaaaccacgcttgtccacgtgaacgcga

SEQ ID NO: 1630 - DNA, 826 bp, Zea mays
atggcgaaccgtccgtcgcgctcgcgcctgctggtcctggcgctcgcagccgcagggctactagccgccacgcgcgcggaagcctccacgccagcatcgccggcgccggcgccggggccgtcggcggactgcacggacgcgctgctggggctggcggggtgcctgggctacgtgcaggaggggagcacggcggcggcgcccgacccgtcctgctgctcggggctcagggacgtggtgcgcggggaggtggcctgcctctgccagctcttccagggcggccaggacttcggcctctcgctcaacatgaccagggccctgcagctgcccgccgcgtgcaaggtcaagacgccgcccgtcagtaagtgccacgtttctgttcctggtgtgcccagcgcgtctcctggtatttccggctccctcgtccggggccccagacttcgggcagtcgccgacgccgtcgccgtcaaccccttcgggatcaccggcagcaaccgggagccagaccagcgctccagcgccttccccagcgcgttccgccgctgccggcctctcggcaccaccacgggccttcaccttcatcgctgtcgcgactctgttggtgtaccgggtcttgtgagctgggctcactcacccgagttcatgcgctccgcccgtaccttaccccagtctgaccacaaatcatgtaccgagagatgtatcttgtgagcgtttccgtttcgtttagtagcactgcggctgttcatggatttcactgcctcgcataaataatgctaccggccggccacgaatagcttaccccgctgccgctgagtaagtacatcacgat

SEQ ID NO: 1631 - DNA, 2000 bp, Zea mays
ccccccccccccccagcatcggagaacggagggaaccagggagctccggccgcctagaaccggagctcccaaatagatcgatccatcggtcgttgagcggacacggcaatggaagcccacgcctcgcggggccgccgcaccctggaggagatccggcagaagagagccgccgagaggatgcagcacgccctcccgatcgcggcgtctcacgtcgactctcacgggaaccaaagagccggagctgagcttcttgctcgagttcaagaacttgaaaatgggaacacggaattggtgagggaaaacaaaatgctcttgtccaagattgatgagaagggagttgagaaggatgcccttgtaaaccgtttgaatgatctcgagcggaatgtagttccctctttgcaaaaaaacttgaatgacatttctttggagaaagatgctgctgtagttgctaaggaggatgctctagctcaactcaggagcatgaagaaacggctcaaggaagcagaagaagaacagtataaggcagaagaagactcagcctccttgagagcacagctaaacaccctgcagcagcaagtaatgggacactcttacagtggatatacaatgggaatatcgactgaggaatctgttgccatggaaaaggagatacaagatttacaggcacagctaaagcaagagtcactgctaagacaacaggagcaacaaaaattagctgaagagtcgcagctgaggcaacaagagcaagaaaaactagccaaagaacaaatccatattgcttctctggaggctgaaaagcaacagctggaagaccaaattactatgttgacaaagaaagctacagaggacgcttctgagtttgctgcacacaaggcattttcaatgcaagatagggaaaaacttgaaaaccagttgcatgacatggctttgatgattgagaggctagaggggagtcgtcaaaaactgctaatggagattgattctcaatcgtcagaaatagagaaactgtttgaggagaattcggccttatctacttcttatcaagaagccatagctattacagtacaatgggaaaaccaggttagagattgtctgaagcaaaatgaagagctccgttctcacttggagaaactaagacttgaacaagctagcctgttggaagtaagcaatatcactaccaaatcagatggacaaattgaaaacagtatctcaaacctaccagaaatggtcaccgagaatatttctctgaagggtcagcttataaaagaacagagcagatctgagagtttgttggcagagataatgaaactttcagctgagcttaggaaagcagtccaagcacagaataaccttgtacgcttgtacaggcctgtattaagagacattgagagcaatctgatgaaaatgaaacaagaaacttatgcgacgatccaatgatacatggtgtcaaactcaatccacgatactgtggaatggccgcatagtcacaagctccaccgtaggcctggttcggttgcatctgaattggaggtgattgaatccccttctattcaattttaactagggagagatttaatcccatccaatcttctctgatccagacgcaaccaacaagcccttgctcaagatgctggtgaatgtattggtctcatgccattttcaagatgctggtggaaagcagttctttcggtggctaccattcataagtagagttctgtcgagatcgttcaacctgtatcatactcttgtatacccgattcccaccggttcatcttataaactgggggcaaatggagaaaaagattggttagggcttgtttggtgaaaaagattggttagggcttgtttggttacaacttacaagggaggtggaggggactggagggaaataaactaatttttcccttaatccccacatttcccttctaaccaaaacaaattattatccctgctctcagtccacaaattgggcgcaacaactttttaaatcatgtcatttg

SEQ ID NO: 1632 - DNA, 1101 bp, Zea mays
ttccccatcgctcgacggccagcatccttatctcacgcgccgccctactcagatttttcaccgttgttgcttcctttatcttctggctgcagcgtctctatcttccatcgtgcagttttcctcaatctccaaccgtgagctcccctgcccatggtgccggccgagccccggcccggagctctccctgccgagctcgcccaccctctactcggtccccagccatggccgcctgcgccccttgcttctcccttctctctctctgctcgactgcagaccgccggctgagctttccccagcccccagctcggctctcccatggcgacgatctccctgctcggcagttctccggctcggatctccctccccgcgtcaggccaaagcttcccctgctccctgccggcgcccattcctgcgacccttcctctctctttcctctggccccctcgccatcgccggagctccctgctcctctgctcacggcgcccatggcgagctctctgcactcgcccatgtcgcgcgccttccgattccatggccgagcttgggccgcgccctcccggctcctccagcgcgcggaatcctccctgctgcagcgtccgagcgtcctgctcttacccccagctcgccgcgcgtcctggcgttcgtgccgtggagtctctggcgtgcgttcttttgtgcctcgcttccgatgtgttcgattaaatgtcggaccaagaatccaagatgtcgctcctcctcgctgtgaaatcctcacgctcaccattctctattcaatctcgtcgtcaagctgaaggccgccgtcgttcaggcaactaccaaatcgagttgtgatgtggtacgttaattaatcgcgtgatgcggaagacgagccaagttgaccccaagtgtgggctactccgcatgatggtgctgatcgacgaacctgcctgatcaagtgctaggacaaggatgatcgtcaagtggtcgcctaacaaacactaacctagtgttactcaggttctaactttgtgctgttgttgatggtgttaagtgccggtgggctcggccttcttataagtctaagtaacccttctatacttcttattgaggatgatcccttga

SEQ ID NO: 1633 - DNA, 10067 bp, Zea mays
atcttgtcctgcttccacttgatggtcaaagtgtgcctaaactggaaaagctctacctcagttgcctgccaacactatatgttcgacatctctgccagtttgttgctctccagttgtctcggcaacccaaagaagtcgagatatatatcaggaaaagcaaagatgcatgcttgtcagccaattacacccgtaaatacgagacaaagccagaacaacctaatggtttagagagactgtgggaagagaagtctctttcggatctctacccttccctcgccacccgtcaaggagatctggtattctcactctccaaatgactgcccaagcactcctatttctacccttccctcgccacccgtcaaggagatctggtattctcactctccaaatgactgcccaagcactcctatttatttcatcgtttcttcttttctaaagctgctgcatcgttttctattttttgaccaagcaaagctttttttacctgctagaggaactaggtgtgatctcactgacatgggctatgaagagacatttcagctctaaacatctcctttttccctttatttcgaaatatgtgaatgtgatagattccttttatacatacatatattcaatattgactagcagaattttgtggggggggggggggggggggggggtggttataattttttgcaaattcttagatcctcgattactcattctttgtaaattcacatgatgatactgtggcaggcggcggcgcaggaggaagcaggggcgtccgcttctactgctggtgcggaagaggaggagcggcgagggtgattcggctgcaattcgttgcggcgctcgtgctcggggtggccgtgctgctgtcggcgctcttctggctcccgcccttcgcgggacagggtggcggcaaggagggctcggatccgggcgatgagtttggaggtgagctccttcccccgcattgcgagatctcggttccattcgtccatggtcgccgtgccggttctatgctcgatctgcgtctgctttgcgctggggttcgttggtgaacgctcagcttcggatctggatgtgcatggtgaatagttgtggtttcgggctagaaatttgaattacatttggctgcgaggaaccttgtggagagtggagactggagacattgcgtgttggggccgcaagctggatcttctggtggagctccgagctctctgttggtgcgcggatgtagtcgcatatggctcgtttctgcttaggctgttggacaagtgtcggtgctcttttttattcagccgaaacaagtgagtcgttatgcgtttgcataaagtaaagttcaaatcaactggaacgaatgggtctgttttggcatgtgttagtgctatttttgtaaacatagtaggtttatacaggcaacaaagctttatgctaaaacggggctactattctgcgctggtctgtggtattaggtaatagctggagtgtggtcacaactcaccagctattttgtgtggcatattagattccccgtttcatcaaatttgatgatgccagggcccaaggatatcgattctgtgtgcctaactagatttagtgtggccacctagctttctgttagcattccttggttagctcagataatcagtacacaggaatttgccctattgcctattcttaaaccatatgaaatacaatcttgcacggggctgttatgaccggcgtgcagtacaaaaggaaacagcaggccagggggcatgcggcaggagaaggggatcaaggctgggacagccagcagtaattcagtaatcctaggatttatttccttttgagagtttccttttatttagagataagcttccttttattcagagagattagtttccttttattaagagataagctgccttctattgagagagaggctagtataaataggagatgtaagacaggaggaaggatcatcaaagaaattacctagccgtcttccctgtggaagccggaacctgagctagcctgttttcccacgccgtgaacacggcgtcccggcgtccctctcgcccagtcccccgccaacctccagcagtacaccagtacagcttgagggaggtccctggtaggaataggaatcctatcaacctggtatcagctatgtccagcgatcctccattcaccagccacccaccgccaccatcgccttccactgttccagggccgtccaccaccatctctccaccagtttccaccacacctacgccaatactcacgctggaatctgtggccacagcggtccacgatctgtcccggtcaatggcagccatgcaggattttctcctgcgatccatgtactcccagccagccccgtcacctaccatacccccaccacagccgccactctatgcccttcctcataccggggcgacagcaacacaaggagtgcccatacacatgctatccatgccggcgtcaccatcaccgatcccatcatatgcgatggcatccatgggcgcgccgcagtacacgatgacgacgtccccgacaccgccgggagcggccggcatgccattgccagcgatgtttcacccaccttacggcatcggcgccaatttcggaggcgtcgacggccttggaccctacggctcggtccagggtggccggggacaatttgagggggccatgtcgcacgacactgcgccacctccgcagggacagggaccaggcttcggtccccagccacctctcttctacaaactcgatttcccgacatatgatggcaccgtcgacccgctcaattggatcaaccaatgtgagcagttcttccgaggccaacgtaccccggcctcggatcggacctggttggcatcgtaccatctcactggggccgcccagacgtggtactacgccctcgagcaagacgaaggcatgccagcctggggccgtttccgcgagctctgcaccctacgtttcgggccagcagtgcgcggcacgaggctgtcggagctcgcccggttgccgttcatctctacggtgcacgactacgccgagcgtttcaatgcggtgttgtgccatgcacacaacctctcggcatcccagaaggcggagctctttgtgggaggactgcccgaccacatacggatcgacgtcgagctacgcgaaccccagaacctgcaaacagccatgcacttggcacgggcgttcgaatgccgtgcggctggcccaggggcgtttcctccagtacgtggcgggaggagctcgtcgcgaccaccgccgtccggtccaccccgacaaccgcacgggctaccttcatcgggttcgacgccatcaacgggttcctctacaccgacacgacagttccgccggctaacaccagcggaacagatggaacgtcgacggcaaggattgtgttacaattgtgacgaaccctatgtccgtggccacgtctgccagcgtctcttctacctggagtcggcggactacgtcgacgacacgttcacaccggaggatcacgccggggccttcaaccacggcgagcccggacatcccacggtcccaggggcggacgccatgcaggactccgaccctccaccgacggtatcccttcacgctattgcaggggtccggaccgagcaggccatgctcctgccggtgatcattcacggccatcgggtggtggcgcttctcgactcgggatcgacgaccaacttcatcaacgtcgacatcatgcaccgcctcaaattagccactaaaccccgccccacgcttcgggtgatggtggctaacggggaacgcgtgtcgtgccagggcgtagcatggaacgtggagatcgccatcaacgccgaagctttctgcgtcaactgttacggcatcaacctcgtcgagtttgatctcatcctgggcgtagagttccttagcacactgggacctatactgtggaatttcaaggacatgtgcatgtctttcacgcgggcttcccggtccgtgcggtggactggcttgtgctcgcgcaggggccaggcacgcacaccgacctcatgtgccataccgtccacacccggtcagccactcatggatcgcctgctccagcaatttgaggtggtgttcaccgaaccggccgggctgcctccacctcggccgtacgaccaccgcatccatcttcttccaggcactcctccagtcgcggttcgcccctacagatacccccagctccagaaggacgaactggaacgccagtgtgcaaccatgcttgcccaaggcatcattcggccaagcacctcgccgttctctgctccggtgctcttggtccggaaacatgacaactcatggcgcttctgcatcgacttccgagccctcaacgccaagacatctaaggataagtttcccattcctgtcgttgaggaattgctcgatgaactgcatggagctcgctacttcactaagctcgacctccggtcgggctaccaccaggtgcgaatgcacccggatgacatcgccaagactgcttttcgcacacatcagggtcactatgaattcttggtgatgccttttggcctctccaacgccccagcgaccttccaggcactaatgaatgatgtgctacggccctatctccgcaggttcgtcctggtattctttgacgatatactaatctacagtgccacatgggccgaacacctgcagcacttgggcgtggtcctcaatgccctccgagcacaccatctacatgtcaagcgctccaaatgttcatttggggaaaaatccgtggcgtacctcggccatgtgatctccgcggagggggtagccatggacacggctaaggtggtagccgtctccacatggccgacgccgagcttagccaggggcctacgcggcttcctgggccttgcgggctactaccgcaaattcatccgcgacttcggcacgattgcagcaccactcacgcgtctcctgcgccgagacgcgttcacgtgggatgaggaggcaacagcagcattccaagcactcaagaccgccctcacctccggacccgtgctccaaatgccggacttcgacaagtgcttcacagtcgactgtgatgcctctggtgtggggttcggcgccgtacttcaccaaggcgcgggacctctcgctttcttcagcagaccatttgcaccacgccacatgaaactcgccgcgtatgaacgcgagttgattgggttggttcaagcagtgcgccattggcgaccgtatctttggggtcgctattttcgggtacgtacggaccactacagtctcaagtttctactcgatcaacggttgtccactgtgccacagcatcaatggctcaacaaactcttcggtttcgacttcgacgtggagtaccgcccgggccacctcaatactgtggcggacgcactgtctcgccgtgatgaggtgtccccatcttcggcactaagttcggagggggccgcctcgatccatgccctctccgggccttccttcgccctactggaagagatccggaacgcgaccagcaccaccgacgccgcgcagcatcttttccagcgcctgcaggagggcacccttgaagcgccttggcgtctggaggatggcctcttcctccacggatctcgcatcttcgtgcccgaccatggggacctgcgccgccaggtgctcactttggcgcactcagcaggccatgagggtgttcagaaaacactccaccgccttcgtgccgagttctacatccccagcgatcgcgccttggtacaagaatgggtacgtacatgcaaaacgtgccagaaaaacaagaccgagactctgcacccagacggccttctacaaccgctcgacgtgccgtcccaaatatgggccgacatttcgatggacttcatcgaggggcttcccaaggtgggcggcaaggctgtcatcctcacggtggtcgatcgattctccaaatacgcgcactttattgcgctggggcatccttacacagcgtcgtccgtcgctcgcgccttcttcgacggcgtcatccggttacatgggtttccctcctccatcgtcagcgacagggatcccgtgttcaccggccatgtgtggcgcgatctcttcaagttagccggtgtcaagctgcgcttaagcacggctttccaccctcagacggatggccaatccgaggtggtaaacaaggtgatagccatgtatcttcgatgtgtgacaggtgaccgaccgcgcgcttgggtggaatggttgccgtgggcggaatattgctacaacacatcatttcacacagcgttgcgggcaaccccctttgaggtggtctacggtcgaccccctccggccctcttgccttacaagccagggaccacacggacagagacagcggatgctctccttcgcagccgcgatgaggtcctggcagaagtccgtcaacgtcttgttcaagcacaacagatctccaagaagtattacgatgccacacatcgggagatggagttcaagaccggtgattgggtttggttgcgattgctacatcgcaccaccaagtccttggatcctcatgccaagggcaaattgggtccgcgctatgcaggacctttccaggtgctggagcgtatcggcagcgtggcgtatcgtctacagctgccggagggtgctcgtatccacgacgtcttccacgtgggcctcctgaaagcccacaaaggagatccgcctgccatgccgacgccactaccaccaatccaggatgggcgactgctgccagtaccagtgacagccctcaaagcacagctgcgccgtgacatctggtatattcttattcagtggcaagggatgacgcgcgaggaagcaacatgggaactactggctgaattcaaagacctctaccctgacttccagctcgaggacgagctgttttcgcaggcagggagagatgttatgaccggcatgcagtacaaaaggaaacagcaggccagggggcatgcggcaggagaaggggatcaaggctgggacagccagcagtaattcagtaatcctaggatctatttccttttgagagtttccttttatttagagataagcttccttttattcagagagattagtttccttttattaagagataagctgccttctattgagagagaggctagtataaataggagatgtaagacaggaggaaggatcatcaaagaaattacctagccgtcttccctgtggaagccggaacctgagctagcctgttttcccacgccgtgaacacggcgtcccggcgtccctctcgcccagtcccccgccaacctccagcagtacaccagtacagcttgagggaggtccctggtaggaataggaatcctatcaggggcacatagcaacgagcattccattataacctatctttactaattaaccttttttgcagctgctatagcggcaagctttaggctacacaagacagttcctgagctaagtggaaataaatcctagctcgtattggatatctgaggaagttggcattcctaattccacggtaggccctctgattgccttgatctacacattgcttgatatttgtatccagttgccctaaagtgatgctcaaagttctatacaggtggttgtgaataagctacatccattagatggatcaaactggacaaacatcatcttcagcattgtccctttcccagagaacgcaactatatcatcaacatggttgagcattcttagatcaaagttcatgtccttggttgtacagcagtcaacaatccacttgactaagcctctattcgataattcatcatactttgaagtaattaaattcccaggaggaataacaattatccctccacaaactgcttttcttcttcagaagcctcatgcgacatttaattttactctgaactatccgatctacaaattacaagacaggactaatgagttaaaggatcaaatggaggcagcactactactcaatccatatgaggttagttgtaccttctggccttgtttctttgtgtttgtctgttcaattttatagcttcaaaggaggaaacatatgtacatgtaagatttgttcatttgatctccagctgtttgcgtgtccggctgcattgtcgaggagttacagatggaccagtccatgcagctgtacctcttgcgttcgccgccggaaaaaattgatggcagatcaaattccagaatggtaagggtactgttcacatttgtgcaagattttgtttacagtgaaccaatctatattattgtaaagttatggtttctctgaatagcaacaaattccaaatcattcggtggcttacgttcttttcaaattgataacgtggtgatgaaagatcgggtcatgctgacttgtagttcaatatggccagcagctccagcagggtgagaaagatcgtcatcaggttctaaaggatttctcaaagttgcttgatgatcaggagtttaatagtaagtattatcatccaagcaacgctaggatctggttctatggtgatgatgacccaaaagagcacacattctaagtgaataccttgatcaatttgaagatagccctgctcctaaatgttcggcagtggtgtgcatgaaggatttgagctccccgtgctctgctcgcccgccagtcgacatcccagtcttgtgctgcagatcggtgtgcccgtgcctgatagtggctagcagctctattcttaattactttgtttttccttttctgatcgaacgtttagatttagatgaatatggttttcacatcttcaaaatacacattacgggatttggtgtgggcggtctgcagagtacagagagatgtgaaacatgggcatcctaaacacctttcaaaagaattgaagaattgcatgttgaaaaatcttgccaaacttcagtgttataacctcatagggtatagtatatacttgtaaggaggaaaggcttgacaaattgaggttaaatttagacataatgaaatgtggcttaactatattaacaatttagagatcacgtatctaattttgtgccttagtgtgctacactattttaaatttgtttatggatggaatgaacaatctgataaatttaccctgatatagctgattatttgatttaatatgtaggcactgtgatactgtccatactatagtaatgagttgtgttatgtaatgctaatacttaacataactacctcacatgcctgatctattaatatgtccattatatatgtttggtttttctttgctttgtccacgttcagttttttttaaaaaaatctcctgaaatgagacaattagtgtggacataggattgtattttgttggttcttgttctgatctccagatatattcttgaaccatctttcccctcttgttaataatttctatttagaatcattaatctaggacacctatagcattatcaagttactccttgtgctgacgactttctgtattctgatttttgcatgcttaatgatattggtgttactctaatgactacagaaaatggcatcggatttcttgggtacttctagatttgggttgatgcgacttggtttgtctgtacagttttgatctagcaggttgtttttgatgatagagttgtctgacgccaagggtgtgaagcagaatttaaagcctaaaggccatttcaacttgtcagctaagggctcagatgactcgccctgcgagtttgatcttgagttgtttgatgttgtctatttaatacatgttgaattagcgttttagattttgattgtattggccttcctatttgcaggagagcaaagcagttgttgtcctaagaaccatatgctaccagaacaagaaagatgagagcggttggtggccaaggctcctgaaaaaggacctgtgttcttgaaggttgactggacaaatggtaggatgaggatgacgaagatgttggatgttagtatttcacttttggttgattatgttttttcttatgcgcctgacaaatctagatatgcaaccagacatgctttattcttgttcctgttttgttttccttatgtattaattacttcacttgtaatgcacatgatgttttccttatgtattaatttcttaacttgt

SEQ ID NO: 1634 - DNA, 1347 bp, Zea mays
cacttgtgtcatgtaacacgaaaccattcttctagatcaaactacaatagagcaatagagctcgtgtcagaggcaaacacaaatggcgttccacagaacaatggcacgctgtctatgggtaggcaagaacgcagccgctagaggcgccggcgcggccattcccaaacctccggctccccatcccccggcaccgcgatctctgccggccgtggacgactgcccgacgctcgcattcctgcggccgaagccgaccgcggtcgggtacggcaccgcgaccgtcccgctcccggcgcactgctttcccgccctccccgtcggcgaccacctcttccaccgcctccagctcgacgggcttatacctcccgtgagcacggcgacgcggccgccggagcttgtgggcgtgacggtggagcaggcgaggaaggtggcgagggcggccgagatggaggtggcgagggcgaggctgaggtccaacgcccagagcgtcgtgtccgggtcggaattcgccgcgctctgcgtcgacattgccggcggcgtcgagggaggccgccggctggcccgtgcgctcgacgagtccggcgtcgtcatcgtcctcggcgaggccgtcttcctccgccccgacatggtagcgaaggccatcgggagcatcctccccgtgaaaaagcagctgcaggcgccgcgagccggagacgggagcgaggcgcgcaagcgcgagctggaggctatggaagctcagaaggcggcgatcgacgcggacgcggccgcgcaggtgcggcgcgagctgtggtgcgggctgggcctgctggcgacgcagacgctggggttcatgcggctcaccttctgggagctgtcgtgggacgtgatggagccggtgtgcttctacgccacgtcgctctacttcatgtccggctacgccttcttcatgcgcacggccacggagccgtccttcgagggcttctaccggagccgcttcgcgtccaagcagcgccgcctcatgcgggcgcgcgggttcgacgtcgaccgctacaacgccctgcggaagggccaggggcaggggctcgttccctcgccgaccccgacgcgtgtaggcacgtcagccatgtacaatagcgcgtcgctccgcccggacgaggccgcttggcttgtgccaggggggcacacatgagataaacgtgcgtcgcatcgtcgactcaccgtctaatcgtgaagcaacagctctctgtacagattcaggaggacgagccatggtagaagaaggctcgtcacaacggaaactatatgtttaactaacgtgtgacacacaccctgattcacaatctcacacgcgtgttgagtgaagaagagacg

SEQ ID NO: 1635 - DNA, 2584 bp, Zea mays
agcggctgcgttcttgcctacccatagacagcgtgccattgttctgtggaacgccatttgtgtttgcctctgacacgagctctattgctctattgtagtttgatctagaagaatggtttcgtgttacatgacacaagtggcgcgacgtgtctggccgatggagcgaggtggggatggacaggggtggtatttatacttgggagaaatgataaccagcggcacagaggctgagcaattacttctttcttgttaaaagccactaggaattggaggctcctccgcattcggtggggcttccgcccaccacgtctcgccacgtgtgcctaagtgcatcggacacgaatttacgtttggattcgactaatagagtgttgtgtccgtgaacagtggcgcaggcagagatgactgccgtagtccacatcagtagcttcaacaaccccctctccctccccagtctcgccacccggctcagtggaggagctgagaccacatgccggcgccacagatccgtattctccgcttccggcgagatggacctggtgtaggcggcacgactgttgaggctgatgctagagcgccgccgactcgcctcgtgaacctagcggcgatgcagttctggcggtcgtcgacctcacggacgttgaggcagcggcttggctcggagcagaagtacttgtacgagtaggtgaagttgcggagtgcgggcagcgtgcagacgccctcggggacgtggccccacagctcgttgcgcgccacgtggagctgctgcaggttgtgcaagccggccatggactccggcagcatcccctgcagctggttggagctgaggtccagcagcgtgagctcgcgtagccagcccagctcctgccggaggcaggagcggaggcccgagttgagcgccaccagctcgcccagcgtgcccgccatgcggcccacgctgcacgggatgcagccgcgcaggcgcaggttggccagcacgagcacggacgccggtgagttgcccaggctgtccggcagctcgaagtcgaagcggttgtcgttgaggaagatggcatccaacggcttgtcgaagagcgccggcggcaccggcccgcgcaggtcgttgaaccgcaggtccacatacctgacgctgggcaggcacaggatgtgctgcgggaagccacccgagaggcggttgttgctgacgtccagcttgtggaggagccgcatcttggggagggactccgggagcgtccccgcgaagctgttcgagttgaggtgcagcagggcgtccccgtgaattccatgagtctgtccccaatttctcggtgctccgcactcgaaccgcgcacctcaccaatctccagcgccaccccgagatcttccgaccagcctcgagatccctgcggacatgtcatcttcggcagccatggaggcaatcgacgagctcgtccagctctccgagtccatgtggtaggccgcctcgctccttgcggacgatgacccctccatcgaaaacacctcacgccgcccctccacctttctctttctcaatgccgccgcgctcggtaacatcgaagctggcaagtcggttgtgctgaacaacctcatggggaaccctatgttgtgctgaacgacggaaatttatttgcaactgaagcataatattgttctatcttctgtgttttctctggttatgcacttggaaagatcctatgttatattggttgtgctttgtgttcggttgtctaaatagcactaattttttctaacttctctagcttatgttgctttgtggtagtttgctcatccttatatgttttatttctcagatattgttttggtccttggatgtgttatgtgttaatgtggtataattgctaatagaataccatcttatccggcgaatctattttctagaggtcacttgacccataggttctctcacaaccgcacatgcaatatatttcttaactatttttgtacaatattgtagtcaatatagtcgtttcaacttgcatcattgattaatatcctctgcagtagggcatacttagcactaaggggtgtttactgtctggggccacagttttaaatgctattaaaaaagcatttactttcagtgccagcctaattgatgttgtactagggcaattttatccttagctgattaccataggtacactgaccacttgcagtatagagatgttgttgttctttttcctctgttgcatcataactttgtcgttcgggttcataagacagtttagatttctctgattcttgtgcttttcctttggaatacacaatgctccttcaagcaactaagaaatagccttttgtttgattgccttctcatttaagacaacgttttatttatctgtgcgtcttcttttgttgttacctatagtttatagacaatgattttatccacttgctgcattgatgttggtaccattcagagtcaggttggtagaagttattcttgagcattataagcttgaatatgatgaagcgacggtcacattttttgtttgtctggttcctgttgcttgggatgtgtacgtaaagttttgtgtatgcctttttttatctaattaatggg

SEQ ID NO: 1636 - DNA, 1945 bp, Zea mays
gtctgacctccctcctctcctgctggcgccctcgctttgcttccaatgggacggaaaggaaggaaacggtttgtgtttggcgtaaacggcgacgtggaaagctcacccgtatactacagtagcagaataacgcaatgcgatggaatccatctactctcaccaatgcccaatcacatctcgacttgatgctgccaccttttcctaatccagctgctccagcctagctcacgtcgcttccaacagacgccaccagccaccgcgccatcgtctcagtgtcacagcaggaagccgcgctcccgccagccgttagctgctcccaacagcggcgggatcagggcttgcgatttggcagacgcgagtccccccacccccccggccgcttacttcatgcctccatggatccggtcgcggacccgtcgccgtcgcggcggtccctgaagcggaggccgccggcgcggtcgccggagctgtcgcccaagtcgggtccgggggcaggagaggcggcggcggaggggctgatccggcgggtagaggagctggaggcggcggcggcgcggctgcgcggggagaaggaggcggcggaggacgcggcgcggggcctgcggcaggagctcgacgccgagcgggcctccgcggagacggcggccagcgaggccatgctcatgatcgagcgcctgcagcgggagaaggccgccgcgcagatggaggcccgccagttcaagcgctacgccgagagccgcgaggacagggagcgcgaggtccaggaggagctcgcctcgctctccgacctcgccgcctcctaccactcccgcctccagtcccacggcatcgacccggactccttcaccgacgacgacgatgacgagtcgtactcgtacgaggaggtgggcgccgaagacgtggagcagatcggcatggccgcgctgcaggtggagcggaacgttcgcgactcgggcagtggcatggaggtgaaagccatggtcgttggcaatgaccgcggggaggacgaggaggatgccgacgccgacgccgacgacgcggaggagccgtcgtcccccgtggagaaggaattcgagtatacggtggatgttacctgcgcgagtacaacgaagccagctacgtctgtggttgcacagtacgtgggggacggcaactcgggggggctgtatgcaagggtcgaggcgctggaggcggacagggcggccctgcggagggagatcttcgctctgcgggcggagagggcacagctggtgatggccagggagatggcgcggcggctctgctgggagatggttgctgagcagagagccattgtgaagaaagcgctagtgcctgcgagcagtttctcagtgatcaggatatgcaagtgggtgctctcaatactattttggagaaacagaagctctacagccaagtacacctttggtttgtcgactacgttccttggcctcctgctgcttcttgacagatccgcattgttgagttcctggcgacgtctgccatggccacaaagatgaatgcaaccttctccataccaacagccaaatgcccttaaattcagagatttgaacagttaagctttattgtgcatgtgtattgattctttggtgtttctttttccttttgccacgtacagtattggagctgtacgttttttttcctgaagctttgagctgccgtatagtgtgtaatttagactactaggcttgaatagtttgtaatttggggcgacatgctctgtatagagtgtacatcatagtaagttgtggaactccgatttgttttgtatcgtcgtggtgaccttgcttaatgtcagatgtcgaaggccattacgaggccttttttcgacgtttttgaagctgtagataaggtgattttgtatttttattattacatggtcccgacttgtttaaaatctcgcccccttgcgagaaaaatagtgcgg

SEQ ID NO: 1637 - DNA, 2126 bp, Zea mays
agttctatttctaatgctatgcctttcaaattcatgaacttgcttgtcattggtgcttcgaaatatccttctttgtgcttccttgacctcatgtctgtcgtatgtacactttttttgtaccactatggtttgtgcgattcagcagattcttgttttgtcttgtatagttatttcttcagcctagtatgctctctttatatgttttcaacttattgcagattcatttttagacataaaaacctagtacaaattatgatgtttacagaacactggacatggacttcttcacggaatatggggaggcgagtcagtatcaaatccaagaggtcattggtaagggaagttatggagtagttgctgctgcaattgatagtcacactggggagcgggttgcgatcaagaagataaatgatatttttggtaatgtctcggatgctgctcgcattttgcgggaaatcaagcttcttcgtctgcttcgtcacccaaacatagtccagattaagcacattatgttgccccctacccgaagggagttcaaagatatctatgttgtttttgagctcatggagtctgacctgcatcaagtgatcaaagcaaatgataacctgactccagagcatcaccgctttttcctgtatcaacttattcgtgctctcaagtacatgcattcagcccatgtatttcatcgtgatttaaagcccaggaacatactggccaattcagacagcaaactaaagatctgcgactttggacttgcacgtgcatcatttaacgactctctttcagctatctattggacagattatgtcgcaacaaggtggtaccgggctcctgaattatgtggctcctttttctccagttacacccctgcaattgatatttggagtatagggtgcatttttgctgaagttctcaccggaacgccattgtttcctgggaggaatgttgtgcaccaattagacttaataacagatctccttggaacaccatcgtttagatccttatcccagattcacagtgataaggccagggaatatttgcttggcatgccgaggaagcgccctattccattttctcataagttccgtaatgccgatcctctggctctccggttgctagagcgtttacttgcatttgacccgaaagatcgacctactgctgaagaggctttagctgatccatacttcagtggcctttctaaattggaacttgagccttcagcacaaccaatttcgaaggttgactttgaattcgagggaaggaaactaacaaaggctggtgtgagagaaatgatatatcgggagattttggagtaccatccccagatgcttcaggagtacatcgaaggtggagatcagattcacttcctatacccaagtggggtcgatcgcttccagcgacagtttgctcatctcgaggagaactacaggagaggagtagctagcaccccgccgcgaaggcagcccacatctctgccgagggagcgagtctgctcatcagaagatggccacagtcaggactctgacagcgaagagcagagagcagcatcctacgttgcccgaacaaccataagccctccaagatcacaagaggagggcggcaagctccagcctgcctaccagagcgccgccgccgccgcagactcctgcgccaagagctatctgaagggtgccgctagtatcagtggtgcttccaggcgtggcatcaagggggataatggccgaaaggagaaggaatctccgaggctgtgaaagaggtggcgcaggctcgtcacctgttaggcaaaagaggtagcaatggcgccaatgcgactgcaacgtgggatgtcttagtcatcatgcatccaacaacgcaggggggcagtacaagtatgcaggtcatcctagctaggtcgcccaaattaaagcagcctgcttggaggaattagatttgtgtactgttgttaagttttttttttttttttttttgaattcaactgctagattctggcagatctgtcaaccgcactctccttggtttcccaaaatttactggtttgaacaagtttattactgaatctcgctgtggtgcttcgtctagcattggactggactgctcgtgagatgtcatgcccaggacgttcgtca

SEQ ID NO: 1638 - DNA, 2045 bp, Zea mays
gcacgagcccaactccgcctcccaactcccaagtcccacccccactccctcgctcaccagaggaactagcggccaggcaaagccgagccgcaaccgcgaagatcttgcgtggcctccttttcccagctcgtcactgtgccgctcgtgtccttcactcccggtccgcccaaccaataatccatcgatccatccaccaccaccaccccgctgcggcgatgtgcggcggcgccatcctctcgggtttcatcccgccgtccggggtggcggcggcggcggcggcggcggccaagaagaagcagcagcagcggtgccgtgtgactgcggacctgctatggccggggcccggcagtaagggagctccccaggacaaggaggaggacttcgaggccgacttccgcgagttcgagcgcggcctcggcgaggatgacgtggacagcgccggcgaaggcggcgaccccgaggtccaggagcttcctccgccggagccgacgaggtttgccttcgccaccgcggccaaggcagcagttgatggcgtgatgacgacgactccaaaggatgtgcaaggagatagagcagtaaaaaagcgcggccggaagaaccagtacaggggaatcaggcagcggccttgggggcaaatgggcagctgagatcagggaccccaacaagggcgtccgcgtctggctcggaacctacaacaccgccgaggaggcagctagggcatacgacgccgaagctcgcaagatccgcggcaagaaagcgaaggtgaatttccccgatgacgacgcgacaggcactcgtcacaggccaacgaacgccgcgaacgcagcgaggctagtagctccacccccacccccgaaggcctgcgccgatgagatgtttaacaacctgaagaacgacgacggcgacaacaacaacaacgatgatctgtttgcgatgtttgcgttcggtgacaataagaagaaggttcctgcagcgaagccagccgccgacgaggttggcagtggcagtggcagcttcctcgtccctgcgcctgcggtggcggcggtgcccggtaacaagaggaggtcgtccgcgaccaacattatgctctccgtctccgacgaccagagcagcaactcctacggctccggctcctccgccgacttggtggggtcgtggtcgtgggacgacgacgacgccgccgccgccgccgccgccgccgccatgacctcggactacacctcctcggtcttagctccggcgtcttactcttacatgcaaggcggagcgccgaagagaatgaggaggagctacggcggcgcgccgcccagcctcgcacatgacgcggccatgcctggttttggccttgataaagtgagctaccactaccagccgttgccgttgcctccttattacgtcgggagcagcagcggctcgtcagacgacgcgtcggtgggcagccttggtcttctgcaggctgatggtgctccacaggatggggcgagcgccggggatatctggagcctcgacgagctgctcatgctggcagcagctggtgcttattgagaaccgcaagaaaaaaaaatgtaaggcatccatatataattgctatatcttgttatcccctacaggctacaccgctacacacgtctgccggccgtgaatggagaattggagatggagtgtctgtctcatccatgctcgttttttttttgttttcgtgccaggtgttggcgctgctagctggagacgagacgagggcgagaggcagttgcatcatccgccatccgctatcgttttgtctctcctatatctagtagtatacatgcttctggcagtcgaactctatggcaatgtgtgtatagtgtgttgctgccgtctatgattggaagcgagctcgagactggttcaataattcacctttgcctaccgtcgtaccgccggcctgctggactgtagtgtgcgtactgcatatatatgccatagttatgtatgcactcctcctatatatactatatattattatgatgtgcttataaaaaaaaaaaaaaaaaaaaaaaaaaaaa

SEQ ID NO: 1639 - DNA, 1981 bp, Zea mays
gactaaacaaaccaaacatgacctaaacatgccagggcaaaacgcggacccgtgctgtgcgttccacccaatgtcgcgtgcggccactagatttttcctgacgcggtgtctgctcccacttcccctcctctcccccaggtggcggcagcggcggcggggtagcatttgtgctacgagggcttttgcaatggcggcttcggggttcggcggcggcgaggcgttccggctctcggccgcgccgggggccggcttactgaagctgcacaagggcgacatcaccctctggtccgtcgactgcgccaccgacgccatcgttaatgctgctaatgagcgaatgttaggtggcggaggtgttgatggagctatacatcaagctgctggaccagagctagtgcaagcatgccggaaagttccagaggtcaaaccaggagtccgttgtcctactggagaagctaggattactcctgcttttgagcttcctgcctctcgggtgattcacactgttggccctatatatgatttggacaagcatcctgaggtgtcattaaagaaggcctatgaaaatagcttgaagcttgctaaggataatggcattcagtacatcgcattccctgctatatcttgtggtgtttatcgttatcctcccaaggaagcatcaaaaatagctgtttctaccgcacaaaaattttcagaggatatcaaagaggttagctgtagttccactccgcccctaaaattttcacggtcaagtaggatacttctgaagttctttggagttcattctcaaaacaccattgttagaggaaaaaaatataggaacgattgtccaataaacaaacaatccggatatgcattactaggactaatacggacctttagttctggagaactggacaaacaataatgatcatgctcgtttttataaagtgtttggcaactatcttgattaagtatatagatcacttggtatggattatttgtgcaggtgcattttgttctgttctcggacgacctttacaatatatggcgcgagactgcccagcagttgctatcacagtttgagaaatgaatggtccataggcagtttgctagcactagcagttgcccagcagtcgttgtctagtgttgagatgtgagcgccataggcagtttgcctggtgtaataaaaatgggtgtatcagacaacgtttaaatcttgatgaaaccgtgtattgcacctgtggtataatgctgaatgagtaaagtttggcgataccgagcagttgcaatactacctatcagcatgcctccggtatttgttgtgcaatgcaggtactgtgaccagtccaacggttcctgtcatgcacacccattgtaatgtttaggatgatgttgcttgagactccttcaggtttcgcaaccttggatgttgctgcgcgatcgcttctttatcctgaggggtcgggatatgggcatggttaactaatccagaagatggccgtgatgtcgtcattagcattggttttatgacagatctgttgcgtgtataagacagtgtttggtttctaggtactcatttttagtccccttcattttagtccacaaatcacggccagcgagcggaggtgaatggtgatgctgggccgggtccgtggactccgtgctggaggatgtacatggaaattagaatacctgttgggtcggcacaagttctgctgggtcgaagtccggaccgcttctctattgaaatgtattctgagatgtgagtattgtgtattccaaaagagagagagagatagcttaagggaatcctcaagtaacttatatatcaatagagattaaactcaattaaggtattcattcttaaatcatgtcttaaataaactttataaaatccagccattgctatatctcagcacaaagtttaaaagtcataatattcaggacgaaggaagaacgttaggtttcgtaaggtgacctctcgactagtgggtctgttagt

SEQ ID NO: 1640 - DNA, 4681 bp, Zea mays
tgtccacatataattggtcatacactcatacatgtccactcttaaattttaacacacaacacataagtcttaaaacacgattgttcattaacattcacatacaagtctcaaccacacaaatatacaatacatagtcatgaccacacataaataatcatacatgttcactaaagttttatccacatagtatataagtcttaaacacacgatacataaactaaaaatcatgtggcatgtcgtctggatcacttgatatatcttctatgacatctaaaaccctaatctctaaaccctaacgggtatagttcttgcctctcttgttttcttttgaccgggaaaatacggttaaaatacgggaaaataccggattttcccaaaacttccgaaaacggacggtaaatatgtctcaccatttaccgtaccgttttcgtaataacacatcctgtttccgtcccgttttccgtatatcccgaaaaatctgaaaacggtcggaaaaatctggtaaacggtaccagaaatttaccgaattttaccgaccatttacatccttaaaccaaacatcacctaaatggaaagagcattatccaagctaaccaaacaaatggcactttcagttaaaccctgacaaataacgccaccagttgatttcatttgcattgccactccctcagcaaaagccaaacagcaccatattagctgtcactacgctcaaacaaagtgcaggtttacacaagcattgtcaggccacgctaacagccataataattaacaaaatcctcaccgagtacatatcctgagaaagttgcaaaacaccaaatttatctcttctcacgttaagagaagcaggacctaatcgcccttgcgacggaaggagcacccctcggtgagcctggccttcccaccggtaggttggcacagaacagtttggcagcctgggcacacaaccacagtctgggagtggctgaacacagtggttctgcaatcacaaaaaaacgagtaagatacagcaagcatttgatttgttcagcatgctgatatcccaaagaaccatacaactgtaatcaccttcaacaaaggataatgtttaaatatcacagataattgcaagaaagcttagcagtccaaacatttgctaggtgcgtgatcactcaacctctttggaacatcagctgaatttgaccaaaatactgtttgcacacccactacaaagatcaaacaagctagccatcacaacacacggaagacctactcatgaacaaatcaactgatatcactatcaattgcaaataaattgcaccaagatcagtttcagtatcaattaaatttttttctgcacatgaatgctgtgattagggatgcaagtggggcaaggtgtgtcatctctcaacctccttgaaacaacagctgagtgaaacaactttgaccaagatacagtttctacatcattccaaagagcaagcaaatcaaataagctagccatcactatcaattgcaattattgtaccaaattcaaatgagtgacctacatacttatatcagcaaaactagaaactaactaaaatatgcaatttgcaccaagatcagaatcagtaccaatcaacattattttcttcacatgcatactgtgatgagagcagactagcccacaaaccaacatccaggcttagtttagacttagttttgcaggttgctttcagtctagcctgctaccatcccagactgattataatccaaaagtgttgcttcacccttgttaccaactattacccccaccccaaaaagaatgcaattgtacaggtttcttaagtaattttaacatatcaactagctagtacctactactaaactgggcatgctaaacattcaatgtaaaaatcaaatgacacagcgtcgatatcaattgcaattgaagtaaccaaatactaaaacaacagcaagagccaagaacccttacatgctgaaacagccctggcacttgacatcctggacacaaagggagaagaaaaacgaaaaaagtagatgattagagtcagtctccaaacaggcataagagcagatattaatattaatacaagttaataaacacaatatcaaaattcatttatgttttcagattttagctctacttgaacacaacttggttgatgaattatacataccctgcagaatctagctcaacgtgctttgttgcaactattttttatgtagtttttgatactgaatccagtttctaatactctcttccaaaccaaatcaacatttttcaaaaaaactaaattcaaatggtacattcgttgggtctcttttcggcacgatttgcaacacctcgccacgcagaattagaaaagggcatgaagaggaataccatgaagaaggagttgggggactggactagccgcttcttcttgtgctttagcttctcaagctctgccggtggattgagtaagtcaatgtcgttttgcagcacctgcccagatttccaagaaagaatgcgtaatatcattagatcgaagagcaaccaacaaaaccgaagtgaatcagcgtatcggattagtgagcgcaccatcttggagacgctagcgccttgggcgttcctggtctgctacggacgaagggagacagaaggggcaaaggcgagcaagtggcggcggcggcggggagtgggactagagcggcgggtggatactttatatataagcgcggccaggtggggtggcgaatctgagccgttcatcgacgtgctgcgttcatctcggctttccgtgggtcgtgggattgggcagtcccacgaaggtagtattggtggaggcccaacaccaactgaccaacagaaatgccttcgccctttggggtttgggctttccaagctttcaaccttccggactctcctacatgacactggtatctgggccccatgtgctaactgcctgtaaaccctaatcccgaatccctcccggcctcctccgtctcgcgctcgattcgaatccgagctccctatcctgctgctcctgctgttcccgctgcaatggaggacaacgcggtcgaagagcccgagttgagcggtgcggcggagttcgcgccggcgctcgtcgccgcccacccacacggcaactccgtcgccgtcgccatcgggcccgagctccgcgtgtttgatctcagggctggtcatccagtttcattgtcagatgattgtggtggccattctcattcagacgcaataagagctatctgcttcagtgtgagtggagctttgtttgcttcagctggtgatgacaaacttgtgaaggtttggaagactgattcgtggcgttgcatccagactataacttcggagaagagggtcagtgcagttgttattagcaacgatgacctgtatgtatcttttgcagataaatttggtgttgtttggttagtcactttgcgggaagatagtgcagagcaggtttcagttgataacaaacctgtgtcaattcttggtcactattgcagtatcatcactagcatgaagttttcgccagatggacggttcattgctactgctgatagggacttcaaaatacgagtcacattattcccaaagaatcctctaaaaggggcccatgaaatacagagcttttgccttgggcatacagactttgtatcatgcatcaccttcactagcatatctgaaaaccagagttttcttatatcaggaggaggtgattcaactgttcgcctgtgggactatgtaaatggatgtctccttgatacatttcaagccaaagataagatggcagaactcttaggaccaaatgaaacagatgatagcagcctagccattacagatatatgtccgagtaatgatggctcattggttgctgtagctattcaaagtttcagtggcataatgcttttagcatgtgatttggtaggaaagaagctatctttcctaaaggtgattacaatggaaaagagttatattcctactagcctagcatccagcccgtcctcggaactcctgtggactgtcatgggcgcatcaaacatgcccagccaggcttcctcccatctattgacccgtttaaggatcatcacgtgtttccaaaaggacagattatcttcttccgatgccggtcctgcaacccttgaagacggcgatgtaccccacggtgagaagctccttctggcactgcaaggaagcctcgacgtcgcgaagcaagaggaggtgctagcttcagtgctggctgcgctgaaggtttccatgcataagatgctggtgaagaagcactactcggaagagaggagggagcagaggaaaagaggtaggaacgacaagaagatgaagaactagctgaaaagaggatgaagaactagctcagcatgcggtatcgagttgctataacggttctcttttttgtttgtttgtttttttagagaaacaaaaacagatattactgtagtatcagaaaccgtaagagtaataaatttgccaggatttttcttttcttagtacgagcgtattgtaacagtaattcatgcttatcgctcccagtaaaactgcagcagcttttgcgtctccttgtcctcatccgtcgtgatccgtggctttaaacgtcactacaaccaaatggaataattgcaggagttgttgtgtgatcgttcctgcaaggaatcaaattgcggctgattgagctgcgccgag

SEQ ID NO: 1641 - DNA, 2131 bp, Zea mays
gccggccgggaaacgaggcctttgcccgctcttcactctcctccgctcgccgcctcctctttctcctcttctcctctcctctctcacgagggcccaagacctcaccgctaaggtcccggtctccgcggggctctccgtcgcactttctcgtgcctcggggaccccgatccgccaccgcgcgaccgatcgtcccggatgcacgggccgtacccgacggctgctgctgctgctgcttcttcttcggacgacatggcggcgaacggcatgaaggtggcgctgcaccggcaggtctcggggggctcgatgaagcagaacgcggagctccggcgccaggcgtcgctcgagtccccgcggacggggcgggccaccagccggttcctgttcgggcggcagtcgtccatggacccgaaccggaggcgcggccggagccagagccccgtgcgcgcgccggaggacctgggcgtgccggacaacctggacgccaccatgcagctgctcttcttcgcgtgccagggcgacgcgctggggatcgagggcctgctgcgcagcggcgtcgacgtcaacagcatcaacctcgacggccgcaccgcgctgcacatcgccgcgtgcgagggccaccgcgacgtcgtcagggtgttgatcagctggaaggccaacatcgacgcgcgcgaccgctggggaagcacggcagtagctgatgccaagttctacggccactccagggtctacgatctcttgaaattccatggcgcaaaggttccgagaaccaagaggacgccgatgatggtgtcggccccagccgagataccggagtacgagctgaaccccggagaggtccagttccggcgaggctgtgacgttacaccgggtgtgtaccacatcgcgaaatggaatggcacaaaggtttccgtaaaaatacttgacagagacggttgctccgatcaagaagccgcaaactctttcaggcatgaactgactgtactggagaaggtccgacaccctaacgtcgttcagttcgtcggagccgtcactcagagcatacctatgatgattgtgtctgaactccatgaagagaaagacttatcagtctgtatccagaagaaaggaaagttaaagcctcagaaggtgctaagatacggccttgatattgccaggggcatgacctacctccaccagtgcaagccggaccccatcatccactgcgacctaaagccaaaacatatcttcctggatagcggaggccagctgaagatcgcggggttcggagtgacaaggatgtccaaggtcgggaccgacaaggtgaggttgatctaccatggcgctctcgtcgacagcttcagctaccacaccgcgcctgagctgtacaggaacgacgcgttcgactcgagtgtggactcctactccttcggcttcatcctctacgagatggtcgaagggtcggtaagagcgccggaggattcagggcactcgatccggttcgagggactgcggccatccctcaagggcaggctcaagggctatcctcccgacttcaaagcgctggtggaggaatgctggcacccgcaagccatggcgcggccgacgttctcggagatcatcatccggctcgacaagatctacgcccacttcgacaagcatgggagctggaaggactcgctcaagctttggtccgtatcccggcggcttaagcgaattgttaagcgtcgctccgtcaggagcagaatccacaatgagccgtgaaaatgttcggccaaaaaatagagagggagagagagatctttgcgtccggtgatcgaatattttatcctttttttcttctcaaccttcgaaatcaaacacactgagaatgtgctctgcgttgtttgtcccgttgttttttacaggaaatgatcgatggcatggcctgcactgcacgccgccttctttgtgtacatacataccgcgctgcaaacgcgtctctttcccggggaagattgagtactggttgtaccttgtataaggtggagactggagaatcatgtggcatggtgattggttttttgttttttgctacgaattgtaacagattgtgagtaaaattgggcagaacaacacgtatacgtcccccccccccccccccctgcagtgtcaa

SEQ ID NO: 1642 - DNA, 1143 bp, Zea mays
ctcgtctctaggccctggccgctaattgagcacacgttcgtcttcctccttccgtcccccggcgtccttatccccacacaagcgccgcttaccgccgggacaggactgttggaagtccccagacggcagcgatggcggaactatcgacatcttcggatggattggtggacgaagaagcgaggcagcaggaaccaggacaaggaagcgctgaaggtagccatggtctgcaagacacaaaggagcaggacataaaaaagggaaaggcggctcttgtttccactgaactgctgagggaggatctggttcagagtgctgttagttttctgaaacacccgaaagtagtagcctcttcagatggacagaggcgatctttccttgtaaataaaggactcaccatggatgaaatagatgaagcatttcgacgtctacaaagcccgtcatcgaattctgcgagctcaaatatgtgcacatctcaaggggtgtttgatcattcatgcaggattactgagcaggaaattaaagtcgatagaaagtgtatgaatggtttagagagggtggaacctgaagctggacctgtggcccctgtggtacctcgtcatccaaaatcatatatggagatcatggaaatgatacaaaggggtgagcggccagacgatatacaggatattaacgatgaccctccaaatcctgatcaaccaatctcagaacctcgtatggcaccgaaaccaaagccatgggaaaagcaaggtcaagggagtttggcctgtgatttgaaatcgctgccaagggaatccgacgtgctgaggtcagaagttcagcacgacgacggcaccaaccaggttacggagtccgccgatggcgccaaccaagcggactcattgctgcaggcaggcgtagctgctggatctgaatctcctggggttccagatgacgccgcttcttcgcttgagtaaccaccgcgaaaataaatgaatgacgccgtaatcagacgcgaaaacaaacgacctcattaccacaacactgttctgatatttttgggtcctgagagagccacttgagttcacaataaatgtagtacccatcactggatgatcttttttagttgctggaaccatatgatatgagcattgttggcacttgctc

SEQ ID NO: 1643 - DNA, 1700 bp, Zea mays
ctgcctgaggcctgagctgcctccatatttgcattcttcaccctcgcttcacgtcaccaccattgccatccaagaacaaattaagcgggacactggaaacaaagagagacatgggccttcgcggcggagctcttgccctgcttctgctcctgttcgtccacggaggccagcgagcagcagaggccggcggggacgcgttcgtgagggtccagggcacccgcttcgtgcaggacggcaagccgttcttcgccaacgggttcaacgcctactggctcatgacattcggcgccgaccccgcgcggaggggcaaggtcacctcggcgctcagccaggccgccggcgccggcctctccgtggccaggacgtgggcgttcagcgacggcggcggcggcggcggcagcgcgctgcagtactctcccggccgctacaacgagaacaccttccaggggctggatttcgtgctgtctgaggcaaggaagcatgggattaagatgattctgagcctcgtgaacaattacgacagctttggagggaggaagcagtacgtgcagtgggcgagggagcgggggcagaccattggatctgacgatgagttcttcactaacccctttgtaaagggcatctacaagaaccatatcaaggccgttctgacgagggtgaacacgatcaccggcgtggcatacaaggacgacccgacgatcatggcgtgggagctgatgaacgagccgcgttgccagtccgacgtgtcgggccacgccatccagtcgtggatcacggagatggcggcgcacgtgaagtccatcgacgggaaccacctgctggaggccggcctggagggcttctacggcgcgtcgtcggcccgcaggtccgcgaacccgtcggggtaccaggtgggcaccgacttcatcgccaacaaccgggcgcccgggatcgacttcgccaccgtgcactcgtacccggaccagtggctgggcggcctggacgcgcaggcgcagctgcggttcctgggcgcctggctcgacgcccacatcgccgacgcgcgggcggtgctgcgcaagccgctgctggtggccgagttcggcgagtcgcgccacgacccgggctacagcggcggccaacgcgacgcggtgttcggcacggtgtacgccagggtctacgactcggcgcgcgccggaggccccgcggcgggcgcgctcttctggcagctcctggcggaggggatggactcctacggggacggctacgaggtcgtcctcccgcaggcgccgtccaccgccggagtcatcgccacgcagagccggaggctgcagggcctcgccagggcgttcgtgcgcgcgcgcaaggcccaccaggggaaggcgggcaagggcgctaagggtggcggcaactgaaagtggggtgaaacgtgtgtggcgagatcaagaagagtgtgtgtgtgtatgcgtcgatgtctcctcgagatgatttgaagattcatccgggagccaagagttacttctacatactatctagcgttgtcctccatgttttattatttagaggacttgcgtttagttcctgtgtggatcacgatagtcgagatgagcgaagttatatgcaaaagtcgtggactcgtggggggagcaactctacaatctcgagacctttgttggtttgttcgcctctgattaaagactaaagacagttattcgaacggttgc

SEQ ID NO: 1644 - DNA, 3083 bp, Zea mays
gaattggtaccggttcattttgacggagtgagtatatggagcaaggccacgtggcacacggaaacacctattccttcaaatgtttcccaaacaatagcgtgaataaaaaaaaggcacggattaattaggggccgaagcttcgccacacgcaataggtcggtcgcctctggactcctcacacgaaacctctataaaaggagtgccaagaggcagccaaggtttccgcaaaacaaaacaccaacctttagcaccaggcaaaccaaacactaggccaacgcaattctctagagcactgtaggctctagttctccagaggcccgccacaaccacaagccaaggccacagccagtgccctcgccatggctcccaacctcagcaagaagacgcctgctggcctcctcggcgacgaggtggccccggtggagggactcaagccgtcgcggttcacccttaagggcaaggacctggccgtggacgggcacccggtcctgctggacgtgccggccaacatccgtctcaccccggcgtcgacgctcgtgcccgccgcggacgtccccgcagcgggcggcggcagcttcctcggcttcgacgcggcggcggccgagagccggcacgtggtgcccgtcggaaagctccgtgacattcggttcatgagcatcttccgtttcaaggtgtggtggacgacgcactgggtgggggacagcggcagggacgtggagaacgagacgcagatgatggtgctcgaccgctccgccggcgagcccggcggcggcggccgaccctacgtgctgctgctccccatcatcgagggctcgttccgggcctgcctcgaggccgggaaggtggaagactacgtggacctgtgcgtggagagcgggtcgtcggcggtgcgcggcgccgcgttccggagctcgctgtacctgcacgcgggcgacgacccgttcgagctcgtcgcggacgccgtcagggtggtccgtgcgcacctgggcacgttccggaccatggaggagaagacgccgccgccgatcgtggacaagttcgggtggtgcacgtgggacgccttctacctcaaggtgcacccggagggcgtgtgggagggcgtgcgccgcctggcggagggcggctgcccgccggggctggtgctcatcgacgacggctggcagtccatctgccacgacgaggacgacccgaacagcggcgaggagggcatgaaccgcacctccgccggcgagcagatgccctgccgcctcatcaagttccaggagaaccacaagttcagggagtacaagcagggcgggatgggcgcgttcgtgcgggagatgaaggcggcgttccccaccgtggagcaggtgtacgtgtggcacgcgctgtgcgggtactggggcggcctccgccccggcgcgcccggcctgccgcccgccaaggtggtggcgcccaagctctcccccggcctgcagcgcaccatggaggacctcgccgtcgacaagatcgtcaacaacggtgtcggcctcgtcgaccccaagcgcgcgcacgagctctacgatggtttgcactcccacctccaggcctccggcatcgacggcgtcaaggtcgacgtcattcacttgctggagatgctgtgcgaggagtacggcggccgtgtcgagctggccaaggcctacttcgccgggctgacggcgtcggtgcggcggcacttcggcggcaacggcgtgatcgcgagcatggagcactgcaacgacttcatgctgctgggcacggaggcggtggcgctgggccgcgtgggcgacgacttctggtgcacggacccctccggcgaccccaacggcaccttctggctgcaggggtgccacatggtgcactgcgcctacaactcgctgtggatgggcaacttcatccacccggactgggacatgttccagtccacgcacccctgcgccgccttccacgccgcgtcccgcgccatctccggcgggcccatctacgtcagcgactcggtggggcagcacgacttcgcgctgctccgccgcctggcgctccccgacggcaccgtcctccggtgcgagggccacgcgctgcccacgcgcgactgcctcttcgccgacccgctccacgacggccggaccgtgctcaagatctggaacgtgaaccgcttcgccggcgtcgtcggcgccttcaactgccagggcggcgggtggagccccgaggcgcggcggaacaagtgcttctcggagttctccgtgcccctggccgcgcgcgcctcgccgtccgacgtcgaatggaagagcggcaaagcgggaccaggcgtcagcgtcaagggcgtctcccagttcgccgtgtacgcggtcgaggccaggacgctgcagctgctgcgccccgacgagggcgtcgacctcacgctgcagcccttcacctacgagctcttcgtcgtcgcccccgtgcgcgtcatctcgcacgagcgggccatcaagttcgcgcccatcggactcgccaacatgctcaacaccgccggcgccgtgcaggcgttcgaggccaagaaagatgctagcggcgtcacggcagaggtgttcgtgaagggcgcaggggagctggtggcgtactcgtcggcgacgcccaggctctgcaaggtgaacggcgacgaggccgagttcacgtacaaggacggcgtggtcaccgtcgacgtgccgtggtcggggtcgtcgtcgaagctgtgtcgcgtccagtacgtctactgagccggacgggccgatgactctgctccctgctggcctgctcaggacgcaataatctaatgtttagagcttaccaagttttacagctctatcagtttacttttgtttgtctgctcttcgttttttaagaattatttctattgtgtgaattaatgagtgctttccttctagttttctgattactcctattcgagcactctgcgtgaacactcttttgggagcaaatgaggggataaaatcctttgctatttaaaattaacatcaaagaattttagtctctcaaatccctctcgtgtccttgccaaacaaactattaggattagtttggaactcaaattcttttgggaattgaaa

SEQ ID NO: 1645 - DNA, 569 bp, Zea mays
ccttcgcacacgccaaaactttagctgcacatatgctctcctcactcctcttctgctcgtctgggagtcccaaatccgggtggggaagaaagaacacttcgctggtgtgagagcttgaagctgccagcatgatctggctgctcaaacgccgccggcctcccaagtgctcgatcggtggcgcttcaccagatcatgttgcagcttcactctctcgcaaccagcgaagggcggcaaagcaccgtggaggctccggacaatgaattccttcgccggtatgtgcttgtttaatctttattaactgaaccaagcatcatgcatgccacagcagtaggattcgtgtatgcttcatggtttgtcaggggaaaaacagtctctgaactagcaatttgtgttaatgtgttggcattaggtagctgctggttttcaccgggcaagtcatcaggcagataagctggtaatgcaggctttagaatgtatactattactcattcgttttttcccatctctttctactaaagaaagtttaatgcttaaccacaagcagaaattgaacggcggatacatgtcaa

SEQ ID NO: 1646 - DNA, 2431 bp, Zea mays
agactaaaattagttgataaactgtttggcacaccgatcgaacaaagcttaattacggttctggccagcgccctgtcaccacagcggaatcgggcgtgggttgcaaccgaggctgtcgggtcgggggatcctataagacaggcgggtggacagcggtaaccacccccgcctagtgcactccactcctcaaaaacctccccaaacccccagaaactcccatcccgtcacctccatcctccacaccacctccactccaccgccgccgtttcccaacgaggtctcctcctcggcttcctccactccacgccacgtcgccacaccaccgttgccgcccccggccttgttcttcgcgctttttacttcctcggtgttccttcctaggaccagtaggaggagtagcactccgagagcgaagcttccccctcgccgaggagccaggagtcactcacggagctcgaaaaccgttagagatactgtagtatccccggcggggccgcggcagctgctgcgtcggtactacgagcgccgcaggggagaggacggggcgcggctttactgctgctgcctctgctttcagctactgtactaccgtggctgctgctgcctgctgctcctgccgcatttccgttgctctttttaaagagcccgtctttactgcgccactcccttccggccttcccctctgcgccccggtctgccttcctgctcccatcgcaccgcatccatccccctcccttggctctttattcccctaccgatcagcagagaaggacggaatccaccccggccggccgttccgatcacccctgcagcttcttttccttttgggggcaggggtgcagctcggcagggcctggtttgccgggggttcttgtgtcaaccaagtacttgctcggctctccttcctcgtgcgcttcaggcctacacggctagcagctagcttgggtgaagctcccggcagcgatctttgtcgtgctgcgtgccatgtcgcgcccgcgcacggtgcggatcttctgggacgatcctgacctgacggactcctccagcgaggaggagggctgcgggacccggagggtgggcaggatggtgcgggagctgccacccatggcgggtgcggcggcggctgctcccgtgccggaccagtgcaacgccggggacggcgaccgcgggaggagactcggcgttgctgctcccggtgcgtgcagcggggcgcggagacggctggccaagactggcccgagcaccaagttccgcggcgtccggaggcggccgtggggcaagttcgccgcggagatccgtgacccgtggcgcggcgtgcgcgtgtggctcggcaccttcgacaccgcggaggaggccgcccgcgtctacgacaccgccgccatccagctccgcggggccaacgccaccaccaacttctccgccgccgctaactccggctccagggccggccagcgggacccggcgacccccggctacgagtccggcacggagtcctcgccggcggcgtcgtcgccgacgtccgtgctccgcaaggtcccctccctgtcctccctcgccgaggacgactcctgcgcggccccgtgcgagccagccgcggggtgccgcagcctggccgtcctcgaggaggaggagctcggccagttcgtgccgttcgaggacgcgccggtctacgccaccagcggcttctgggacttcgagcccgacgcggggttcctctacgccgaaccgtcgtcgccggaggcgtcgtggaacgccgccgccgccgccgagccggcctcgtccgacgacgcgcccagctgggccgcgtcgccggtgcaggagaacgactacttccagggcctccgcgatctcttcccgctcaacccgcttcccgcgattttctgagcgggcgggcggggggacggacggagagcgccggaaccggaacgggcttcggtgattcgtccgccggatttgtttgttttttttggacgacgtcgagagtttggtgtgtcgtgtgcctgcgtgcactgtgtacttgtatcgatgagtttttgaggtgctggagtctacgagttattagtacgtgaatgttttttttaagtgccgtccaaatcgtggtgcctatataatgctggtgtacttgtacggctgtaccgtcccacatggtataccagtctgctctacactacatgggacgacggccttgatttggcaacgagcatgcgtgcattcccatcccaattcccttggctaatttgctattggggctgggccggctctgcggcgcggtccagagcccagactcgaggcgcggctgtgctagtgcagttgtggttgaaatggggaggccatgatgcggctgtgcataaagtctacctgttttggtggccggctgggtccgacgggaccgaccacggcgtacacgcgcgcgggagaccttgcgtcgtcg

SEQ ID NO: 1647 - DNA, 992 bp, Zea mays
atgcccatccatcatcacacgacgacgcacacaagtcgcagctagctagctcccaaccgagccaggaaaacggacgccgtgcagctcgctcgcgcgcgccccacggaaagagagggcaggtaggaataatgtaccaggccatcccgtacagcgccggccagccgtggccgcggccggccccgacgatcggtcctgacgtggcggaggaggaggggttgctggcggcttcgcagcagcaggcgtcgacgccagcggaggcggcggcgagggtggaggaggaggaggtgcggcgcgcggtggcggagtgccccgtgctcgtggtgggcgtgcgcgggtgctgcctcagccacgtggtgaagcggctgctgcaggggctcggggtgaaccccgccgtgcacgaggtggccggcgccgaggcggacctcgcggccgccggggtcgccgccctcccggcggtgttcgtcgggggcaggctgctcgggggcctcgaccggctcatggccgcgcacatctccggcgacctcgtccccatactcaaggacgccggcgcgctgtggctctgacacgagcagccaccaagctagccgccctctgattgcctctccgtcgtcagctgctttgctttgaattaaacgatggtggtgttgtcaactcgtttttatttactcattgactagagatagacatgcacataggacttcaattcttgtacttgtactactagggaaaagagagtgaattatagtactttaatattatttgttacttgtattttccatcctgtgaatacgaaataccgactccagcttctgtttgttctggacgtgtgccatagacagccgtacagtagcagtcggtacagtgcacgaacggtacaggccgtcggcagccggctggattgtgtgatcgatcttcctccatacaaacttccgtagtggccgttcggttattacggaagggagctctggaacaatttctatctcaattatttc

SEQ ID NO: 1648 - DNA, 835 bp, Zea mays
ttatatattccagcagtaatgacttttattaacgatgtaatgtcatgcacaaatatctttggtccaaaggaagagcactagccaatggccaccgcgctccaccatccaagatggccaagagtagagcagagagggaaagaaagaaggaaaataaaaggtagcatgcagctaactaaaaggaggtggagtgaactgtgaagcatatacctgtgacgagcatatccatggaagatgccgccggagcagatgcaccccagctactccgatccccgtgtctatctctctgtcctgtcgtcctccccaagatctcaccagctataaatcgagtgagtgcgaacgccggcctcactcttgatcggagcgagtagctaggcagcatgacgcatgagatgaacgggtccctgaatctctgtcagcatatatacacatacacggaggtagccgccgccgaattcgtcgtgctcccatgtccatccgattggtcgtcatcaaggctgtctagagctcaagcagcagcaggaggaggttcagtgctccgcatccatatcgtcgccgtcgtcgacgacaatgcgtcggccatgtcgggcgggcagccggagggagatgctgtggcgtcgccgccggcgccacgcgtggcgttgtcttttcctgctctggttctcgattcttccctggaacaatcggaaccgaagccggcgagcgagggcggcgtctgatcgatcctccgtatgtgcagtgcagggcaagttgaatcctttggcatgtactcctatcctaacgatgaatgtacacgatcgatgatatccatttatctaactcttccatcatccagttc

SEQ ID NO: 1649 - DNA, 2191 bp, Zea mays
attttttatgagtattaaatatgatcgtgtattacggcagcgcacgacactgtaatactccagtagttaattccgcaaagacaggcacccaccaagaataggcgtttgtcgtgtctcgtgcccgtgcctgtgaacctctcacgtgccgtgccggaatctcgcagccatcgatcgatccagcagatgtgccagccgccgcggccgcgccaagcccaagccgagctgacgatcctgatgcggttgaaaatttccacgaacatatagatcctcatcgtcgaccccatccgtggtgctcccggtgcgccaggctaccagagtccgacgcagacgtagctcccggccacagcagagcccacgccttgagcccttgacgcgctccgtgtgagtggagcgtacgggcgccggccggcggccagagaggaaacggatctaggaggctcagctgagtcgaggagatggaccgcaaagatgtcgggatcctcgccatggacatctacttcccgccctcctgcgtgcagcaggaggcacttgaggcccatgatggggcgagcaaagggaagtacaccattgggcttgggcaagattgcatggccttttgcagcgaggtggaggatgtcatctcaatgagtttgacggttgtcaattctctgctgaaaaaatacaagattgatcccaagttaatcggtcgcttggaggttggaagtgaaacagttatagacaaaagtaaatccatcaaaacttggctgatgcagatctttgaggaaagtggtaacagtgacattgaaggtgttgactccagcaatgcatgttatggcgggacagcagccctactgaattgtgtgaattgggtcgaaagtaattcctgggatggccgttatggtcttgtcgtttgcacggatagcgcggtttatgccgaagggccagctcgtccaacaggaggtgctgctgctatagcaatgctcattggtcctaatgctccaatttccttcgagagcaaatatagagcttctcacatggctcatgtctatgatttctacaaacctgatcttgcaagtgaatatccggttgttgatggtaaactatcccaaacatgctacctaatggctctagactcatgctacagacagttctgcaacaagtatgagaagattgcgggtaaacaattctcaatttgtgatgcagaatattttgtgttccattctccatacaacaagctcgtgcagaagagtttcgctcgactttattacaatgactttttgcgcaactgcagctctgttgatgatgatgctaaagagaagctccagtctttttcaaatttgactggtgaagagagctaccagagtcgcgacttggaaaaggcctcacaacaggtcgcgaagcacctccatgacatcaaagttcagccatcgactctgcttccgaaacaaattggtaacatgtatactgcatccctttatgctgcattagcatctgtgctatataacaagcatgatagtctgaatgggcaaagaattgtgatgttctcttacggcagtggtttgacatccactatgttttcattgaggctaaacaatggccagcatcccttcagcctatcaaacattgcttcagttcttgatgtcaccgagaagcttcagtcaagacatgagactttgcctgagaaattcgttgagacactgaagctgatggaacaccgatacggcgcaaaggacttcgagacgagcagagacacgagcctactgcagccgggcacattctacctcaccaaggtcgactccatgtaccggaggttctattcccagaagctgtccgaggaaacaggcggcgggaaaaccaagtgctgcaacggcctcgcaaatggccactagtggtcgcccagcactgttgctcatcattctcagtattttgataatgctcatggttagcgtttagtctagcgtgtttctgaaataatataattgttctttgaagctgtcccaccccacctagatcagctagttttttattttaatattttattcttctgaacattgaaattcatcagtctctacattgtttctctttgtttcttcttttagtactctcttcgttccaaattctaaattacgtacataatgtttgctatgtctaatagtaaaaaaaaagtcaacaccttataatttagagttagagtggaaatgtggaatgtggc

SEQ ID NO: 1650 - DNA, 2035 bp, Zea mays
ccccatcccatccggttgaccctgtcggaataaaaaaaatcagtggcgaagatgcacgcaaagattgcaaccagattcctgatgtgagccacacaataataaacatgtgtacaggcggacagcgactgcaatattattggagcgggagcgggagctcagcaacaccagcacaacgcccagagaccccagggggctgggactgggacggcggcttgcagattcctgcggattcttaagtaggcgcagttgttaattaatctgggttgaattgtcaaacgccatgatgggggacggacgatgccaacgcgtcgccgtcatgggggggcgtccaggtgtgcgctccccagcgattcgctaatcgctagtcctataggcagccggcaggccacatctttttcttcctccccagtccccagtcccccattcccatattaagcagagccgaggcgagcacccccacccaccgagatgcaatgcaatgcaaacatcctccctcttctcctgctcctcacagacatcttatcctagctcccggtcgaaggccgtaggtaggattcccttctattcctcgcccgcttcctcctccggcagccggacctagctagctagctttcttgccgttcgccgcccatatggctaggaagtgctctagctgtgggaacaacggccacaactccaggacctgcggcgggcacagcaggaccgcggcggccttcgagaacaacggcggcggcgtgaggctgttcggggtgcagctgcacgtggggtcctcgtcgcccgtagccgtagccatgaagaggtgcttcagcatggagtgcctgtcgccgccgccgccgctgccgccgccgcccgccgcgccggcgtactacgcggccgctctcgccgccgccaacagcagctcgccgtcggcgtcggcgtcggcgtcctcgtcctcgtcgctcgtctcggtggaggaggcacaggcacccgagaagatggccagcgggtacctctccgacgggctcgtgggcagggcgcaggcggagaggaagaagggcgttccgtggacggaggacgagcaccggcggttcctggcgggcctggagaagctcggcaagggcgactggagaggcatctcccggcacttcgtcacgacgcggacgccgacgcaggtggccagccacgcccagaagtacttcctccggcagagcagcctggcgcacaagaagcgcaggtccagcctcttcgacgtggtggagaacgcagctgagagggcgacgacgacgagctccagggagcgcccgaggctcacggtcacggatgcgataatcgcgaccgcctctgctgcagcacccggaacaacgacggcagcactcccggccctgtcgctcggcatccgacggccagcgaggcctgagtaccacgccgcgctgcctccgaacagcctgtccctgcagctgccgcggtgctcggcggcaatgggtagcgcgtcgccgtcgccgagcctggcgctggcgctggcggggccgaaacacaagcacccttcgccttcgtccctgacggcggcaaaggctagtagtagtggccaggcaccggacctggagctgaagatctcgaccggccggcagagcgagcaccaggtccagacgggctcgccgccgaggacgccctttctgggcaccatcagggtcacgtaaccggaaagacggcggcggcggttagtcgggaatgacctgctggtaaaagaagagcttggccggggtgggaaaactgaaaaggaggagcttttggcagtggtgttggtgtgtgtgtgttgctgcccctgccagtggcagccgagacgacgatgcggtcgtttatcacgtgggtgtggtgttgtacatcatccatcagaaagatggaaactttactttagtggcctaattagaactctataaactttactgtcctaatttagcattcgtttgtttcttgcaaataaagaacgccgttgccattcgctactctgccgtctcgtctcgctcgacctcttcatgatgttgctgacacagtggtc

SEQ ID NO: 1651 - DNA, 1940 bp, Zea mays
ctaaaatacaaaaaaattcggccaagccgtgaggtggacgaggcgcgccacctgctaagccgaatcgagcagcagtagccaccttgccatggcgatgcaggctgctttcctcgcggggttctcgcagctcgccgcgcagccgagccgcgactgcgccgtggcagtggcgccgacgcgggtggccgttgctgcggtgggtagcgccaaggtgggcgcgcgggtaggcttgaaggcggggatcgccgcgcccgcgcccgcggcgggccgcggggtgcggtgccgcgcaagcctgatcgagcccgacggcgggcagctggtggacctagtggcgcccgaggagggcgggcggcgcgcggcgctccggcgggaggcggcggaactgccgcaccggctgcgcctcggccgcgtcgacaaggaatgggtccacgtcctcagcgaagggtgggcgagtccgctgcaagggttcatgcgcgagcatgagttcctccaaacacttcattttaatgccatccgcggccaggatggcaggatggtcaacatgtccgtccccatcgtgctctccgtaggggacgcacagcgaagggccatccaggccgacggcgccacgcgcgtcgcgctcgtcgacgaacgcgaccgccccatcgccgtcctcagcgacattgagatctataagcataataaggaagaaagaatagcacggacatgggggacaactgcacctggattaccttatgttgaggaggcaattaccaatgctggtgactggttgattggtggggacttggagattatagaaccaatcaagtacaatgatggtctagatcagtatcgcctgtctccagcacagctgcgtgaagagtttgccaggcgcaatgctgatgcagtatttgcctttcagcttcgcaatccagtacacaatgggcatgctctacttatgaccgacacacgcaaacgcctccttgagatgggttataaaaaccctgttcttctgctccatccactgggaggattcacaaaagcagatgatgtgcctcttagttggagaatgaagcaacatgagaaggttcttgaggaaggtgtcctcaacccagaatcaactgttgttgcgatcttcccctctcctatgcattatgctgggccaactgaggttcaatggcatgctaaggctcgtattaatgctggtgcaaacttctatatcgttggaagggatcctgctggtatgagccaccccacagagaaaagggacctctatgatgctgatcacggaaagaaggttttgagcatggctcctggccttgagaggctcaacatccttcctttcaaggtggctgcgtatgacacaaagcaaaagaaaatggatttctttgatccatcaaggaaagatgatttcctgttcatctctggcacaaagatgcgcactcttgccaagaaccgagagagtcccccagatggttttatgtgcccgggtggctggaaggtactcgttgaatactatgacagcttggtgccatctgagggcagcagcaagctgcgtgaaccaattgcagcctaaaatctggaaaatccttcatataaggaatgctactatatcttagcaagcggttctttgcgacatagaaccgatgctatatgattgtatactggctgtaagactgtaaaacactaggcttgattcggatgttaatgtgtgctttgtacccggtgtaccttctctgctggcagtgttgcacatgcactggagcacatcaaacgtttggtgttaataaggacaggctatgtatcctctgccagattgtacatatatacattgtggtgatatataattataaagctgacctctgccgtccgggctcgtagtgatgaacagttttatcactagttctctttaagcatcaacctttttgtgtgctattatcaatgagcataagttattgggttca

SEQ ID NO: 1652 - DNA, 2618 bp, Zea mays
cacgaaaatacccccccccccccccccccccccccgcctctttggctctttcttcctcctctacctgggccctcgtcattttccccgcagcgacgacgattcagtgaggcacccctctcctggcctcttctcgccttctccgtttccgcgaacccagctgcctcgtagccccaccacaccgccgagcacgcggtctcccgcgccgccttccacccaagcgaagctacccctactcgacccagaattatcttctaccagcgctagtccgctccgcctctctactggctgccgtggagtggggatccgtccggacttccttctttcgctgttgatgtcatcatgctgagcattttgtggtagagacgatcatctctttgggttccagcatataactcatgcccataaaatttgcactagaaaatatgtcgacacaagcctctaaccggtcatacagatatccagacagaacccaactgccgtaccacaatggcaatccaatgcatgttgggggcaatggtaattactgtgtgcaacaaaatcacgatgatgttaactacatttcctctgatgatggatcacagagcagtagttctagagttcaagattttcaagcacagttttgcaccctagattcgtcttcggccaattgtgtttatcctgcacatagttctacctcttctcagagcataagtggaagccctctgtctcagcaggagagccactctgatcatgcatatggttcctctccaagtgcatcgtgcatcactcaggttcccacctggacacttaaggatctagaaaatgtgatgcttggacccgattctgacataggtagccctgacagttcctttctgcttgacactgccttgcatggaaataactggagagaacttttgggaattcaaactggggatttgaggcaggtaattgtagcatgtggtaaggctgttgacgagaatgctgtctatatggatgcattgatgtctgagttaagggagatggtttctgtctctggtgaaccgatgcaacgtctgggagcttacatgttggaaggcctcattgcgaggctttctttcactggacatgccttgtataaatctctgaagtgcaaagagcctgtggctacgagttctgagctcttgtcctatatgcatcttctttatgagatctgtccattcttcaagttcggttacatgtctgccaatggtgccatagctgaagcggttaagggggaagacattattcacatcatcgattttcaaatcgctcagggtagtcagtggatgactatgatacaggcccttgcttcaaggcctgggaggcgaccatacctaaggatcactggcatagatgactcgaattctgctcatgcccgaggtggtggactggatatggttggacagaggttgcacagaatggcccagtcatgtggtctgcccttcgagttcaatgctgtgccagcagctagtcatgaggttgtgtttgaagatctttgtctaagatctggggaggccatcgttgtcaattttgcttatcagctgcatcatactcctgatgagagcgtgggcatagaaaaccatcgtgatagaatactgagaatggtcaagagcctctctcctaaggtggtaactcttgtagagcaggaggcaaacacaaacacagcacctttctttcttagatacatggagactcttgattattacacagcgatgtttgaggcaatagatgttgcttgccccagggatgataagaagcgcattagcacagagcaacactgtgttgcaagggatattgtcaatttaattgcttgtgaaggtgcggaaaggatagagagacatgagccttttggaaagtggagggcaagacttgtaatggctggttttagaccatacccgttaagtccagtggtgaacagaaccatcaaaacactgcttgacagttaccacagccattacaggcttgaggagagagatggcatcctttatcttggctggaagaacagaaagctggtcgtatcttctgcctggtgctgatatttccaacttcttctaagaagcattgttaagattctttcgtggcttggggttcaggcgttcagcacatgaatccaaggtggaacctaaacttcagtatgaagactgcacaatcaaaaaaacaagctggttgcttccttactatttgttgcccagccttgaaactctcccacgctcactatcatcgctgatgtacttaccatgactcagttccatccttatatataggtgcaaacaatggtcttaatattgtatattggtagaatctggtggtattagcttccaaatctggattgctgaatcgtttgtgttactacatttagccaggatttgacagtagacacaaggagtgctgtaagatcctgtatgtacaacgtgcttcagttggtgtattgtacgtacttgggtgctatggctggtttggttatcacagtgctgagtgctgcactgttcggcgttaaactcttgtttgctctgcgttggtaggcaggggcaaccagtgaagtgtgaatgccttctgcgatgctgaccttatgctctgagatggcacggcagcacgcctgcctgatccatgactggaaggca

SEQ ID NO: 1653 - DNA, 2910 bp, Zea mays
acttttgtacttttcccccccctgccctccacctccactccacccccgctacaaaaggtgagagggaggaggagcctctgcacttaagttttattagtccttctcatcagccatcagagcccctctatctccgggtttctgttaacgagtattgtattttaattaggagggagtggttcagctggtgcgcgcagtggtagctctcctcatctttgccgccttgcccatttgctggcgcagtgactgagcttccttgcaaccccacttgagaagaaaccaatcctcaagcgcaaggaggcaaggcaaagcctactcataggggctgccgagctgaaggagcaaaccggaggaaaaggcagtagtagctagctagcagcaaccaccaaagaagggagaatcctccaccttgctcttggtggatgttcttcactgcattgccttcagccactccgtcctccgcttgcttcttgttcgagagtggtacctgctgctgcttcttcttcttccctttttatctctgaaatcttttgccacacatccatctgcttgctgctgtgtgtctgtctgtctgtctgattccttatttccttctccttctccctctcccacctaccctccccaaccacacatcacacccacacactgtatgtttactgccattggtaagaaaataaagaaggggggagtcgagtgagcagtgggaggtgcccccagctcgcctctcgggtctcggcaattattgccacctttggagtttggagtcctccaataggagtctcctccgtcgtcgtcctgttcctgtgctgtctgcaaccactggcactgccccgcccccttccctcctcttccttgccttccctcgcctcgtccgcctttttctcggaggagaggaggtgcttgcttccatccatccatccgtgtcctccgctcgctttaaagcttaacccaccgctctgcccggcgggcggccgagcacccaagaacccagccccttgtctcgtcccttcctttcttgccgctcccgcccgctgctcttggattctttaattgcatgctgttgctgttgctgccgccgccgccgccgccgctgtgatctctctctctctttcccgtcctccaaagctttttggttgccatcaactttgcttttgctctctgggcgagcagtacacagctgttgttccgtctccaacggcctgcgcacgcagcagcagccagcagagcagaaaggcctcccaaaatccaccatttcggagccggccgccaccagcgacggaggtgcctgcctgcttgggttgagtcccgaggagagagctgctactccctgtgcaaggatcccgacaacaggcaggcacgtacacgcgcgtcggcctggggacgggctgtcgccatggactgggacgccaagatgcttcctgcctgggacctcggcacggtggtcgggcccagcagcagcgggggcggcgcgctggacctgaagctgggcgcgccgacgagctcgagggcggtgctcacggccgccgccggtgccgcgcccgcgctgccgtcagcgaaccctcctccgcccccgcctccgccgtcgtcgtccgcgccggcgaagcggccgcgcccggggctcgcgcggcaggcggtgcccgcgtgctccgtgcagggctgcgacgccgacctgtcccggtgccgcgactaccaccgccgccacaaggtctgcgaggcgcactccaagacgcccgtcgtcaccgtcgccggccagcagcagcgcttctgccagcagtgcagcaggtttcatctgctcggggagttcgatgaggtgaagcggagctgcaggaagcgcctcgatggacacaaccgccgccgccggaagccgcagccggaccctctcaaccccgccggcttgtttggcaatcaccacggagtgacaagattcacgtcttacccgcagctcttcgcggcgtccatggaacagcctaaatggtcggtggtcaagacggaggccgacgtgttccaagaccagtactacccggccgtccacctcaatggcgctggcggcggcgccatcggctcccacttccacggcaaggagcagaagcacttcccgttcctgaccagccacagcaacggcggcggcggcggcgacgtggcgaccgccgcggccctgggctgccagccattcaccatcaccaccacggcgtcctcagagagcgacagcaagcagagcaacggcaactgtgctctctctcttctgtcagacaacccgacatcagcacagacggccatgatccctactaccgcgcagtccctcgccgcggcgatgcagtacggcggcagactccctggcagcgtcagcgtcagcggcggcggcggcggcgacgtctccctcaccgggatgtcgtacatgagggtgggagacagcaggcaggcgtccattctgacggcgtcgtcacccggccacgctgcggtcgcttcccctgtcccggccaccaccgcagccgcaacgccgccgccgccgccgcagctgctgcagtaccaccatggctatggctactaccatgtgagcggcggcgagcagggcaacaaccccgacggcgccgccgttcacgcccttcccttctcgtcgtggtagacgagctctcctgatggaatcatgtgcgctaggcaagcagttgctctcctgtggttcaccaaacgtatcggttgtaatagtaggctcgatcatactggaaaccgtgacaagttgtccattttccaacttatcctgataggtctaatttatggaaattcttcctaagttattatgattcggaaccgtgtaaagattccaatcctgttttgtttgagttggcaatccgcttgctcattagagcatctccaacagaatgggtaaaagctccccaaaaccatttttagcacaac

SEQ ID NO: 1654 - DNA, 1494 bp, Zea mays
tgcaaatgaaggtaacatttgtaggcgtcgtagcttggttttgcttcacgagcacaacaagccatccatctatgatctatcccgctccctccatccgcaagcaaaagctaatcgatcttcccatgatctccttcaattgctactaataaactactcctataatagaatcagttacctcagttgctcgtatagggcatgttctccaagctactccgtccccagtccccaccatttcaaattgcaaataaaactgcaatctcgcagcggctgatggattagcaagcaggacaagagactgagatccatcctccagacacgcgcacgccaaggatcgcattcgccaagcaacgtcgggtcggcggcgcgggggcgatggagacgcggcggccgcggcgcggctggaacaaacgcttcgtcctcccgctcgcgctcctctgcctcgccgtgctgctccccggcgcgctgctcccgccgtccgcctcggcgtcgtcttcgtcgccggccgcgggaggtggcagcaggaaacgccggtgggttgggtttgactactatgtactggcgctgcagtggccgggcaccatctgccgcgagaccagcaactgctgcgacaccaatggctgctgccgatcacagcctctcaagtggttcacgattcatggtctttggccacagtataactatgggggctggccatcatgctgcagaccaaccagattcaacataaataagatcttaatgttgatgccgatactcgagaagtattggccgtccttgtactgtggttcttcttcaacctgctttggtggaagggggccattttgggtgcatgagtgggaaactcatgggacctgtgcttaccctgaaatacaggatgaatatgactacttctccacagcactgtatctctacagcaaatacaatgttacgaaagctctgagaaaagcacgtatccggcctacaagcggcagaaaatacgccgttggccatattgttgccgtcattgaatatgcgtttggggcaatgccgtcactcgtctgtaagaacggctcagttcaagaactcaggctctgcttccacaaggattatcagcctcgtgattgcacgcttgaggccggctctgcaccgaacggcagaagctactgccctcgctacatcacgttcccgtcgtacaaaccgtccgtggtggccaatactacggaggggatcaacaaccaatccaatggcgaggttccgagctacatgcgtacgtctgactctgagtagcgtccaggactccaggttctgtgggcctctgccgagccgagtttgtatcaaatatcaatagagcgagacgccacggcgtgcttgcaaaattaccggcccggtatggtcctgtataattctttcattcacagtatcgaatgactggccaccgcgcaccgggatttggaaatgaaatgtgaatgttaatgtatattatattcacttgactgtaccagattcgtgcacaggata

SEQ ID NO: 1655 - DNA, 5299 bp, Zea mays
atgcgagtaccatgctgctcgttatgcaacgtcagatatgacgaggaggagcggacgccgctgctcctccactgcggacatggattctgccgcgcgtgcctctcccgcatgctagcggcagcccccggagccacgctgccgtgcccgcgatgccgccatctgaccgccgtaggcaactcggtctctgcgctgcggaagaacttccccattctctctctcctctccacatccccctcatccccgtctttcctccactccgactcggggtcatcctctgacggctccgaagacgaggacgacttcttcgcgcgccccagtcgccgccccgcgcccgcgcccgctgccgcaccgcccggatgcagcttcttcgacctcgcctcgcacccggacctcaagctcgcccgtcgcatcgggagcggcccgcccgggcccgccgggcaggaggtgtgggccggcacgctgtctcgtggcggtggggtcaagcggtgcaagcaccaggtggcagtgaagagggtgcccctggccgcaggggacgggctcgaggttgttcaagaggaggtggagcggctgaggcgcgcctccacatggtgtcggaacgtgtgcacattccatggtgctgtgagggtgggcggccacctctgtttcgtgatggatcgctatgtggggtctgtgcaggcggagatgcggcagaatggtggacgccttacgctggagcagattctcaggtatggagcagatattgctcgtggaatagcagaactccatgcagcgggtattgtttgtatgagcataaagccgtcaaacattcttttggatgcacatggacatgcattcgtttcggattacggtctttcagcaattctgaagaaccttactagtaggagagtacctgatgactccagtgctggcattgatgctacactgcttagccccaattatacagctcctgaggcatggggaccactgaagaagtcactgaatatgttttgggatagtgcaaacggtatatcaccagagtcagatgcatggagttttggttgcacgcttgtggaaatgtgtactggtgctgttccatgggctggactgagtgcagaggaaatatgtaagtctgttgtaaaagaaaagaagccaccgcctcaatattcaagagtagtaggtgtaggacttcctggggagctgtggaagatgattggtgaatgcttgcaattccgagcttcaagaagaccatccttccaggacatgctgaaaacttttcttcggcatcttctggacataccacggagcccacctgctagtcccgaaattgattttgcaaatgaaaacttgcccaatggcatgcaacctccaacaacctccatcttagagatggttcatgataatccaaatgccttgcatcatcttgtatgcgaaggagatgctgctggtgttagggatctacttgcaaaagctgcatcagagagaaacgatagtttaatccgttctctcttagaagcacaaaatacagatgggctcactgccctacatttagcatgccgccgaggctcggcagagcttgtggaagctattgttgcttaccaagagaatgtagatatattagataaggatgaagaccctcctatagtatttgctttggctgctggctctccacgatgtgttcgtgcacttgtaggcaggtctgctagtataaattctaggcttagagaaggcctgggtcctactcttgcccatgtctgtgctcatcatggtcagccggagtgcatgcaggagctgctgatggctggagctgatcctaacgcagtagacggggaaggtgaatctgtgctgcatattgccgtggccaggagatataccgattgtgctattgttatactggaaaatggaggctgcagatcgatgggcatatcaaattctcaacataaaacgccattgcatttatgtattgagacatggaacacagctgtggtaagaagatgggttgaagttgcatctttagaggatatagcagaaacgattgatgtacccagccctgttggtacagctttatgcatggcagcagctcttaaaaaggagcatgagaaagagggtcgagagttagtaagaatattgcttgctgctggtgctgattctacggcacaagatgatccacactgtagaactgcattacatactgcagcaatgatcgatgatgtggagctggttaagattatactggaagcaggagttgatgttaatataagaaatgctcaaaatacaaccccactgcatgttgcacttaatagaggtgcaaactcatgtgttggcttgcttttagcagctggtgcaaactgcaacatacaggatgatgatggtgacaatgcttttcacatagctgctgatgcagcaaaaatgatacgtgaaaacctggcttggattgctcaaatgctactacagccgtcacctgctgttgatgtgagaaaccaccgtttagttgtgcgaatgaaaaagttccttggtttgtgtgataatatattaacaagtttgaacaatatcactgtatattacagaggttggacactacgagactttcttgagaggcttccacgagaatggatttatgaagaattgatggaaacacttgaagataaaggagtccatctctcaccaaccatatatgaggttgcagattgggtgaaatttagaagaactgttacttcacctgcttttggctggcaaggtgcaggacctagaagcattggttttgtccagtctgttgttgacaatgaccaccttgctgtgtcattttgtactggagaagcccatgttttgacaagtgaagttatcaaagttattccattaaataggggccaacatgtgcaactcaagcctggtgtttcggaacctagatttggatggcgcggtcaatcacgggatagcattgggacagttctctgtgttgatgacgatggaatcttgagggttggtttcccaggagcttctaggggatggagagctgatcctgctgaaattgaaagggttgaagaatataaggttggtaactgggttcggattcgtccctcactgacggttgctgtacatggcatggagtcgattactcctggaagtgttgggattgtatactccatcagaccagatagcagtcttctattgggcctttgctatttgtccaatccatggctgtgtgaaccagaggaggttgaacacgtcgacccattcaagattggggaccaagtatgtgtaaagaggtctgttgcagagcccagatatgcatggggtggtgagactcatcacagtgttgggaaaataattgacatcgagagtgatggtctgctcatcattgatattcctaatcgggctgcgccatggcaagcagatccatcggacatggaaaagattgagaactttaaggttggcgattggattagagtcaaagcaacagttccttcacccaaatatggttgggaggatgtgactcgtaatagtattgggattgttcatagtctacaagatgatggggatgttggtgttgctttctgcttcagaagcaggctttttctttgctcggttgcagatgtcgagaaggcacagccatttgaagtaggggagaaggttcatgtgtcaccttccatatctgagccacgcctcgggtggttaagtgaaactgcagctactattggagccatatcaaggattgacatggatgggactttaaatatcaaggtttctggccgaaaaggcttgtggaaggttgctcctggtgacgctgagaggctttcagcatttgaagttggagattgggtccgcctgaaaccaagtattgggagcaggcctacctatgactggaatagtgttgggagaataagcattgcagtagtccatagcattcaggactctggttacttggagttagcaggttgtttcaggaatgggaaatggttaacccataatacagacattgagaaagtgcagaccttaaaaattggtcagcatgttcgattccgtgctggaatttcagagcctagatggggatggagagatgcgaaccctgattctagaggcgtcatcgctggtgtacatgctgatggagaggtaagggttgccttctttggtgtgcctggattgtggagaggcgaccctgcagatcttgaaattgagaatatctttgaggttggagagtgggttaggctgacgaacgatgtggaacaatggagatcgctcaaacctggtagcattggtgtggtgcatggggtgggatatcaaggtgatgcttgggatggaaccattcatgttgctttttgtggtgagcaggaaaggtggattgggccttctagccagcttgaaggagttagcaagtttgttgttgggcagcgtgttcgaatcagaggctgtatccgccagccaagatttggttggtccaaccataatcattcaagtatagggacaatctcatctattgacgcagatgggaagctgaggattcatacaccagctggtgccagggcttggttgatagacccagcagaggtggaagaagtggaggaggaggaagtctgtgttggggattgggtaaaggttaaggactccgttggaaccccagtttatcaatggggtgatgtgaaccacagcagcataggggtggtccaccgggctgatgatggagagctctggattgctttctgcttctgcgagaggctatggttatgcaaagcatgggaggtggaaaaagtgaggcccttcagacaaggtgacaaagtaaggatacgacctggtcttgtatcccccagatggggttgggggatggagacctacgcgagcaaaggcgaggttgtaggtgtggatgcaaatggaaagctgaggataaagtttcggtggagggatagactttggattggggaccctgctgatattgttcttgatgatgtccacttattgacggaggcttctaatggcttggctttttgttcataggcttgtggtattctttcgataccatatctgatatattgcacccatccattttgcagcatttcaaatttagcaaaatcttaacctgcagtggacttgcaagttgcacataactatcatcgcatcggcatgccagggtgtatttcatgttgataaccggggaatgagaagacaacgatagtgtagagctggtaaccatcacctagttttttcttctttggtttacatgtataattatgcctcctgacacctttttgggtttcagtgtatcatataccagtgtacaggttcggacctgaacattaatttaattgatagtggtcttgtatgtttactt

SEQ ID NO: 1656 - DNA, 2836 bp, Zea mays
gaaccattttcaccggcgcggtgacttcaccacccgtctcccccttcctcgtctcgccacccgagtctccagtctccacctatatatcggcccgtgccggcgcgcctcggcctttcaagtttccccatacaccgagggaggaacacacaccgaggaggccgcagcagggcagagtacacccccgcgtttcgggaatggcagtgctgctgcgccccgcggcgatcgcaggcggccggcaggtgtggccggtggcggaggacgaggagggggcccgcgaggcggaggcgtcgtcgcagcggctggtggaggcggtggcgcgcggcgacgcgagggaggccggcgagctgctcgcggcggggcgcgcggacgtgaactacgccggagtggtgtggctcagggcgcgtcgcgtcgcggaggcggagccccgggaggacgccgccgccgaggcgcgggccgtgcacgaggagatccgcgccgacgtctcgccgctcttcctcgcggccggcaacggggacgtcgcgctcgtccgcgccttgctcgcaaagggagcggacgtgaacggcaaggtgttccggggctacccgacgacggccgcggcacgggaagggtgcgcggaggtggcggagctgcttgtgcgtgcgggcgcgtcgcagccggcctgcgaagaggccgtcgtcgaggctgcgttgcagggacaggcggccctcgcggccatcttcatgggctcggacctcgtccgcccccgtgttgccgcccacgcgctcgtgtctgccgcagcgcgcggcttcgtcgacgtggtcgacacgctcatcaagtgtggagctgatccaaacgcgaccgcccgggtgctcctgcggtcgctgaagccatccctgcacgccaacgtcgactgcacggcgctctttgcagcaatcgtgagccgtcaagtcgctgtggtccgccatctgcttcaggccggcgtgaagagggacacgaaggtgaggctgggagcgtggtcctgggacgcgtccaccggcgaggagctgcgcgtcggcgccggactcgccgaaccttacgacgcggtatggtgcgccgtggagtactacgagtccacgggctccatcctacgcatgctcctccgtagcgggttcacgtcgactgccgctcacctcggccggacgctcctccaccacgccatcctatgcggcagcgctggtgccgtccagaccttgctggcgtccggtgcagactcggaagctcccgtgaagacgaccaggagcaacaggtccaggccggttcacctggccgcgcgcctcggccagccggagatcctgcggatgctggctgacaggggctgcgacctgaacgcgagggcggaggctggcgacactgccgccatcatctgctcgcgccacaaacgcgaggactgcctccgagttctcgtgtccgccggtgcagatgtcgcgctgttaaactcggctggcgactcgtcggcctccgtcgcttcctctgggggatggaagaccggcttcgaacgggctgttattggcgcgattcggtgcggggccgtcccacgctccagcgaacggagcgtgttctccccgctgatgttcggcgcgctgtgcggcgacgcgaccgcgatggaagtgctgctctctcaaccagacgtggacgtggacgagcaggattcggacggatgctcgcccataatggctgctgccaagatgggaaacgtcgaggccttccgcgccctcgtattcgccggcgccaacgtgaagctgagcaacaagcgcggggagacggccatcgggctggcgcagcagagcaagaagagagacctcttcgagcaggtcatgctcgagctcgcgctggagaagggcatgcctggaggcttctacgcgcttcactgcgcctcccggcgcggcgacaccgcggcggtgcgccacctcgccagcacgggctgcgacgtcaatatccccgacggtgacggctacaccccgctgatgctcgcggccagggaaggccacgcgggcgtgtgcgagcttctcatctcctacggcgctcgctgcgacctccggacgccgcgcggcgagacggcgctctccctggcgcgagcagcgctggctacggcggcgttcaacaaggccgaagacgtgatcatggacgagatgggccggcaggcggtccttcagggcgcgcgcgtcaggaagcacaccaagggcggacgcgcgaggcctcacggcaagtcgctgcgcatggtcgctgcggcgggcgtgctccggtggggcgggtcaagccggcgcaacgtgatctgccgggaggccgaggtcggtggcagctcggcgttccagcggcacaggcagaggaagggggacgcgtatgagccggggctgttccgcgtggtgactgcgacagggagggaggtgcacttcgtgtgccagggcggtaaggaggccgcggagctgtgggtgaggggcatcagggccgtcaccagggcggcgtttggcaagagaggcaaggagtgagtgacgcatggctgctctctctccgttaggctctgtaggttgcagcgagcgcgtgcttgtaaagagttgtagcgggcgtagagccgtaggggtgctatgtggttcggtgtggggtgcagctgcgctggtcttcagctcgaaggctttggcttgccatgatggtttttggttcaggggcatggtgttgtgttgtgtgtatatagactggctgttgtctcatcgaagttgctttagctaactggtttgtagtgcgtttctatctgaattatcagtctcctatgcgaaacttcgccatttgagttactaattacgatttctgatgtaaagttatt

SEQ ID NO: 1657 - DNA, 1370 bp, Zea mays
tgcctaaaacagcctcgttcttctcttatcggggacatccatgagggaaaaaaagcatcggaaacctgatgatgattcagtccaagtggtggccatacataatgctccaaataaaagcacagggaggatcggagtgctatgctagcacacatcgaatcactagctcgatctagttgcatgcaaagttccaaagcaaacagggagtttcgaaagacgtttcgctgttgcacgacacgaaccgaacgaaagttgcgtcgttgtgattccacagattcccacacgcaccagaaaagctagcatgcatctcgtttagtccaagtccacaacagtgcacaccatcttcttccacagatcacggaaagacggcagaaacctgcagagacgatgcatggatcatggatgtatggatcccatcccatcctgtactgtaagatctacacacaacaaaagcaaatagactttgtatctccttgatgtattgcccttggttattaataaaaatgcttcctttataaaaaacaaaaacaagcaaagcaaatgaagttcgatctccttttcttttcttcagaacgaaatgggatctctttttttggaagagaacaatatatatgtagattcaacgagcagatcaaggatttagagctagtttatatatcaaaagcgcaaggaaagtacaaaaaaaagctttggatctccattatatatacacacagaacgtaactgctatataacaattaaccagcagagaagaacagtaagcacgcacatgataagggactaaataaaatatgcccgtcgttttggcagctgctatatatgtatgcatcagatgccaaccaaacatgtaagttaagcagctcaagcaaagacagaccatgaagctagtaaaaccatgagatatgacgaagctgatgcatggatcgataaaggtaaacaaggagcgagggaggagggagcacccttcagtccaagcaaagacggtgcgagatcgaagcttttacctcccgcttcattcactcatctgcaaagctggtttccatggccgtttgcttggcatgtgggtgaatgagtcggcagctaattcgaccctagcaccgcccctgagtggactgaaggacgctctcttccatccagccatcgtcgtcgcaactaaccatgacggcggcggcggcgacaaattaaacgaccaacaacaaatcaaaagaaaagaagaacaaacatgcatgcatgatgcacaaccgcgcttgctactgctggttgatcgatccgtttctgagcacctcatggcgtgcagtgttcagtttctccctggatctcgcgaagaagaaggcagatgggttttcgatggttgcaaggaaggagcgagcgag

SEQ ID NO: 1658 - DNA, 1509 bp, Zea mays
gcttttggattctggtttctctcgtctttctcctccctctcctgacttttcttctagacatctcgcgggtcttatcgactccaacaagaacacactacacaccagccagcgagatagcgaacgctaggaacccagtggccatctttggagcggccatgacgctggatcagaaccatgccatgccgatgcagcccccggccctgcagcccggaagagcatatggagcagagggcagtgctgtggtgcatggttccatcagaacagtagcaggaggccctactcttgccttgaatgagtgccagattttggtacagcagaaaccccagggagattcacgactgctggcctctaatctgtgcaggaagaagcgacctcgcagatcacgagatgggcctacgtcagtggcagctgtcatccagcggtgggctgagcgcaacaagcatttggagtatgaggaatctgaggaggcaaagcgaccaagaaaagcacctgcaaagggttcaaagaagggctgtatgaagggaaaaggggggcctgacaatactcaatgtggataccgtggagtgaggcagcgtacttgggggaagtgggttgctgaaataagagagccaaatcgtgtcgacagactctggctgggtaccttcccaaccgcggaggatgcagctagggcctatgatgaggcagccagagcgatgtatggagacttggcacggactaacttccccggacaggatgcaacaacctctgcccaagctgctctatcatcgacctctgcccaggctgctccaacagctgttgaagctcttcagactggcacgtcatgcgagtcgacaacgacatcaaatcactcggacatcgcatccacctcacacaagcttgaagcctctgacatctcgagctacctaaaggaaaaatgtccagctggatcatgtggtatccaagacggcacacccattgtagctgacaaggaggtctttgggccgttggagcctatcacaaatcttccagatggtggtgatggttttgatatcggtgagatgctgaggatgatggaaagcgatccacataatgcaggtggagccgacgctggcatgggacagccctggtatcttgatgagctggattcgagtgtcttagagagcatgctccagccggagccggagccagagccagagccattcctgatgtctgaagaaccggacatgtttcttgctggcttcgaaagcgctggtttcgtcgagggtctggagcggctaaactgaatttctgatgtttgaccgttgatcctcatcccacttcatgtctgagcttgtgaattcggaggcaaacattggcagaacttataagctctagcaattctaggctttacattcctctgtgatagttctctatgcatgggaactgggtttgcttcacaatttttgtaagaccagaagtgatgtaaatagttcccaccttgtggaaggacaagaaaaaaataaataaaaagagtgcttgctttcgttcctt

SEQ ID NO: 1659 - DNA, 2588 bp, Zea mays
tgcagcactaaagcttagctttgagagcttctcccttgtttgcagcgttgctaagtgctaacacccttctctctcccctcctgtctgctcttcctgtcggtgcccactgctgctgttcagctgatacagtcttaagctcagttactgccgccggtttccagcaaaggctctcgcagcgcacttgtgcctgaaccttcaggcctgtggcaggagagtgtggggaagcagcacaagaagaaacagtggaatcagaggggaagcaaagctccaagagggggagccgtcttcagcccgctcccagcagcctcgctcgcggtcgtccgccgctcgatcgagctcgcaaccggcggccagcctcctcctcctttggcaagaaggatttccacctttttttttctttttgcaaaagagccttttttcccctccttttcttccgtttgcttcccccaacaagctgggagctagctagcggccaacaagccgagttccgagccagcaggctgtagaccttggcagcaagcgcgcgatctctctctctctctcactctttctctaggcatgccttcggcggcattacaccttggcacgtcggtggaggccggcggcggcttccaaggcaccggtgccatggcgccgtccgcgcgcctcctcacccccaaaggcgccggcgctgcggccgggcccgcgcaggcgcagagtcgtcgggaggaaacggccaacggcgggggcgctggccctgaccttgccgcactccggcccaccaccaccaccaacaggccgcgcgggaaagcccaggccgggaagcccagcaggcgggcgccgatctggaacctgaaggccgccgtcttcgcctccgtcgtcctcaacgtaggcctcctcgtccagcactacgtcagtagcacggctccgtcgcaccaccaccaccgccaggggcatcaggcctgcccgatgcatctagatgctggcgccagccgcgacagaagggggaggcaggaggatccgctgtccgtgcccaaggccggggcgccgtcgacgggcaagccggcggtgacgccggactcggtgatcaatctcgatcacggcgacccaaccatgttcgaggagttctggcgggggacgggggccgccgccgagatcgtcatcccggggtggcagaccatgagctacttctccgacgtgggcaacgtgtgctggttcctggagccgggcctggaccaggaggtgcggcgggtgcaccggctggtcggcaacgccgccgtggacgggtaccacgtcgtcgtcggcaccggctccacgcagctcttcatggccgcgctgtacgcgctgtcgccgcccgcgggagccggcgccggcgctgcgcccatgagcgtggtgtccacggcgccctactactcgtcctaccctgccgtcacggatttcctccggtcggggctcttccgctgggccggcgacgccagctcgttcaggggcgacacctacatcgagctggtgtgctcgccgaacaaccccgacggcgccatccgcgaggccgtcctgtcctccgccggctccggcgtggcggtccacgacctggcgtactactggccgcagtacacagccatcaccaaacgggccgaccacgacgtcatgctcttcaccgtgtccaagagcacaggccacgccgggacgcggatcgggtgggcgctggtgaaggaccgcgacgtcgcgaggaagatggccaagttcatcgagctcaacacgatcggcgtctccaaggactcgcagctgcgcgccgccaaggtcctcagggcggtctccgacgcctacgagctcccggaggcgggagatgcccgccgccgccgcctgttcgactacggccggcgcaagatggtggagcgctggcgcatgctgcgtggagcggccgccgcctccggcatcttcagcctgtccgaggagacctcggccttgtgcaacttcaccaaagagatggcggtcactaaccctgcgttcgcgtggctgcgctgcgacagggaggacgtggaggactgcgcgggcttcctgcgcgcccacaggatactgacgcggagcggggaccagttcggagcggacccgaggtacgtccgggtcagcatgctcgacagggacgacgcctacgacatatttgtgaagcgtctctcgtctctgcgatgaagacggcaggctactcacggtcacggagatgggcctagttggagaggagggtcgatgccacccggccggccggcgtcggcatgccggcccgtcgcccgtcggactgtgggagcatgcatgagtagggcagcagcgttcagtaggaagaagcgcaggaggagcgacgatttgttttgcctttcctgctgtatgttttgcggtgttccggatgtcgcatcgtctcaaaggtttcttttggtttcttgctaattgctacgtgagactgaactgttgtaacaaaaagtcaacataaattggactgacgacgagaaccgcacagctccaaaaaaaaaaaaaaatggtactctgctcgcaacgcaacgcttggcgttctggcttagcgcttttagccttcgcttagtgtacaccttcagtcgact

SEQ ID NO: 1660 - DNA, 6251 bp, Zea mays
gtctgtacccgcttgagctcgggccaagagcgccgatacacgatacggcagccgagcacactcttccccttcctgacctccacttcctagctcggccccggctccgcatctatctatctctcgccctgccgtctccggagaccggagctgctctcacatccccacgcgcgcgccctcgaccccgaccacgtcccccgcccgctcggcgctcgcacagtccttccagattccctcgtccggggagcggcgctgaggtctcgcaccgatgagctcgggggccatcggggcctcggatcctgggggtggcgagacgaagccggtggcgggcggtgacgtcacgacgtcggaagctgcgggcgaggtgcctgctttcgccgccgatgtgaaagtggaggggaaagctacgttggcgacggatgtggatcgtgaagggggagatacggcggtgagcgacccgctctacgcgaacgagtcagctggtatggttggtgccgaaggccacggagatgagcccgcggagggcctggaggcggtgaatggtgaggaggagatgctagaagcaggagctcgtgatctgctcactgagacggagaagaatccggttcttgtggtacatgtgcctgctgctgctgctggtggtggttctgccattcctgaacatgctgaagccgaatctaacaaagttgaagatcatgtaaacgtggagcctgggacaaagaataatgaaagtgataatggcatagctcattttgataaggaaatacagaacaatgtgcctgatgacatagaggaaagctccaaggaacatgaaggtgatggagcacctgtagttgaccagacaaataatgcatctgaaatgctcccacaaaccggagagcagtttcctgatgttgaaaatagcacggacagcaacctagaggctgctagtctgggtagtgtggatcagggtgctagatactgcctgcctcctcatgataaaggcgggtttcaagttgctgatcttgtctggggtaaagtgaaaagtcatccttggtggcctggtgaaatttttgatccatcagatgcatctgaattggctctgaaacatcagaaaaagggcagccacttggtagcttattttggtgacaacacttttgcgtggtgcgatgaatcccagttgaagccttttgtgacaaattattcacaaatggagaaacagagcagttcagatgcctttgttgggtcagttaataatgcacttgaagaactgtcaaggcggatactgtcaggtatgagctgctcttgtttgccagaagagcttgctgataatggcatgtcctatacagttgataatgctgggctcaaggatggagttacttgctctgcagttaatcggcctgaaatcttaaactgtttcagtccagaaaaccttcttcattatattaaggagttagctctatttcctggccaaggaggtgatctgttggagttagttatagcatgttctcaacttacttctttctatcgatctaagggatgtcctgaacttgcatcatttcaaactggcgatgcgtgggttgaggatggtctggattgtacagacactttgtccacccagaatgtaatggttgaggaacctgtgattaatgaagtgcatcctactcaagataagcccaaaaggggcagggggagacctcggaaacaaaaacctggtggtgaccaggtggtgatggagaaaaggagcatatctaatcaggtcaatgatactagctacaatgagaaacaagtgggtatggactttgataactatggcaacctacagaacaagaacaaaagaaactttgaatcatttgaagattcagagaagtcatcagctccaactggtggtagttctttcaagattggtgagtgtattcggcgagctgcaagccagctgacaggatctccgtccattatgaaggctcagaatgctgctgaaggagagaatggggaatttgatatctttagtgatgatgctggtgatgaacttactgtagagaaacgagcaaaaaggagaagtctgcacaggaatcacactgcagatcccaaggaattactatcacagctatgcttggttgcaacagagccaatgaatggatataatttctcagtaatgataatcagttacttcagtgattacagaaactatattgtttctactactactgaagcaaacatcgttgataaaggtacatctaggagagggaggaagagaaaagaagttttaccttctcctgatgtagagacaacagatcatatgcaggactcgtattggtccggattgagcttgcataatcacccaatccatgacctcagaaaagagagtcccactacaaggccaagacgtaggcggagatcctcaagtcatgcatatgtacctttgtcagaacttggggagccagtacctaaaaaacagatacaagtgatggaaagatctatcatccatgttgacgagaagatgattgatgagttgaagcccactgcacttgttttgagctttgccaggtcagcttctattccttcagaattggatcttgttaagatgttcagtcgctttggtccactgaaagaaagggaggcagaagtacacagggaaacaaatactgttaaagttgtcttcaagaaacgtgccgatgctgaaagggcttttagcgctgctggcaagtatggcacttttggaccttcgcttcgaagttaccgtcttgtcagtatgccattttctctagagacacagtcagcaaacaatcctgtgaaacatcctgaaaatcatggcatggagattccaggttcaaatcagtccgaagctcctaaggattccatggaagttgacctggtacagaaaacagatgaagtagaagttgcaggagaaccgtcgtctgaagaagttgagactgtgaggcaaatatctcaagtgcaagctgcagacagtacatttgtcagtcaagacaggtttgatgaagctggaaatattgacgctgagctaattgaccatgttaatcaaattgggaaagctgcacaagctgcatctgtatctgaagagtcacgagatgttgagcaagtttacactcaaaaggaagtgtcagccaatgatctacccacagagacagaaatcttaaattctgatgctataacaaaagagttgcctcagaatgctccagataatgtggaaactgatatagtcgaagatccaaaacagagtcacaattcaagagataatgccgtatttgaagcagtcattgaagcaccgagtactgcacaagatcatacagaggaggatactgggaatgcagttccagaagagcccatggtatctcctgagttacaaagtcaaacccctggtgatctacccacagagacagaaaccttacattctgatgctatattaaaaaagttgcctcagaatgctccagataatatgcaaactgatatagccgaggatccaaaacagagtcacaattcaggagataatgccgtatttgaagcagtcactgaagcaccgagtactgcacaagatcatactgaggatgatactgggaatgaagttccagaagagcacatggtatctcttgagttacaaagtcaaacccctggtgatctacccacagagacagaaaccttacattctgatgctatagtaaaagagttgcctcataatgctccagataatatgcaaactgatatagccgaagatccaaaacagagtcacaatccaggaggtaatgccgtatttgatgcagtcactgaagcaagaagtactacacaagatcatactgaggatgatactgggaatgaagttccagaagaggacatggtatctcttgagttacaaagtcaaacccctggtgatctacccacagagacagaaaccttatattctgatgctatagtaaaagagttgcctcataatgctccagataatctgcaaactgatatagccagagatccaaaacagagtcacaatctaggagataatgctgtatttgaagcagtcactgaagcaccaagtactgcacaagatcatactgaggatgatactgggaatgaagttccagaagagcacatggtatctcctgagttacaaagtcaaacccctggtgatctacccacagagacagaaaccttacattctgatgctatgataaaagagttgcctcagaatgctccaaatagtatgcaaactgacatagctgaagatccaaaacagagtcacaatccaggagataatgccgtatttgaagcagtcactgaagcaccaagtactgcacaagatcatactgaggatgatactggtaataaagttccagaagagcacatggtatctcttgagttacaaagtcaaacccctggtgatccacccacagagacagaaaccttacattctgatgctatagtaaaagagttgcctcataatgctccagataatatgcaaactgatatagcggaagatccaaaacagagtcacaatccaggagatgctgtatttgaagcagtcactgaagcaccaagtactgcacaagatcatactgaggatgatactgggaatgaagttccagaagagcacatggtatctcctgagttacaaagtcaaacccctggtgatctacccacagagacagaaaccttacattctgatgctataatgaaagagttgcctcagattgctccagataatatgcaagttgatatagctgaacatccaaatcagagtcacaattcaggagataatgccgtatttgaagcagtcgctgaagcaccaagtactgcacacgatcatactgaggatgatactgggaatgaagttccagaagaggacatggtatcttctgagttacaaggtcaaacccctggtgagaaactagtggggcaatctgcaactgaacagatggtgggatctgaagatccaaagccgcaagccgaaaattttgttgctgaacctgttgtgctgggtgcagtcgggcaagtagaaattgaactggaatccaaaactactgttgaagtgtcaggcgaacaaggctatagtattgagcagactgttcaagtggaagctctaattgaagcgtcaggtggacaacttgaggtgggaaggcaaattccagaagatgaatctattgcttgtgcaactactgagcactctatggttgtcgatgaaactgtggaggcaaaagtggtactactcgatgagagtatagagaataatgctgctgtcataggagtagtcgaggagactgctgaaggtgaaactaaggaggaagcatcagacgagaagggaaaaatagaaaataatgaagatgctgacaaattagcaccagccgggaaggggaaaatagaaaataatgaaattataattgacgcaccagatgagaaaacagaaaataaagcagatgctgacacaccagctggggagaccaaagaaggtgaaattacagtagaggaaacagatgagaaaatagaatctaaagttactgctgaacctgtaatcggggagacaactgaaggtcaaactgcagctggagaaccagttgaagaagctagaacagctgaggacatggtagaagatgttaaggtgctagatgataaatctacagcagctgagaaacctgtagagaatgccacagttgtggcacatgagaattcgactacagttgagaatactctgaaggatgcgattgtcgcgccaccagatgcaaataccaccaacgccgaaaaaactgctattggtgccacaattgaaacacaaaatgaggacgctccagcggagaggactatagaggatacctcggttgaggcaccagatgtacaagcaggtgcaagtgagtaaaccagcttagcgatcctttgcattcctgtcagtttctgttgatatcgacgtagtttgctcaactgattctcttgtctagatgatgtgttctgtatagaaaacctggaaccactttagcatcataaggctgttaggttttaaataacttgggcatctatattttgccccttatttttcctatataaacttcatctagttgtattcgatgcgcacgtgtgagtttgtcataaacacaattttctcctatatgtcagttcagtgctcaggcgatcagtgactgagtggaagtctttgggctatctacttggatcaaatgattctggtaccatttgtcgtctgtaaccaactgtgttctcgaatccttctaccatattacctagattattttagggctagtttggaaatttaaatcccc

SEQ ID NO: 1661 - DNA, 1543 bp, Zea mays
tgtggcaatctaatttgcaggctttgtagatatgcatatatgtatggatgatagacgcaggcggtgagtgaagtgtggactgaaactagcaaatagaagatctacaccaccactaaagcaagagaacaagcacacacacacagactcacagcaggcctgcagccagcatgcaggcagagtgcgtgatgagtaaagtcagctgaaatatttctctcttttacctttcaacttgctgctgggacgacagcagtacacgctgcattgtaccaccaccaccacaggctgctgctagctgctgagccagctctggtgtgtggtgtgcaacgcattacatactttggtcccccttccatggacacaataatagcaatgtactacgtaggtacacccccggccccggcctccatcgatctgcatctgatccgcgtccagcactgctagcttcctcttccttgctttcatcatgattcatgaactaccactactgctcatgtttgcaatgatatatatgagatggtacgacgatgctgctgttgctgctctgcatatatgcatcatcatgttcatatatatatgctcttcattcctgctagtaccagctggtaggccagcccccttgcattgaaagtttcatttcacagcaatggaaacaagttaataatcagcaaaggtaatccgacttctcagttgtatgtatataccagcagccgattcgtcgtctctcacccttgttggggtacgttggtgtgatgagtgagtgtctgctgatgcagcatcatcaagattctcatctcatcacatatgcatatagctgctgcgagacatcacagagcatgcatgcatcactgaagatgcgtgagagttggatgtgaatcttggtggtgctgcacctgcaagcacccactgtcgatgtttgcttgcctcatgcttaaagcattcattcatgggaatatatatatgaatgtatgcattaacaaaaaaaaagaggaaagagaggagctagctgatgatgcatggttctcgcgcgtacgtgtgtatttttctaactcgttcttactaatacaggccggactgtaccagatctttcaaagcacgagtgaaaagaaatgaaacagctagatgcaaagcatgggtatatatgatatagatgagattgagagagatggcatgggtatatacagagccactacctacatatatatatatgtatcaggaacaagggaggagggatggagacataactagatgcgcagggggggctgcagggcgaatgaatcgatcatagaaacaaattgaagaaccctacaccatatatgcatctctccctctatatatgatctatctgcctttcgacctacaccaactctctctacaagaacaaggggatgtcgttgagaggattggtgttgatctgtctagctacctcctcacctgtatcgatatagagaagattgtgatggacaccacgactcaagagaggagtgagctagctagctgagctgaactgaactgaactgaactgagggagctagctagctagcaa

SEQ ID NO: 1662 - DNA, 1374 bp, Zea mays
gggggtgaggagagataggaaagggcccaacagctcaacagaaaagccaagcaaaggctgctgcatactggaaggccctctgtctgtgtgcgagcgcaagagaaagggagtcagagagagagagagagggaggagaccttgcagaggagcgaagcaagcaaggtgggaaagaggcagcagcaagggcggcgggctgccggaaggggaacatgctccctcctcatctcacagagaatggcgcggtgatgattcagtttggccatcagatgcctgattacgactccccggctacccagtcaaccagtgagacgagccatcaagaagcgtctggaatgagcgaagggagcctcaacgagcataataatgaccattcaggcaaccttgatgggtactcgaagagtgacgaaaacaagatgatgtcagcgttatccctgggcaatccggaaacagcttacgcacataatccgaagcctgaccgtactcagtccttcgccatatcatacccatatgccgatccatactacggtggcgcggtggcagcagcttatggcccgcatgctatcatgcaccctcagctggttggcatggttccgtcctctcgagtgccactgccgatcgagccagccgctgaagagcccatctatgtcaacgcgaagcagtaccacgctattctccggaggagacagctccgtgcaaagctagaggcggaaaacaagctcgtgaaaagccgcaaggtactcactccctcgccgcacttgatagccgtaagcacctctcacactcggagccgtaacagtctctccctctctgtctgtgtgtgtgtgttgtgtgcagccgtacctccacgagtctcggcacctgcacgcgatgaagagagctcggggaacaggcgggcggttcctgaacacgaagcagcagccggagtcccccggcagcggcggctcctcggacgcgcaacgcgtgcccgcgaccgcgagcggcggcctgttcacgaagcatgagcacagcctgccgcccggcggtcgccaccactatcacgcgagagggggcggtgagtagggagccccgacactggcaactcatccttggcttatcagcgattcgactcggctctccctcgtctgaaactgaactctctgcaactactgtaactgtaactaaactgggtgtgcccggattggcggtcgttctgttctactactagtacctgctacgcgtcgttgggttgggtctggactagagagcgtgctggttctttgatgaacttggctggacttgagggtgttgactagcgcgaagctgagttccatgtaaaacttttgcttcaagaccgatgactggcggcataataagtagcagtaataaccattcttc

SEQ ID NO: 1663 - DNA, 1814 bp, Zea mays
cgagaacgacgagccagggtagcactcgccttatccacccgtcctgttcctgaacaccgtcacacacgggtactagtagtactaccatatcatgtgacgtgcatgcggctgtgatgcacaccaacccagccatggccaaggcagctcctcctctcctcgccgccggcagccgcactgccatcacagcgcagcagccatcgtcgaggaaaggcgccgctggcaccggtttgttctgcagtcgcgccatcgtcagcaagcgcaccagggtaacagcgaagctcggagacggagagctgaagcctgcaggcaagcggaagttcatcaccaaggaagaggagccagaacagtactggcagaccgcgggggagagggagggggagaaccccatgatgacacccctgccctacatcatcatcttcggcatgtccacccccttcgtcatcctcgccatcgccttcgccaatggctggatcaaggtccctgtgcgatgaccgtaacgcgatcagccagcctggatcatagatgctgactcgtcagcctgcatctcatccagcgtgtgtcctgcgactttgtaccttcatatatagagacaagagttcttgcgtgtgagcataattgcatgatcgcgtggtgtatgtaacccgaaactgtttaccttttcgcaacaacttcaatcttcactcttcaggctgtgttccgattcagtgccctggtatcaatcttcagttattcgcacaagagaagatttgtaccatctgcagttgtagaatcataacagccagaaccacaacttggttttttggtagacctcacaataggtcctgctacaatcacccccccccccccccccacccccaaaaaaaagggtcttgtataacaatggcatattcgtacattaattaatgtgtagccaatgctgtcaatgaatcgatcaatctgcggctagcgtaacaaaaggttcagacggtaacatgacatgggtgcaaaggcgaaaaccacatgtttatgaatcgattcaaaacatatgagcagaaattttcgcatgtgctcaggatcgcatatcatcagacattacatactagttacgcaacagcaacttgtttccatatatttttccaatgtaaatagcaaatgcaacgacacacgcgcacaaccgagaattaagagtatttacgcgacatggagaacagtagagctccgataaattacaccacaagaaacccttttgctttgcttcatctattagtcaaccataagtatctgttattggcgaataacacctcgcaccagtgctacagcgtaatcaaccttcaggtaaacgcacgctgcatcgtttgccggtcatctagttggttttctgtcgaattcagattcatggcagtgcggatcgagccaatcacgaggagagctcttaggcaggctggtaccacctctagcacccatcagctcccttaggttctccaccttgttctcctgagcattgccggggaatttcctatctgcttccttcagcttgttccggaaccgctgcttgcggccaacggtgttcagctcctgctgctttgcttgagatggtggagctccatgaggtcccagatatattttctcatcgtttgcctgctcaagcatgaatatcatctccatgaagcaatggacaccaatggaccagtagtccataaaggtctttttttttaaaaaaaaaagggggagggggcatatgacagacaagtaaatctgcggagaaagagttcagaaaagaattccgaaatgtacctgtagaggctcaggatctttttctttggggacactaggct

SEQ ID NO: 1664 - DNA, 2368 bp, Zea mays
cacgtgtcccatgaggctgcccgctgccgctgccggaaacccgtccgggtgcgatgaacctggcctcccgcccgacctatatgtaaaccacccgcccgcttccaccccacgccacagaaaaaacgcaggtgtcgaaacacattttcttgctccagagaatttaaaccgctgcgaattcaattcgaaagccccaagagagcatccatggcttccgctaccacctccatctcgtcgcaccccgccgccctccgcgacgtcaaaggtgacatgttttctttgttctggatgctctttcctttgtataatttttgctcggatccgacgtttcagctagtgaaatgcgctgctccgcaacaaaattcaccggaattcgaagcgcataccggcctaactcttctcatctctctcccttctgttcgcgcagctgcgaggattggcgggctgaggcagcagcaggcgagcgtggccccgtcggcggcggcagcgcgtggccagcgcgctcgggcggtgcgatcgctgcgcgcggcggagcctgcgaggcagccggtggcggcttccgcggccgcggcggcgccggccgcgcccgtggccgacgaggcggcggcccttgcggccgtggactacgaggccctggcgcgtgagctggagggcgcgtcgccgctggagatcatggatcgggcgctggccatgttcggctccgaaatcgccatcgccttcagcggcgcggaggacgtggcgctgatcgagtacgccaagctgacggggcgtccgttccgggtgttcagcctggacacggggcgtctgaacccggagacgtaccagctattcgacaaggtggagaagcactacggcatccgcatcgagtacatgttcccggacgcgagcgaggtgcaggagctggtgcgcaccaagggcctcttctccttctacgaggacggccaccaggagtgctgccgggtgcgcaaggtgcggcccctgcgcagggcgctcaaggggctcagggcgtggatcaccggccagaggaaggaccagtcccccggcaccagggccagcatcccccttgtccaggttgatccttccttcgaaggcctggatggcggggctggtagcttggtcaagtggaaccccgtggccaacgtcgacggcaaggacatctggactttcctgcggaccatggacgtacctgtcaacaccctgcatgctcagggctacgtgtccatcgggtgcgagccgtgcaccaggcccgtcctgccggggcagcacgagcgtgaaggccggtggtggtgggaggacgccaaggccaaggagtgcggcctccacaagggcaacatcgacaaggacgcccaggcggcggcccccaggtccgccaacggcaacggctcggcgggcgccccggacatcttcgagagccccgccgtggtgtccctcacccgcaccgggatcgagaacctgctgcgcctggagaaccgcgccgagccgtggctcgtggtgctgtacgcgccctggtgcccgttctgccaggccatggaggcctcctacgtggagctggccgagaagctggcggggtccggggtgaaggtggccaagttccgcgcggacggcgagcagaagccgttcgcgcaggccgagctgcagctgcagagctttcccaccgtgctcctgttcccgggccgcaccgccaggcccatcaagtacccgtcggagaagagggacgtcgactcgctcctcgccttcgtcaacagcctccggtgagagacgacctccagtgagcgagaaccatcgttctctgtcagtctgtatgatcttatgttggtctttatgagtttatctaggttcgtagagaagggaggtggaggggactgggtttggtagtgacacaggaaggaacgagggttcaggggggaaaaatcaggtgtagcttttgtaactgcaaaatgattgcagcatgtatacctgaagtctgagcttctgaggccctgtgcttggtagctgagggagaggttacttgtgtgtgcttatagtcagtggcgagtgcctactataaggttcaccggtcatctaaagcactgttgtaaactgtattatttggagagtggagttttaatataggcataagaatgggtaagtcgctggagatagtctaagaaaaatcaaataagagaccaagatttgagagttttcgtttgtttataggttggttgtcaactatatagactgtagaaatcggagggtttgcatattgttagaccccgtttatttagtgctaaagtttagcataacatttttcactaaagtttaccacatatagaactaaacatgtatattaaaaagacagtgctaaagtttagcgtccattagtacattagac

SEQ ID NO: 1665 - DNA, 3042 bp, Zea mays
gcacaaaaccaggctactcgcatataaagcaggagcaggcgagcagcagttgctcagacaggcccactaccattcagcgagagcgagagagaccacccatcgtctcatcgtcttcgccttcgcttaatcggatttattagggatcatcatcagggatgagagccgggggctgcacggtgcagcaggcgctgtcgccggaggccgcggtggtggtgaagcaggccgtgagcctggcgcggcgccgcgggaacgcgcaggtgacgccgctgcacgtggccagcgccatgctgcagcagcaggcgccgacggggctgctgcgcgccgcgtgcctgcagtcgcactcgcacccgctgcagtgcaaggccctggagctctgcttcaacgtcgcgctcaaccgcctgccggcctcggcctcgccgctcctcggcggccacggccacgtctactacccgccgtcgctctccaacgcgctcgtcgccgcattcaagcgcgcgcaggcgcaccagcgccggggctccgtcgacacgcagcagcagcagcagccgcccgtgctcgccgtcaagatcgagctggagcagctcgtcatctccatcctcgatgaccccagcatcagccgcgtcatgcgcgaggccggcttctccagcacccatgtcaaggccaacgtcgagcaggcagtctcttccatcgaggcaaacaactcggcctccgccgccgcaaccaaaaaccctaaccctagcgcatctccacccgaagagaccaagcctgcaggcaagctgctgctacccctcgatcaagcgcgcgacgaggacgtcgccgtcgtcctggactgcctggcgtcccgaagcaagaagcgcgtcatggtcgtcgccgagtgcgcggcctcggccgaggcgccggtgctggcggcggtcgagaggatcaagcgcggcgaggccctgcgcggcgcgcaggtggtcagcgtcagcgtgtccaggttccgcgacctgccgagggacgaggcggagagggtgctcgtggagctccggtgcgcggtgaaggcgggcggcagggcgggcggcgtggtgctggtcgtggaggacctcgggtgggcggccgagttctgggccgggcgcggagagtccgggagggccaggtggccgtctgcctgctgctactactgcgccgtcgagcacgccgtcgccgaggtgcgcgccctggcgtgccgcggcggcgacggcgtctggctcgttggatacgggtcgtaccagagctacatgaggtgcagggccgggcagccctcgctggagactctctggggcctccagacgctcgccgtccccgctggcagcctcgccttcagcctcaacttcgtcggcgacagtgcaactgcaatgacaatcaatcaccagtcgatcagctgcaagatggcaaagtgcgacgacgacagaagtgggaacgggtcggcggcgccacgttgcctgtcgcttttggacgccggcggttccggccgcttgacggccgtttcgagcttctgcgccgccgactgctccgcaaccaagtgcgacgcgacggtgaagtcgagtatccccccttggcttcagcattgccgggatcatcaggagccttcccgttgtaagaaaagctcgacatgcggcggctcgccgtctcatcatcaccggacggccctaaacttctccacggtggtgtcgccgtcctcctcggtctcgtcgtacgagcagcactaccacctgcggcaccagtcgtaccagccatggcttctcgtggctgacggcgcccgcgaggccgagcacccgtgtaacaaggccaggtgctctgccgccgtccagctacacgtcgtggacgacgaggacgggaagcctctaagcgcgataaaggtcaagtcccacgactcgagcgcgtccaatggctccgtggagtgccgctcgcggttcaaggagctgagcgccgagaaccttaaggtcctctgctccgcgctcgagaaagaggtgccgtggcaggcggagatcgtgcctgagatcgcgagcacggtcctgcagtgccgttccggcatggcgaggaggcgcgaagccgctgtttcgagctcgagaccgtcgtcaacacaggcgtgtgccaaggaggacacgtggatgctcttccacggtggcgacgccgagggcaaggcgagggtggccagggagctggcccgcctcgtcttcggctcgcgcaagagcttcgtatccatcggcggcagccgcaccaccgcgtcgtctccggcttgttggtccgacggctcttccgagcagcagcgcaagcggcctcggttgacggaggcgagcaaccacggctgtcgtcacgagagcctctacgaggccgtacgcgacaacccgcaccgcgtcatcctggtacaggacgtcgagcagggtggctgctggcggtgccagagggacattttggaggccatccaaagcggcttggtccggagccgtgccggcgacgacgacgcagcactcggcgacgccatcgtcgttctgagctgccagagccttgacgcgtggtcgacaaccacctcgccactaacgaccaagaaggcgaaggcggagagcaaggaggagccggaagaggaagagagcgcaggtgaccaccgccgcaaagaagccataactgctgccgctgcgtcgccgtcatcttcactttgctttgatctgaacatggacgttgagaaccacgacacggagagttgcttcacagatgctagtctgctcaaggcagtggatcgaacgttcttcttcagacgacctgatgagagtagcgattagcttagtgacaaatgacctatctctcttttgttcttctctgtaacattggtcagtttcttgtagtttgttcctaagatgtttgtgttggaagaatggagcgtgcatgtggtactcttctggattgaacctgcgtggaaattaattaaaggcaagtttggatgagctaaaagagaaaaggttaattgctgtattggctaaaattagtcatccattccgacagtgggtagtctcaagatttctcttaaaa

SEQ ID NO: 1666 - DNA, 1609 bp, Zea mays
cccctagaaattctaaatggatgaattgaactgtcaagaaataaattgtcgaacaatatgtacagtaccgtcaaaaaacagcaagtataagtaaacctgggcggtacgttctcaaatctttaaccttgataacaaatcagttccatcagcatcgccatgacccatgattgaagcacactaaccaatgagttccacatctccacagccacgagccataacggatcaattccccatcagcgtagccacgattgaagcgcgccatgatctcggttgatgaatagtggaatccatcatactgcagttttgcaaccttctctacacacgtccgccaattgctatggttcttacatgctaccagtcttccaattgaccagtttggtaaaacattacaaatgaaaaatgcttagacgtagatacatatggatatcttcaacattagtccagactgcaatatagtctagactgaactttagacgctgtgaccaattttctaacattgggtcttcacgtgtttaaccgagcctgcatgttacatttgtgtaatctgggatctagaattttttcacacttcagtctcgttttgcgattagtagattctcggttcatttgcgttctcaattattatatagaatattgaatatcgagctgggtgtagcggacgtcaacggtattaacgtgcgtttcaggatcttcagttcgattggtgtcaggatttcttcgatttattatgcaagcacagaatataaaacgttgctcgtaatagaaggagcgcagaacgacttaaaaattgtttgaacataattaccgattgtaccttgggaatcgcgtcgtagctccatgtttttgttgtagatctccgtgctcgatgcaaaaatccggcgtgcgcagcgaaccaacaggagcggaagcaacggatacaggaacacagaacaagatgagggaggagaacccggggccaaaaacatcaacccccgtgcgatctcctcccccggcacacaataatcatctttttattaatacctggcctgccatgcgagcgcacccatcatggcaaaggcctcctctaggatgtcacatctttttttctcttttttttgctgtcgacgcacgcagacttttacatgctgcagcttacctcgcctcttccaggcggcatatctcatagatctactaataattatcgaaattgatccaataattatcagcgcagagacatcatccatcgagttggagcaggactgcagaccaagagatcccgccgcctccagccatcgtcgcctcagatccgctccgaaccgaacgacgacgacgacttagaaatttctccagatctggaaccagaagcagaacatgcgatgctcgaccaccaaaacaaaacaacaagaaccttgcaggcaaggactaaccgatacaggatccaacgcgggtttgccgaatccagcaatcagatatgagcctgcacaacatgaagcaaacggatttcctgataaatcgaaacaaagtagctcaccgagagcactcggggaggcaaggtatcaaggaggacggccatcctggatctggaggacgagatgaggttgcgtgcaggaggggaacgcgtccaacaatg

SEQ ID NO: 1667 - DNA, 1820 bp, Zea mays
ttttttttttttttttttttttttttttttttttttttttttttttttttttttttttttttttttttttttttttttttttttttttttttttttttttttttttttttaaaatgaaaatagaataggttactttgaaacaaaaagcagcacgatcgattacaaaaggcagcatgaaattgacctccaggtgaactcatgctctcgtgcccctagaaattctaaatggatgaattgaactgtcaagaaataaattgtcgaacaatatgtacagtaccgtcaaaaaacagcaagtataagtaaacctgggcggtacgttctcaaatctttaaccttgataacaaatcagttccatcagcatcgccatgacccatgattgaagcacactaaccaatgagttccacatctccacagccacgagccataacggatcaattccccatcagcgtagccacgattgaagcgcgccatgatctcggttgatgaatagtggaatccatcatactgcagttttgcattctctacacacgtccaccaattgctaacagacttacaagaaacaaatatcccaattgaccaacatggtaaatacaaatgaaaaatgcttagacgtagatacatatggagatcttcaacattagtccagactgaaatataatatagaatgaaattaaaacgctgtgacctttccaaaataggagattcacgtgttgaacagaaccagcatgtaaatttgtgtagctgcgacctaaatttttgcacacttcagactcgtggagcgattagtaactctcagttcattggagttctcaattattattacaagactgaaaatcgagctgggtgaagcggacgtcaacggtattaacgtgcgtttcaggatcttcagttcgattggtgtcaggatttcttcgatttattatgcaagcacagaatataaaacgttgctcgtaatagaaggagcgcagaacgacttaaaaattgtttgaacataattaccgattgtaccttgggaatcgcgtcgtagctccatgtttttgttgtagatctccgtgctcgatgcaaaaatccggcgtgcgcagcgaaccaacaggagcggaagcaacggatacaggaacacagaacaagatgagggaggagaacccggggccaaaaacatcaacccccgtgcgatctcctcccccggcacacaataatcatctttttattaatacctggcctgccatgcgagcgcacccatcatggcaaaggcctcctctaggatgtcacatctttttttctcttttttttgctgtcgacgcacgcagacttttacatgctgcagcttacctcgcctcttccaggcggcatatctcatagatctactaataattatcgaaattgatccaataattatcagcgcagagacatcatccatcgagttggagcaggactgcagaccaagagatcccgccgcctccagccatcgtcgcctcagatccgctccgaaccgaacgacgacgacgacttagaaatttctccagatctggaaccagaagcagaacatgcgatgctcgaccaccaaaacaaaacaacatgaaccttgcaggcaaggactaaccgatacaggatccaacgcgggttgctctattcaagcccgtaagatgccgaatccagcaatcagatctgagcctgcataacatgaagcaaacggatttcctgataaatcaaaacaaagtagctcaccgagagcactcggcgaggcaaggtatcaaggaggacggccatccaggatctggaggacgagatgaggttgcgtgcaggaggggaacgcgtccaac

SEQ ID NO: 1668 - DNA, 2321 bp, Zea mays
atgaaatttaaaagtgaaacgaattctccgagaataaccggtgaccgggataagggttcgtatctggctcggtctctgccatctccaacctcgagagcccaccaaacccaaagcccaggcctctccgtccccaatcccccatccggcttgccccccatgtcgtcgcagtgcccctactgccgcgcgtcggggccggcgcggtgcgcgacgacgcagccgccgctctcgcgcgccgtctccgagtgctccgcctgcgcccgaatcgtcctcgagcgccacctccacacgcaccccttcttccccctcctcccctcactccatccgctcccccttgtcacccccgacctcgccacagccatcgatcccgccccgtctccttcccccggcgacgaagatgacgaggacccctttctccccgcgggcttcgtctccgccttctcggctttctccctcgagcgccaccccgtcctcgcccgctccgcctccaccttctctggacacctcgccgagctcgagcgcgcgctcgctgtcgactccgccaccgcggcctccaacccggaccccgccggccccatggtctccgtcgacagcctccgcgcctacctccagatcgtcgacgtcgcctccatactcaggctcgacagggacatagcggatcacgctttcgagctcttcaaggattgctcgtccgcgacttgcctcaggaatcggagcgtcgaggcgctcgcgaccgccgcgctcgtgcaggctatccgcgaggcgcagcaaccacggacgctgcaggaaatctctactgctagcaatcttcctcaaaaggagataggaaaatacatcaaaatactcggcgaatctctgaaactgagtcaaccacttaacagcaactcaatagctgttcatatgcccagattttgcagcttgctccagctgaataaatctgctcaggaacttgcagctcatattggtgaggtggttgttaataagtgcttctgcacacggcggaatcccataagtatatctgctgctgctatctaccttgcatgtcagcttgaagacaaacgcaaaactcaggcagagatctgtaaggttacgggcctcacggaggtcacactacgcaaagtgtacaaagaactgttggagaattgggatgatttgctcccccctgactatacacctgccacaccaccagagaaagcttttcccatgaccaacatttactcagggcgctcagcgagtggcaaggatatgtatcaggataagatattcgagagtattaagcaaaaatgccctgagcctgcagagcctgaccacatggtcgtggtgaaagaagagggagacaagaaaacagctgctcttggccgtccgcctacaaaacttgaccatcctgagttaggcaaggtgttccggccaccaaatgcccctttctcaacatctcctaaatctgatcgtgacaaaacggaaactagcttacgtggattcaaccttaatgaggtatcatgtgcaatggactctgatagaacagacatcacagtgaaaccaacttttggtgatcgattgtcaaatgatcccaatgcgaatccatctcccaacaggcagcctttaccctggcagcttaagcaaggggcgcctgcaactgctccatcatattcaaggcttcgcgagcagcagtcgggcctggatcttgtagctgctctgaagggggttgggaaaaggagtcctggggatagtgatgtccgggataaagaagggaagtgaataattggtgctttgtagatggggaacgactattaagtgttaaatttgcaactatggtcggatcacgatccaaagttccagaggactcgcacacctaagtcttgcttgcacaacgttgttgctttgtagatgtatgtctgtagtagagttagtttagccacctctatggctcaatcactctgtatttcttttgcctcatgccggggctgtgaaatgtcatttcaggcgcattagcttctgttgtaaaattttactagtgtttatgaattatttatctgactaaagaggtgtttactttttaggaactaatttttaatctttccattttattccattttaatccctacattgttaaacactgaaactaatactttattttagtttttgtatttggcacttatggactaaaatgaaataaaatagaaagactaaaaattagtctctaaaagttattccttccatttctttttagttgtcgctagatagttcaattttgcactatttagcgacaactaaaacgaaacggatggagtcaccatgtttcgtgcaatgaaatgcagttccttcta

SEQ ID NO: 1669 - DNA, 717 bp, Zea mays
ttatagacagtgttgtgcgcagcaacactataaagctttctgtgtgccgtgggcccgtggctttagtctgcccgctactatgggcgcgtaactcaccaactctatataaacttccgccgtggcaaaaatatctatctactcgaggcgaggctccgtgcctccgtcgtactcggcttgcacagcaaggtaaagcaagagcgctactggctgtctctctctctctctccctctcttctctctcccccccaagcacacgcacacatggcggacaccaaccagaatcgcgagcagaccttgatcgccggcgcgggcctcggcctggtcgccgtccactcgggcctcaccgtctaccgcgcaatgggtgacaagcaggcggccgtcctcttcgtcgcttggtcgtgcctcaccctggtccttgtgttcgtctgcctcctcgcctatgagcgggcggcccccggttcgccggccagggagcgggcgagccgagccatatggccgcccaccacgctgctcacgctctccttcgcctggaaggtgaccgcggacatgcctccggattcagccgcggcggccgccctcgtctggggcttagccatagccaccaccgccggcggtttcgttgctctctctgtacgtgcaggcccctgaagtgaagacatggacgacggcctagcaagatgcatgtgttcgttcagttctctgggctctcggcgtcgg

SEQ ID NO: 1670 - DNA, 1902 bp, Zea mays
atggatgatgatgagataggaccaaaagaactccagaggaggattaaagatgagcataaggtgaacatttcatacaaaagagtgtattatggtaaggacctagcactaaagcagctgcatggtgattggtatgaaagcttcaacaatctgtacagattcaaagcagctgtagaggaggctagccctggtagttttgtggtgatagatcatgaagtaataaatgagaagaccagatttaagagggccttctttgcccttaaggcttgtgtagatggctttttgaatggatgcagaccatacttggcaatagatagcacttttttaactggaaagtttaggggccagctagcagtagcatgtgcagttgatggacataattggctatttccagtatcttttggtgtgtttgatttagaaaccattgaaaactggtcctggttcatggagaggctaaaagatgcaataggcacaccaccaggcttagctatatgcactgatgcagggaagtcaattatggagagtgttacagttgttttccctagtgcagaacatagagagtgcatggttcatttagtgaataatttcaaaaaaagttatcgtggaaaggtattcgatgacaacttgtggccagcagcatatgcatggaatccatattactttgacaagcattggaaagctatggctgaggccaaaccagcagctgtgaagtatttgagagacaaccacaacaagatttggactaggagccaattctcaactttgagtaaagtggactatgtgacaaacaatcttgcagagagttgtaacaattgggtcaagggacacaagggcatgcatttggactctttgttggatacactaaggcaaaaaataatggccaagtttcacaaaagaaggaaactaggagagaaaatgcaagggaagatcttagaacacattgttaagaatcttgcagagaggagtaggaatctaaacatggatgtaactggaagctctaatgacataggagaggtttcatggagaggtggctctggttacaggtatgcagtcaacctaaaggagaggacttgcacctgtagggagtggcagatatctggcaagccttgtctgcatgcaatagctatgatcacttcaattagaaatgagaagttagaggactatgtggatatgtacttctcagttgaaaagtttagaaaagcttatgagggtataatccctgccttgccagacaagactcaatggcctgagtctactcatggttttttcatgcatcctccattgctcaagtctacggctggtagaaggcagacaaagagattcaagggctctagtgagggtacaagtggtagaaaaggcagacacagatgtccaatttgcaagcagctagggcatcactggtacacatgcaaagagggtgatccaaatgatattgctgaaatgcttgctgccagaggtaaaccaaagccaaggaagaggaagcccaaggaacctactactgaggcaagcggagtagatgcctctaccgcatctggacttgccacagtcaagatggtgttcccacctgagacaaatagtgagcttgctattgttcctgccaagaaaaggaagaaaaatccagcagcaactacctctaatgggataaggatgtcaggatctggttcgaaccaagttgttgttgctccacttgctattgtcctcccttctgaagtacaatcaaaggagattaaacagagcaaggccaaagagaagaagaagaacatcaagaacaagatggacaaaaagaagacaatacatgttcctcaacatagtcctgcaaactgcacaaggagcaagggacagggccagccaacacctgacagcccagcaatgagtactaggagcaagagaaagcttcagatttga

SEQ ID NO: 1671 - DNA, 2652 bp, Zea mays
gtgcacgagctgacatatatacccccacggggccgtcgccgccgcagtcgcctcaacccgctcggtttctttgcctcctccgtggcaatcggagagcactcgccctcgcactcgcccaactcatggtggattgacggcatggagggaggcgaggctggaggcttgagattcctcctccggttcgacccggcaaggcccgggctcgaccgcgcgctgctcggcttctccttctccgccctcttcagccgcctcgtcgttggatggagcaagcatggccagacgggaggaggaggaggaggagggtttccggcgatcgcggcggagggtgagggtggggagggctccgggaacgccgccgtgtccgtggccgcgcttgccgccgccgccgccgccgcttctctctgcctcgcggcgatgtacgcgtccgatcagcggcggcctcgccatgctcgcgctcgacggctgccggcgctggcttcagctccgcggtcccgtgcgctgcatgctcctcatgatgggctcaggattctgtcgtcagacgacccaaacgacgaatctccggacaaggtgatccacggcgcgtcgatcggcgccggagacgacgagccggatatcgtcgcgcgagtggagatggacgctaccccgccggcagttcccgtgccaaatgccgacgacgacgacgacgacgacgaaaccgaaacggaagcagaggaggaggaagaagaagaggagcggcaggagctccagcggctgagggagctgtggctgtcgctggaggagcgggagcagaggctggagctccgcctgcaggagctggagggcctccggtcgcaggaggccgccgcgcgggagctcgaggcccgcgtcgccgccgccgacgcggaggtgcggatcctgcagctcagtgtctccgcgctgcaggaggagaacgggaggctcagggcgcgggcggaggacctggacgccgcccgcgctgagctggcgcgcgccaaggagaagctgcgcgcggtcaaggcgcgcgtgcagggcgagcaggaggcggcggcggcggcgctccggaggaaggtggaggagctcgagagcggcgggcgggagagggtcggcgcgctggtggcggaggtcgcggagctgcgcaaggcgaacgccgcgctggaggcggacaatatggagctcgccctcaggctgcaggacgcagagcagcaggctgcatccggcgcctctgctagtaatctggcccctgaggagggcatgattcaggagatgacgtacctgagggagagcaacgagcgactgacgaggcagatcgagcaactgcacaacgaccactgcgcgcacgtcgaggagctcgtctacctcaagtgggtcaacgcctgcctccgccatgagctccgtgaccatgacggccagcccaccgccgagcaacaaggccccagcgccggctccagagacctgtcggccctggagctgagcaagagcatgagcttccggtccagcgagagggccaagcagctcatgctgaggtacggtagccccggcctggaccgcttcgaccctgccctcttctccccgctgcacgagtcagtcgacggcgacggctacggctacgagcggtcgccggcgcacagctacgagcccgagcggagcccttgcgctaggcccgcgacggcgacggcctcgtcctcccccgccgcagcaccggggaagaaagcggggccgcgcaggctcaagcttctcggtaacatcaagaagctgctgccggcggtcggcaagagaagccactcaaaccacgggcacgggcacgccggccacgatggcaggaaggcgccggcgccggctccggctcggagggacgagtacctcgacaaggccatgcagtggctgtcggcccacgacgtgctcgacggcgaccactcgtacgtgagcacgccgctgtcgtcgtgcgagaggacgccgctgagcagcgccacgaccagcacgaccgcggactcacgcgcccgctgcggcgacggtggtggtggccgcagcgagcgcggggaggcgacgcggccggaggcggagccgaccttggcgagatcgaagagcgacgccggcggagcgtacgggcgggaggcgagcaggtaccacgcgctcagacctgaacacccgggcagagaggcggacgagcccgacgggttccgtgcgccggagaagcgggaggcaaggaggcagtcggcggaggagctgaggactccggcggtggcgtagtacttgatggccccattgcagttaacggattaattgacaggaacgactgttagtctgttatgcagtgatgcacaaggctgtttttttttttgtgtgtgtgtgtgtgaatatttgtactcatgtatggttaggggcagatctagctgtaggacggatggagcttgattagcccacccctactgcctctcaaacaaaagccctccttgaaccccctccgtagctttttattaggaagaagaaagaagaataatggagagaaagagagaggaaggaaggagtccctgctaggttcatgctctgcgtccgtacccatgtatgggtgaatcaagatacagagtttaattccctttgtattatcatcaagcttttcacaaatcctggtaattcaagagctcaggagacgatggc

SEQ ID NO: 1672 - DNA, 976 bp, Zea mays
tcaacttcaatgcataatggtagatatgggatccttgtcaaccatgtgctttcctggaccagtttagtttgaaatatttgaaagtagttaagcacagttttctggttaattttacgtaaagggaatacgatggtccttgcaatgctgtattgatggctgcattgatgctatctgaatatttcattggccgaactttttttttagtgtggtatgcatttggaagctaacaactagaatgtctacattaataaggtatgtctttctttaaaagctaacaactagatgagatatagaaggattatggataagcttctagacaactatacatttgttattaggtactgaaagctcttttactttcctgtagttgtcaggtgatatccacgaagaggtggagactcataacagaatgctagaccgaatggggagcgacatggatacatcaaggggctttctctctggcaccgtgggcaaattcaagacggtgttcgagaccaaatctactggtttactacttgaccaggtagaatcatccacggtgaaagttttgtggggctgggcgtgttcaagaacattctgaaaatggacgtgctgatctggtggtgccgtgccgcgtatatatatactcatgagtagcagagtatgctgatgtgggttccgtgaacaccgcagcgtgttgggtcgaacctctctctgctacaggaaattgttgtccgttcctttggcatgatatgtgtgtatggagggagtatgtacatgtggtattaccgtactagtaaggtcctctttagaagcaattattttttagctaagagagattagcttcttagtttttaacaaactaataatttaattcttataaactaaggtatataccggtatgtttggaatcacttcaatttctataaaacagttttttaaaaaaactgggtgcatctaaacatgtagtacgtggaatctcgaccacagagatgta

SEQ ID NO: 1673 - DNA, 2240 bp, Zea mays
gtctgggatcacggcgggttaaagaaaatattagtttattttctctacgatcccctctcacttcaatcccaacgtgatcctaataagtgttgagaactgtttgatgataagggaaagcccttttgaagtgggttgttcagctcaaagacttcagccaacaggtcaccgcttcagagatcggaatcagaacacctgccgctcttcagtttgttgacgcaactcctctcctatcttctatctccctcgctccctcctcggcgtcgcgttggcaccgagccctcccgccatggcaaggccgctgcaggaagcgatcgataccttcatcagcatcacgggggcggacgaggccgtcgccgtacgcaagctcgaggaacatggtggtgaccttaatcgagcaataaattcgcatttcaatgatggagacagcatattgaatgggatcagtcaaaacaccatgcccactagtcatgatgatatgatggacctggatggaccccttgataatacatttcaaagatctttgttcccagagaattttcgtgacccttttgctctaatggatccaaattttcagcaccaattttttgacagggttggctccactgatggtgtcactcgtggaccgctagtttcacaccctagagaggtgagggagattcctatagaagttaaggatagtgatcctcaaacaagtccatctggccaggcccctgttattgaggatgttactggacatgagtcttcaaatggccttgaagttcatgaaactatcataattgatgatgaggacagcggattgttatctgcgccatctgctccacatgctagtgttcctagcaatacatcttctgagcccactgctcctccactggttcatgttaatgactatgatgatgacatagaagaggaaatgattagggcagcaattgaagcttcaaagaaggattctgaaggactggcaaatatagcagagcaaggagaccagcatcaagagggagtgaatttgggggaacattcttctgataaagcagtcatgagaaccacagatggaatagttgagaggcaagtactagcttcaggaaaggctggaacatctaggcaaccaatagatgaagagagcttccaagaggagactgaagatgtagaagaacaaccgctagttagacgtcgttctcggcgtgccccctctgagaacaccgagctagcacaaatgccgcacccaggagctagccctgttctgaacaatcaccagtctagtggaggtgatttcccatctgagtggggtggcatttcttctgaggaacatgatgaagctgttatgcttgaggctgcaatgttcggcggagtttttggaagaccaatgcatcctttctccatgccttctcacagaagctctacttattatccccaaataactcattcttcatcaccagcattagctgaacagcggttattaagagagcagcaggacgatgagtaccttgcgtcactacaagctgatcaagaaaaagagttgaaggccttacaggatgctgagctccatcgcctagaagaaacaactacaagagaagttgctcttaagaaacagaagcaagagcaggaggaaaggcgtaaaaagcaacttgaggaagaggagctagagtccagtctcgcttccaagcaagcatcattaccatcagaaccgcctccagacgcagagggtgccgtgacagttgtagtccgcatgcctgatggcagtcgacaggggcgttgctttctcaaaactgataaacttaagttcctatttgatttcttagacattgggaggatttgcaagccagggacctacagattggtgaggacatacccgaggcgcacgtttacgagcagtgagggggacgtatcgttcagtgatcttggcttaacaagcaagcaggaagccctatttctagaacagatcacagagtagaggataagtgtttaggcagcatggttatagacaccacagctggagccggagaattttttttacattttatacttgcagcttttgctagtaaaaactcggtctgtgaaaatggttgggttggtcgaagaaaggcgtcacgttacctatacaatgtggacagctacgcatggccgttcattcgcacgagtctcagagtggctctgtacatactgtcggttctgtgaatcaaagcaatgttgcgtatatataagcaaactgcgcagcaacgggagatgatgcgaaacggccgtca

SEQ ID NO: 1674 - DNA, 555 bp, Zea mays
atgctccagaacggggacttcgaggagggcccgtacatgttccccggcgtgccgtgggggggtgctggtgctgtgccgccggtggacgaggacgactactcgccgctgcctccgtggatggtcctgtcggcgaccaagtccgtcaagtacctggacgcggcgcaccacgccgtgccacgcggcgcgcacgccgtggagctgctgtccggcacggaggccgcgttggcgcaggacgtcgccaccgtggccggacgtccgtacaggctcgagttctccgccggggacggatgcgtgggctcgctgtccgtgcgggcctacgcggcgcgcggcagcgtgacggtgccgcacgcgtcgcggggcaagggcgggcacaggcgcggcgtgctcgacttcacggcggtcgcgaaacctgacgcgggtggcgttcgtcagtatggccttcaccatgaagagcgacgggacgctctgtggccccgtcctcgacgatgtctcgctcgtcggcttgcgcagccatgctgctcgccggctgcttctttgatagtactgtactattga

SEQ ID NO: 1675 - DNA, 1984 bp, Zea mays
aattgtccttctcgtaattattgccggcaattccgactcctctgacaatccatctaccacgcgcggccaaactcctgttcttccacctgctggctgctcctgcctcccctgcgccccaaacccacccgcctcgccgtccccgcaggccgcagcctgctctcggctcccgccgccgtctaccgcgtcctgcggctgcggtgttgcgtcacctcgggttcgccttaacttccacaatcctcgccgtcctggtgctccgccgcccctccctttgtactcgcgctggagctgcagatccaccgcgacctggcgaccaattcctcctcccgctgaagaattggcgaccttggcctccgcccccgcggcgcggaggagtcaactgtggtagcaaccaccgcggaggctgcaagccttcggtaagggaggaaagttgacttgttggaagccggtccagggccgcgatgacgtcgaccgccgccggcgcgtcgtcgtcggcggcgaagagcgagtcctacctgcgggccgacaagatcgacctcgagagcctggacatccagctggagaagcagctggccaagacctgggagaagcacaaggggtcgtacaaccaggggcccagggaggactgggagatcgacctcgccaagctcgagattcgctacgtcatagcgcagggcacctacggcacggtgtatcgcggcacgtatgatgggcaggacgtcgcagtaaaactattggattggggtgaagatggctttgcgtcagaaactgaaactgccacactgcgagcatcatttaagcaggaggttgctgtctggcatgagctcaaccatccgaatgttacaaagtttgttggtgcatcaatgggtactacagaccttaagattccagccaatagttctaacagtggtgggcgcactgagctgccgccaagagcatgttgtgttgtggtcgaatatctcgctggaggatcactgaagcagtatttaataaagaacaggcgaaggaagcttgcatacaaggttgttgttcagatagcactggatcttgccagaggattgaactatctacattcaagaaagatagtacatcgggatgtaaaaactgaaaatatgctgctcgatacacagcgaaaccttaagattgctgattttggtgttgctcgtgttgaggctcagaatccaaaggacatgacaggcgcgactgggacacttggctacatggccccagaggtacactacgctactgttctagatttgtacagaaacgattactgccattgcatttccgttctgtatagggacaattgtcttgagcaattggtgtctgtgcaggtgcttgaaggcaagccatacaacagaaagtgtgatgtctacagttttggcatatgcttatgggaaatatactgctgtgacatgccatatccagacctcagttttgcagacgtctcgtccgccgtcgttcaccagaacctgcggcctgacatccctcgctgctgcccaagcccaatggcgaacatcatgcggaagtgctgggacgcaaacccggataagcgccctgacatggacgacgtggtgcggttcctggaggccctcgacacgagcaagggcggtggcatgataccagaaggccaggcaggcgggtgcttgtgtttcttcagagcccgtggtccttagaaccaaccaaccctttccagccatcctctacttgtctctgccctactacagtattggagccagatgtaggcctttgttgttcatcggataggggattgcagataacttgatgacaatctttgtgattggttgacacttgttatacgttctatagtgatgtgaataccagtgaggagtccataatacagagttatttcaaccagttcatggttgcatgctcttaatggtttgtttgtggaaatcacatactgggccatcattgattaactgggagaacatatgtgatacacgcattcgccatcgttttctcg

SEQ ID NO: 1676 - DNA, 2615 bp, Zea mays
ctgcaggacacaaaggttgaaggcaagggagagagaggaagaagaaaggcaggaggagaggcggaacgacccgtctccctccacctctctctgccttctcctcctgcgccgccatcctcacatcccgtcgtcgcaccacccactgaccggccggttgcacccttatagtaccggacggtggcgcgatgcaaggaggcccactcagcccggacgagtaccgggtggcgtcgccgccggcgctgctgcaccagccggcgcccgtcatcgtcgtggccatcgaccgggaccgcaacagccaactggccgcgaagtgggtggtggaccacctcctctccggcgcctctcagatcgtcctcctccacgtggccgcccactaccccgccaaccatgggttcgccatggccgagacgacgcagagcgcgctggaggctgaaatgaaggagatctttgtcccctacagaggattcttcaaccggaatggggtaaatgtggatgtcttcgaggtagtgttggaagaggcagacgtgtccaaggccattctaggttacatcactgcaaacaagatccagagcattgcgctcggcggagccagcagaaatgcattcaccaaaaaattcaagaacgcggacgtgccgtcgaccctgatgaagtgcgcgccggactactgcaacatctacgtcgtggccaagggcaagtccgtcaatgtccggctcgccaagtgcggcgtcccgcccatgcacggtggcgccgacagcccttcggacaccgactccgtccgggaatcggggctgtacattcggcgtggctccaggggacacggacacctgccgccggtgatgcctgacgccaggcgctccatggacgggcgcagcaccctgccggagctcaccacgcgcccaccgttccgcgagcgctcgctcccgtcctcggccaccaagaacgtcgtcgtcctgccgggaaaggactactccgaggcgccctcccgctccgcgaggcacgactcgttcggcggcgacctcgacttcggcccgagcacgcgcttctcctccatggacttcggcgacaacctcgacctcaccgccagccccgctcgggagcccatgtcaccggccaccggcgcgcaacgggatattgaggtcgagatgcggcgcctccggctggaactcaagcagaccatggacatgtacaacgcggcgtgcaaggaggccatcaacgccaagcagcgggccaaggagatgcagctgatgaaactggaggaggagcgtcggctggaggaggccaggcacgccgaggagactgctctggcactggccgagatggagaaggccaagtgccgcgcggccatggaggcagccgaggcggcgcagagactggccgacctggaggcgcagcggcgccgcaacgccgaggtgcgcgcgcgccgggaggccgacgagaaggtgcgcgcactggatgccatctccaaccacgacttccggtaccgcaagtaccacatcgacgagatcgagatggccacggagcgcttctccgacgagctcaagatcggcgagggcggctacggccccgtctaccgcgcctccctggaccacacccccgtcgccatcaaggtgctccggcccgacgcgcaccaggggaggaagcagttccagcaggaggtggaggtgctcagctgcatccgccaccccaacatggtgctcctcctcggtgcgtgccccgagtacggctgcctcgtgtacgagtacatggagcacggcagcctcgaggaccggctgttccgtcggggcggcacgccgccgatcccgtgggcgcagcggttccggatcgcggcggagatcgcgacggcgctgctgttcctgcaccagacaaagccggagccgctggtgcaccgggacctgaagccggccaacatcctgctggaccgcaactacgtgagcaagatcagcgacgtcgggctggcgcgtctggtgccgccgtcggtggcggacagcgtgacgcagtaccggctgacggcgacggcgggcaccttctgctacatcgacccggagtaccagcagacggggaagctgggcgtcaagtcggacatctactcgctcggcgtgctcctgctgcaggtggtcaccgcgcggccacccatggggctcacgcaccacgtcgagaaggccatcgacgcgggcaccttcgcgcagatgctcgacatcaccgtcaaggactggcccgtcgaggaggcgctcggctacgcaaagctcgcgctcaagtgcacggagatgcggcggagggaccggccggacctcgcaaccgtcgtactgccggagctcaaccggttaaggaacctcggccacgcgtacgaggcacgcatgagcgccgtcgggaccaacagtggaagtggcgaaagtaatgaccaggtcagcgggagctcgccgacggcgggtggttcatggagaacggcggagagctagcgggtggtacggcgtggccatgagtcagttagagagcgagcttgtgatggggagagttcttttgttggacggagagttcaaaatccaaaaatcttggtgtatgtacagttgtctatgaggaatactaacacgtcttgcagtgcttctgcctctcatcac

SEQ ID NO: 1677 - DNA, 699 bp, Zea mays
atggcgtctccgccccactcattcgaggtccggacccccggcgactcgccgcggcccaccgccgctctcctctccccctccgtggccgcaccccagccctccaccgcctcccgcctcctgctcctcctcaccgcggccgtcgccgccgctacggccttcgtcctgctccacctgcccaccaccgtcgtgaccgcggcgtccgccaccgcgcgtccgctctccaagctctccaagcccgtggtgctgctcatttcctcggatggcgtccgcttcgggtaccagtacaaggcccccctcctgcacatccgccacctcttcgccaacggcacatccgccgccgagggcctggtccccgtcttccccacgctcaccttccccaaccactactccatcgtcaccgacctctacccctcctcccacggcatcatcaacaactacttccccgatcccatctcgggggactacttcaccatgaaaaaccacgatcccaagtggtggctcgtggagccgctctgggccaccgctgccgcccagggggtcctatctgccacattcttctggccgggttcggaggttacgaagggttcctggaacttccccgacaagtactgtcgccactacaatggctcggtgccgtttgaggagagggtcgacaccatccttggctattttgatctcccgcctaaccaaatgccatag

SEQ ID NO: 1678 - DNA, 1009 bp, Zea mays
cttcccaaacggagagagaaacggaaggcgaatagaagaaaagcgtgctgttttttcatcctctcgtgtctcgtgtgtgcgcgcgagcgtgcgcctccctccccatctcgcgatcccagttcgatccgctcgcccgctctcccgatccgacccgccctccgcggccgggcaattcggccgccgccgctcggattcgcgtgggctcgccctcagattcgctctccccggcgccccaaaccctagatccgccgctggtcgtcccaccgccgccgccatgttttggcgcatgaccggcctctccgcggcctcgcccgtggatacaattctggacaaagaaaattttacattggaagaacttcttgatgaggatgaaattattcaggagtgcaaagcactgaactcaagactcataaacttcttacgtgacaagtcccaggtggaacagttgcttcattatattttggaagaagttccagaggatgctgaaaggaagcgctccttcaagttcccttttattgcttgtgaaatatttacttgtgaaatcgatgtcattttgaggaccttagtagaggatgaagagctaatggacttgcttttctcatttgtgaaacctgatcatccacatagcacattattgtctggttacttcagtaaggtggtaatatgtttgatgctgaggaagactgctccacttatgagttatgttcaggggcatccaaagatagttgtccagcttgttgacctgattggcatcacatcgataatggaggtgctgatacgactgattggtgctgatgagaccatatattcaaactatggtgatacattgcagtggttagaaaatacagatgtccttgaaatgattgcagacaagtttggctcatcgggcaagcctggtgcaatgaaacagaaactttgcattcaattgaaacattcttacctctatgacatggataacagtgtccatctcaattatgcaacaaaagtaacagggaaaccaccatattga

SEQ ID NO: 1679 - DNA, 2475 bp, Zea mays
atggcgacgattcttggcgcagatggcgggcgagagagacagcagagaggagagcagggtcggacctttcctggatgtgttgattctccttccatgatggcgagcgagagatcagaggctgagataggacagcgggggcgagtctgttggcgagacagcgtgagagaggagagcgggcgacggcacaagccagaaccacagttcggaaaaccacccatgcttccttcccgccatctccgcgccgccgcgcggcagcgaagccacaggcggccgcccgcccctgccgacgcttgcattacgggcaagcctgatatggaggtcatccggcgcaacagagccatcacggcgcacatgcgtgcgggccgcgttccagacgccgagcgcctattcgccgcgatgccccgccgttccacctccacctacaacaccatgctcgccgggtacgccgccaacggacgcctcccgcaggcgctctccttcttccgttccattccgcgccccgattccttctcctacaacacgctcctgcatgcgctgggggtgtcgtcatcgctcgccgacgtgcgtgctctgttcgacgaaatgcccgtgaaggattccgtgtcctacaacgtcatgatctcatctcacgctaaccatggtctggtctcgctcgcacggcactactttgatctcgccccagagaaggatgctgtctcgtggaatggcatgcttgctgcctatgtccggaacggacggatccaagaggcaagggagctgttcgattcaaggacagagtgggatgcaatttcttggaatgctttgatggctgggtatgtgcagcgcagtcagatagaagaagcgcagaaaatgtttaataaaatgccacagagagatgttgtttcctggaatactatggtgtccggttatgcgaggagaggagatatggctgaggcaagaaggttgtttgatgtggccccaattagagatgtgttcacctggacagctattgtctctggatacgcacaaaatgggatgctcgaagaggccaagagggtgtttgatgccatgccagataagaatgctgtgtcgtggaatgcaatgatggcagcatatgtccagcggaggatgatggaggaggcaaaggagttgtttgatgctatgccctgtaggaatgtggcttcgtggaacacaatgttgacagggtatgctcaggctgggatgctggacgaggcgagagcaatttttggcatgatgccccagaaggatgcagtctcatgggctgcaatgctggctgcgtattcacaaattggtttcagtgaggaaacactgcagttgttcaaagagatgggacgttgtggtgagtgggtgaataggtcagcatttgcttgtgttttgagcacatgtgctgacattgctgcacttgagtgtggaatgcagctgcatagtaggttgattaaggctggttatggggtgggctgctttgttggaaatgcacttctagctatgtacttcaaatgcggaagcatggaggaagctcacagtgcatttgaagagatggaggagagggatgttgtttcgtggaatactatgattgcaggctatgcacgtcatggttttggcaaggaagcacttgaggtttttgataccatgaggaagacatctaccaagccagacgatattactttggttggagtacttgcagcatgtagtcattctggcttggttgagaaagggatttcatacttctattcaatgcaccgggattttggtgtggcaacaaaacctgaacactacacttgtatgatagatcttcttggccgtgctgggcgattggatgaagcagttaatcttatgaaggacatgccttttgagcctgactctaccatgtggggtgcattacttggtgccagtaggatccaccgcaactctgaacttggcaggaatgcagctgagaaaatatttgagttggaacctgaaaatgcaggcatgtatgtcttgctttcaaatatatatgcatcatctggcaaatggcgtgatgtggacaagatgagacatataatgcatgagcgtggtgtgaagaaggttccaggattcagttggattgaggtgcagaacaaagtccacactttctcagtgggtgattctgtgcatcctgaaagagaggacatatatgctttcctggaagatcttgacatcaggatgaaaaaggctggatatgtatcagctacagatatggttttgcatgatgttgaggaggaagagaaagagcacatgctaaagtatcatagcgagaagcttgctgttgcttatggtattctaaaaattcctcctgggaggcccatccgggtgataaagaacctgagagtatgcagagactgtcacactgctttcaagtgtatctctgcgattgagggaagactgatcatactgcgggattccaaccggtttcaccattttagagatggttcttgttcatgtggtgattactggtga

SEQ ID NO: 1680 - DNA, 6066 bp, Zea mays
gcgggttgacctctgtgcttctctcatggtacaatcctcttcctgctgagccccctttctcctcggtccacagagaaaaaatgtaggactggtgccgacagttcatcacgggaagaaagaactcacagagccgggatcgctaactaatagaatagtactactaactaatactaatatatagataactaatactaatatatagatattaatactaatatatagatatatagaaatagatatctagaaatagaaacgaactaatatatagataatcgaaatcgaaaagaactgtcttttctgtatactttccccgttctattgctaccgcgggtcttatgcaatcgatcggatcatatagatatcccttcaacacaacataggtcatcgaaaggatctcggacgactcaccaaagcacgaaagccagttagaaaatggattcctatttgaagagtgcctaaccgcatggataagctcacattaacccgtcaattttggatccaattcgggatttttcttgggaagtttcgggaagaaattggaataatatcgattcatacagaggaaaaagttctctattgatgcaaacgctgtacctagaggatagggatagaggaagagggaaaaatcgaaatgaaataaataaagaataaagccaaaaaaataagtcgaagatagaagagcccagattcaaaatgaagaaatggaaactcgaaaaggatccttctgattctcaaagaatgaggggcaaggggattgataccgagaaagatttcttcttattataagacgtgatttgatccgcatatgtttggtaaaagaacaatcttctcctttaatcataaatggaaagtgttcaattagaacatgaaaacgtgactcaattggtcttagttagtcttcgggacggagtggaagaagggcggagactctcgaacgaggaaaaggatcccttcgaaagaattgaacgaggagccgtatgaggtgaaaatctcatgtacggttctgtagagggacagtaaggatgacttatctgtcgacttttccactatcaaccccaaaaaacccaactctgccttacgtaaagttgccagagtacgattaacctctggatttgaaatcactgcttatatacctggtattggccataatttacaagaacattctgtagtattagtaagaggaggaagggttaaggatttacccggtgtgagatatcgcattattcgaggaaccctagatgctgtcgcagtaaagaatcgtcaacaagggcgttctagtgcgttgtagattcttatccaagacttgtatcatttgatgatgccatgtgaatcgctagaaacatgtgaagtgtatggctaacccaataacgaaagtttcgtaaggggactggagcaggctaccatgagacaaaagatcttctttctaaagagattcgattcggaactcttatatgtccaaggtcaatatggaaattctttcagaggttttcccttactttgtccgtgtcaacaaacaattcgaaatacctcgactttttcagaacaggtccgagtcaaatagcaatgattcgaagcacttctttttccattacactatttcggaaacctaaggactcgatcgtatggatatggaaaatacaggatttccggtcctagcgggaaaaggagggaaacggatactcaatttaaagtgagtaaacagaattccatactcgatctcatagatccctatagaattctgtggaaagccgtattcgatgaaagtcgtatgtacggcttggagggagatctttcctatctttcgagatccaccctacaatatggggccaaaaagccaaaaaaataagtgattcgtttttagcccttataaaaagaaaacggattcttgaacctctttcacgctcatgtcacgtcgaggtactgcagaaaaaagaaccgcaaaatccgatccaatttttcgtaatcgattagttaacatggtggttaaccgtattatgaaagacggaaaaaaatcattggcttatcaaattctctatcgagccgtgaaaaagattcaacaaaagacagaaacaaatccactattggttttacgtcaagcaatacgtagagtaactcccaatataggagtaaaaacaagacgtaataaaaaaggatcgacgcggaaagttccgattgaaataggatctaaacaaggaagagcacttgccattcgttggttattagaagcatcccaaaagcgtccgggtcgaaatatggctttcaaattaagttccgaattagtagatgctgccaaagggagtgggggtgccatacgcaaaaaggaagcgactcatagaatggcagaggcaaatagagctcttgcacattttcgttaatccatgaacagaatctaggtatgtagacacatggatccatacatctcgatcggaaaagaatcaatagaaggagaatcggacgatatctttttcgaaacaaataaaaaggaaaaaaaagagaaaacagaaatcatgatcaactaagccctctcgggggcttgcttaagaataagaaagaggaatcttatggaaatagcatggaataaggtttgatcctattcatggggattccgtaaatatcccattccaaaaatcgaaacaatcgggacttttcggagattggctgcagttactaattcatgatctggcatgtacagaatgaaaacttcattctcgattctacgagaatttttatgaaagcgtttcatttgcttctcttccatggaagtttcattttcccagaatgtatcctaatttttggcctaattcttcttctgatgatcgatttaacctctgatcaaaaagatagaccttggttctatttcatctcttcaacaagtttagtaataagcataacggccctattgttccgatggagagaagaacctataattagcttttcgggaaatttccaaacgaacaatttcaacgaaatctttcaatttcttattttattatgttcaactttatgtattcctctatccgtagagtacattgaatgtacagaaatggctataacagagtttctgttattcgtattaacagctactctagggggaatgtttttatgtggtgctaacgatttaataactatctttgtagctccagaatgtttcagtttatgttcctacctattgtctggatataccaagagagatctacggtctaatgaggctactatgaaatatttactcatgggtggggcaagctcttctattctggttcatggtttctcttggctatatggttcatctgggggggagatcgagcttcaagaaattgtgaatggtcttatcaatacacaaatgtataactccccaggaatttcaattgcgcttatattcatcactgtaggacttgggttcaagctttccccagccccttttcatcaatggactcctgacgtctacgaaggagtgtggttcgttcgacaaattcctacctctatctgaggtgtttgggttttgcaaaactccatagacatgcagaagagaaatgctatccccactccgaccaagacagaacttttaccaaaagtttattgtgatctttttgttcaaataacaattaaggtgaagcagggtcaggaacaacgaatctctttatgataaacagatccattttgcaagctcgttattacgggtagttcctacaaagaatcggactaatgacgtatacaatgcttgaattatcgatgtaaatgctacatagtgggttctcatccttcagagactacgagtgtaataggagcatccgttgacaaaaggatcaccctaagatgatcatctcatggctattgggaacgaatcaaatcagatggttctatttctcaacctttctgacttgctcctacggaaccaaggtcgaaaggattgaaaaagtcagtcattcacaaccactgatgaaggattcctcgaaaagttaaggattagtagttctttttcgaaatccatttcgaaaaagaatggattcggtcttatacatacgcgaggaaggtaatcaaaaaagaaagaagacgagttcttctttcttttatcacttaggagccgtgcgagatgaaagtctcatgcacggttttgcatgagagaaagaagcgaggaatcctcttttcgactctgactcccccactccagtcgttgcttttctttctgttacttcgaaagtagctgcttcagctttagccacgcgaattctcgatattcctttttatttctcatcaaacgaatggcatcttcttctggaaatcctagctattcttagcatgatattggggaatctccttgctattactcaaacaagcatgaaacgtatgcttgcatattcgtccatagggcaaatcggatatgtaattattggaataattgttggagactcaaatgatggatatgcaagcatgataacttatatgctgttctatatctccatgaatctaggaacttttgcttgcattgtattatttggtctacgtaccggaactgataacattcgagattatgcaggattatacacgaaagatccttttttggctctctctttagccctatgtctcttatccctaggaggccttcctccactagcaggtttcttcggaaaactctatctattctggtgtggatggcaagcaggcctatatttcttggtttcaataggactccttacgagcgttctttctatctactattatctaaaaataatcaagttattaatgactggacgaaaccaagaaataaccccttatgtgcgaaattatagaagatcccctttaagatcaaacaattccatcgaattgagtatgactgtatgtgtgatagcatctactataccaggaatatcaatgaaccccattcttgcaattgctcaggataccctcttttagctgctaggtctatttcttagttcaagatccctcttactaactggaataaaagaattagtagatctgttccgcccaaaatgggaatgggtgctagggttatgaacttataatcatggaatcgactcgatcatcagattataagttcattccataccggaccagatcgtgcacattcttattatgagaaggggtcattcgagcctatggaaataggatactctgtttacatagaaatccctacgtccttacattctatttaggattaggaataggtgtaatcagacctgcttttgacatatctatcctatccttatttgggtaccatatgcacctctttgggcttctattgaatcgagaaattggattgtacatctttttgattttgatatcgattttgatacatataaggtgtcctacggataatgcaaatcgaagctatttgatgtctgactcaggcctatatgtatatgaccgatcgatcgaaatactccaagactccacctttgtcatatattccatatatcacattcgatagatatcatattcatggaatacgattcactttcaagatgccttgatggtgaaatggtagacacgcgagactcaaaatctcgtgctaaagagcgtggaggttcgagtcctcttcaaggcataatacggagaatgctcattgaatgagcattccccgtagaagtattccggaaatctgcgcctggcgctctcctctatcttctgaggtccttaaccatctccctgagaaaagtagacagtaaaagccaaaatagactaaatatagcctgaatgatcctaaaaacccctcgaaggagataataaagaacctaaagcagacggtatcctactgcaagggtggtcttaagaatccaaaagaggttgctcagaagagatagatgtatcccaacctctattgctctcgcgtaaagccttttttttacgcgacaggaaaaagtgactacgaattcccctttttgtttgcgaatccctgtttgtatcctttgagcgcacgcccataagtagcgatcaaggaaatcgatcaaacgatcccaataccgtgaaagagaaacttcccagatccagggaagcttatcataaagggcttcaacaaggggttttattcgttctttgagcaaaaagata

SEQ ID NO: 1681 - DNA, 4860 bp, Zea mays
cccaccatgtccctacgctcggccacttcgagtgcgcggcgccagcaggaggccgaggtcgccgcggcacaagaacgcgagcgagcagcagcagcggctgcagcgacagcggcgagggcagcacggttggcggcggcggaactggcagcggcgagagcggaagtagaagcagcggaggcggcggatgctgcacgtgcggcggcaacagagctcgaggttctgcgcggcagtagagctggcagctctgcttctgtcgacgacaacaccgacgacgagctcaggctggcgagggaagcagcgcgagagcaggcggcacagtgggcagccgcgcatccccatgggggcgcgcgtggtggcagcccggataggcgccgacacgctgacggcgctccaggcgggggcgcacgcggcggcagcccagacgggcgtagacgcgccggcggtgctcccggcggcggcgaccgagtcgacggagatcgcggcctctacaggcggcgcggttctccctccccggatcggtaccatggtcgtcgcatggcccaagccattgtcagggacatcggtctcggcggtgggtggcctaccctcaccaagaccaactacgtcgagtgggccgcggtgatgagggtacggctccaggttcgccacatgtgggaagcagttcgttacgacgacgtcgactaccacgaggatcggcgggcgctggatgctctcattgctgcagtcccgcccgagatgcagttttcgctttcccagaagcggactgccaaggaggcctgggacgccatcgctgcgacccgcatcggcagcgatcgtgcccgcaagaccacactgcaggcacttcgcaaggagtgggagaacctgaccttcaagccaggtgaggatgttgatgactttgctctccgcctcaacactctgttgcagaagatggtgcagttcggcgatgacacctacgatgaggagagagctgttgagaagctcttccgttgcatccccgagaagtacaggcagattgctcactcgatcgagtctctgctagacctctccacaatgacgatcgaagaggcgattggtcgcctcaaggtggtcgacggcgacgaaccacaggctctctctgggcctatcactatcggcgggaagctacatctcactcgggagcagtgggaggcctgccagggtgacaagaagcagggggagtcctcctcgacacgaggccgcaaacgcggcaagccgcgcaaggcgcgtggaggcgcccaggccggggcgcgaggacatgctgagggtggtgcacgtggaggtgcccaaggcggcgccgtcggcaacaagaagccggcacgagacgacggctgccacaactgcggcaagcttggccactgggccagggattgtcggcagccacgacgtggccaggccaacgtcgcacaagcggaggcggaggaggaggccctgctcctggcacatgcaagcatcgagccatctccagcggcaccggccgcagcggcactcctccaccttgatgagtcgaaagcacgcgctttcctcggcgacggctccaacaaggacatgatcgaaggatggtgcctcgacaccggcgccactcatcacatgaccggccgacgggagttcttcaccgagcttgactctagcgtccgaggctccgtcaagtttggggacgcctccggcgtagagatcaagggcgccggctcagtcgtcttcaccgccgcgtctggtgagcacaggctgctcaccggagtctactacatccccgcgttgaggaactctatcatcagcttgggacagctggatgagaacggttcgcgcgtggaggtcgagcacggagtcatgaggatctgggatccctctcgtcgccttcttgccaaggtacgcaggagtgcaaatcggctttacatcctcaatgtgaaggtggcacaaccttgctgccttgctgctcgtcgagacgacggggcatggcagtggcacgagcgcttcgggcaccttaacttcgaagccctgaagcggctcagcgccaaggagatggtacgaggcctgccgtgccttgaccatgtggagcaattctgcgatgtctgcgtgttgacaaagcagagatgactcccctttccccagcagtcgagcttccgagccaaggagaggctcgagctcgtgcatggggacttgtgtggcccggtgacaccagccacaccaggaggacgacgctacttcttgctgctcgtcgacgatctctcccgctacatgtgggtgctgatccttggcagcaagggagaggctgcgaacgccatcaggcgtgtgcaggtcgctgcggaggcggagtgcggccgcaagctgcgcgtgctgcgcaccgacaacggcggcgaattcacggcggctgagttcgcatcgtactgcgcggatgagggcgttcagcgtcactactccgcgccgtacagcccgcagcagaacggcgtcgtcgagcggcgcaaccagacggttgtggggatggctcgggctctcctcaagcagagaggaatgccagctgtcttctggggagaggcggtggtgacagcggtttacatcctcaaccgctcgcccaccaaggctctcaacgggatgacaccgtacgaggcttggcatgggcgcaagccggcggtctctcacctacgagtcttcggctgcctcgcgttcaccaaggagcttggccacatcagcaagctcgacgataggagcaccccgggggtgttcattggctacgcggagggctcgaaggcctaccgcatccttgacccaagaacacagcgtgtgcgcacggcgcgcgacgtagtgttcgacgaagggcgaggatgggcgtgggacaaggcggtggacgacggcacgactccgacgtacgacttcaccatcgagtacgtccactttgagggagctgggggagtaggcaactcttctccgagcaggtctaccccagcccccaagtctccaccgactccagcgccacactctccagcttctgctacaacgagctcttcaccaccacgcactccagccacgactccggctacagcgagctcttcgccaccacgtactccagcaccgacggtaccctctccgggaacgtcctctccgacaccagctcgtgtcgagcacgacccagtggagctcgtgacccctctgtcccgcgacgaggagcgcgtcgacgcgtgctacgacggcgagccgttgcggtatcgaagggtggagggccttctcatcgacccgtcggtgccaggccctgcatctcgcattctggcaggagagttgcatcttgcatgcgacgatggtgagcctcggtctttcgcggaggccgagcaacatgcggcttggcgtgccgcgatgcagtcggagatggacgcggttgagacgaaccgcacttgggagctcgctgatctccctcatggtcatcgcgcgatcacccttaagtgggtgttcaaactgaagagggatgaagccggcgccatcgtcaagcataaggctcgcttggtggcacgcggtttcttacagcaggaggggatcgacttcgacgatgccttcgcccctgtagcacggatggaatccgtgcgactcctccttgcgctggcagccctggagggctggcatgttcatcacatggatgtcaagtcggcgtttcttaacggcgacttaaaggaggaggtctatgtacaccagccgccaggttttgcgatccctggcaaggagggcaaggtgttgcgcctgcgcaaggctctctacggcttgcgacaggcaccaagggcgtggaatgccaagctggattccacgctcaagaggatgggcttcatgccaagcccgcacgaggcggccatctatcggcggggcaatggagaaaatgccctgctggtgggtgtctacgtcgacgatttggtgatcaccggcgccaaggatgcagaggtggcagcgttcaaggaagagatgaaggccaccttccaaatgagtgacctggggcatctctccttctacctggggattgaggtgcaccagggagactccaggatcacacttcgccagaccgcctatgccaggcgcattgttgagctggctgggctcaccgactgcaacccagctctcactccgatggaggagaggctgaagctgagtcgcgacagcacgacggaggaggtggatgctactcagtaccagcgtctcgtggggagccttcgctacctcgtccacacacggcctgacttggcatactccgtcggctacgttagtcggtttctgcagcgaccgacgacggagcatgagcaagctgtgaagaggatcatccgctatgttgcggggactctcgaccacggtctctactacccgaggtgccctggggaggcacaccttgtcgggtacagcgatagcgaccacgccggcgacatcgacaccagcaagagcacaagcgggatcctcttcttcctcggcaagtgccccatcagctggcagtcggtcaagcaacaggtggtggccatgtccagctgcgaggccgagtacatagcggcgtccactgcttcgactcaggctctctggctggctcgactgctcggtgatctcctcgggagagacactggagcggtggaactcagggtggacagccagtccgctctggcattggccaagaaccccgtgttccatgaacggagcaagcacatccggctgagatatcacttcatccgagactgcttggcagaagggagcatcaaggcgcgttacatcaacaccaaggatcagcttgcagacctgctcaccaagccccttgggaagatcaagtttgttgagttttgctccaggtccgggatgacccaactttcccacaagacgacgcacaagact

SEQ ID NO: 1682 - DNA, 1540 bp, Zea mays
ttagtctcttagagtggaccagcttcgaccagagttagaaacattccaaataggctcaatatgaatcgccctaccgtgcagtatcaaaccactacggatcgtaccgtttgtcggcctatttagctcggcccagatggaccccatcccatcacctcccgcctgacctccctcgagctcctgccgcgcctcccgcggggccctcgcctgccagtccccgctcctcctcgtcgcccttttgccctccttcaccgaggcgttattccacgtctcgctccgctgcctccaccgcttccgcttcccctggcgcccccctcccgccgcaccctccactactacccccgaggatcctgagcagctctccacctcccccaaggtccccgcgccgttcactcgcgtcatcatccctgattcaattatggggcgagtgaggcctcagtgaaagaatttacttggcttgagtcaggccaagccagtgcaaccaaaactccatcttttgtctcctggaccattcaattatggggctagttcttcatataaagccatgccatgcctttgaggctaatgctactgtctgcctctctcctgtgatttcagattggtcctagagacatgggcctaaaggtgtttcattggttgaatcggaggatgcattctaatactgagtactgcagcatccatggtagcaaagccatggaggacaaggactctgtgcctcatagtgtggttgagaaagatactgaagcccttctgctccatgatgtgcttcttaatggtatacttgcaattggcacacttggccatcacgtggactcactttgccctgtggcttgcattgaagaagatgatctctttatcatggatgatgagaaagcaattgtggaagagagagatgatgaggaacccaggaatgatcaggtgaaagaagatgttgcattggaaacagagccatgtgaaccagtatggcctattgttgagcctgctaagatgcattcattgtcaatgaaagaagacaactttacatgctttgtagcagaagaaatcctgatacgtgaggtggaagatgggggaggtgctaatatccaggaacgaccacttctgatgttagaaaaggtggagaaagtaagaactacacttgctgatttatttgcagcagaagtattctcatcaagttctccaagggagtatagttgccaggatatcattgacgttgctgtggcatccacttcaaagcatgcatcatgcatggaaaagatgcatcaaaagaaaccaaggaagccaacaccaaaaccactgaaagcgacaagaaaattaagtcgggtcatgaggaagatgttggggaagaagatccacccagagcagctcaatgggcgtagcaatgcagagggcccccttactgcatgatgtttattcttgccgacaaatttgcttctctatttggtaatctgctttctaaaattgtcctttgaattacatatattgttgagtcctactcaaggatcagttggttatcaaatcaacatgctaggtattttgtggacca

SEQ ID NO: 1683 - DNA, 1374 bp, Zea mays
ggccatggacgcaacgtcaaactcgaatttacgccggccaggccaccaccagtcgcccacgccccgccgccagtcctggcgcgcgcgcgcgcgtcccccggcccacaccgcaccttccacttccacggaccctgctgcatgcgcgctccagtgcgcagcactagtacgtacgagtagtagtagtgctgtgctgaggacgaggctgctaggtgctagctagctagctctccatgaatcgtatcgatcggaagagaagaagcccattccctgcccctgcctgccttggatacctactccctctccctccctcctcacatcacacagacagcagacaccactggccggccggcctgttcgttcattctctctcgctcgctcgctcgcccgcccgcccgcccgccagcctttcattccatctattaaacgcctataaatacagtacaggctcacacgtccatggaaggaatgtccatcttccttcactaccaccacacggctgctggctgctactaggcaggccttcccacacgcccgccgtagctctctcgcttgtgtggtcatccccggcctcgccttctctcattctgtcgtctgctgcccctgcctgccagtgccaccaccccccggccgtgcggattatattcgggcccaacccaagcaaatggagcagaaggcgaggaggcgccgcgtgccggcgttcggagagtggaactacaactactacggcagcagcgcggagctcgccacgcccgcggcaccggcggagctggaggcccgcagcgacgtctggttcaagtactcgccgcccccgcggaagccaccgccgccgccggcggccagcaggaaagttcggaggccggcggccgacaggtccgcatgcggcggcagcggcaagcggccccgtgccgcgacgcctgcgagggcgtccgacgccgtggtcccatcgtcgtcgtccgtgccacgcacgccggcgaagagcgcggccggcgctgccagggcgcgcgtggtgcgccgcgtcgacgcggacctgtaccaggtgcccccgccggacctgctccacgacgaggatctgccaccgaggcggaagaaggcgtccagcaggagcctgtggatgggttgcttcggcttcagttgcgttccggctgattaactattttctgtatttttttatccatgtatctactcctagtttaactgtactccttttcagattgtgcaatgttttggtttttttgtttgtttctagactagatttcagattgtgcaatgttttggtttttttttctttctggactagagcgagtattgtacagtgtgggcaatgaaaaaaatgtactattatgtatggtttcgtattcgagcctacttgacgcc

SEQ ID NO: 1684 - DNA, 2131 bp, Zea mays
gcctcgtaacgttatctgaagcctgtaacatctccgccatccgcctgaaggctcgaagcacgacgccaatggcctcccccaacgccgacccggctcagcaccacgcctcgacgccgccgctcctcctcgccgtacgccacctgccgttccccggcgtccaccggacgcgcgcgctccccggccccgacgtcctgacccctctcgcccgccgcctcgaggagctcgcgtccgcggcgacctcccacccgctcctgaagccgctcttcgccgcccactcacacctctcttccttctcccagggcaggaggcggctggtggcggcgcggcgtgcgacggtgctgtccggggggcactgcttcgcggcggtgctagggaactcggtggccgggttggtggtgtccaacggcatcaacaacttcctcaacctctacaacacggtgctcgtcgtcaggctcgtgctcacgtggttccccaacacgccgcccgccatcgtcgcgcctctcagcacgatatgtgacccgtacctgaacatcttccggggcatcatcccgccgctcgggggaacgctggacctgtcgccgatcctcgctttcctcgtcctcaacgccttcaccagcacggcggccgcgcttccggcggagctcccgagctcggcagcggcgcagcaccaccagaggactgctgcttcatccagctcggcgactcccagtcccaaccagaggaaatggatgcggagaatgcgatcaaagacatcacagggagaagatggtggtcactaggcatgtgagcttgtggctgggttcgtcaaatgccttattgttaccagctggggatcatgcttcgcatcagacgctcgagatctgcacagcaatgtgttggacatgcatgctcctcgctctctagccatcgaatgcaaactctgtcaatgccgcatgcagagttcgcccctttggttcaccacgttgcttcagagcttcaaatggtttttgtgcgttgtaatgcgttggcgttgcggagctttcttcaaatggtttttgtgctttgtaatgctttggcggtgagggctgtgctttctgctgcatgtatgtgtagcactttcggtcagctttcttgaattccgatagtgtgatcgcgatgcgtagccaaattcagtcttgagagagtaccaatcgaactttcatctgttgttggttaacaaattcagacaattcgtgaataggcatgctgcatagacaacaacgaatgaacttgatattgtgaggccaaacaggcagagctccaaaagatggtaagtacattttgtcctaacattggggggaaatggagacgacccaaacctccccaagaccagcgcaaaacagatacttttactggcttgtggtggggcaaaaagatcaacaaatgttcctcatgtaaaaagaatcacaatcggccaaagccgcgacactgtaaactttctgctcctcacaccatcctagttacttgtcttgtggcttataacaccacatcctcgatcaagttccttctctggaacgcctcatgctctcgtcgatcagcttgaatgtcttctttacaagtttctgatccagggctgttgttctgtagatcttgaacactcggtcgacacggtcaggcttgctgctttggaagtagagctcctcaaacttcttttttacaaacctaaaaaaatgatcccctggtcaatattaagaatttaagacccaaaaccagcacgtaaagatgacaacaaagtggaaaacttaatgtggcatctatgtgcgcatatgcatctttatatgatactgacaagccatagggagacacaggatgacaggatcacactcactcgtaggcgtgttccacctcctgtttgccaggtgcagtgggctggtaatctttaaaccactcgcacacgcttaaagggacctacataaggagaattagtgttattcatatgtgtgaattagtgtattatactcatctctcaataggtaaagaagcgcactagttaccttttgtatttttctctcaaatatgtcaaatttgttaagaaataacatgaatgaggttttctgaaagtcaaaattgcatcaggtagtgtttggttgaagagccaagtagaacggagccg

SEQ ID NO: 1685 - DNA, 3074 bp, Zea mays
ctaggtgttctgagacgcgacctctgatcaaatgggcgcgcaacaggtcaccgcagaggacgtctggcatttgggctggtggtacaaaaaaaaatctatcaaagcctgagaggccgtagcacaaccaccttccctgccctgccctcagtgccctgtcaaggatattttaggcaatgcgttgcccaattccacaggccacgtcacacgtggtgcggctctaaccgtatcgtccctgcccggtggggccgcggtcgcgtagcagacaccgacgggccgtcacgggccctgctcgccgcagacgatccaggggccaggcggcgcgcgggtgatctcgccacggcgcgttttgtgtggcccgcccgtgacgggaggcggaagagggaagaggcgacgcgacgcggctctataaaaccgcgcctccaaccagtactcccccggcaccctagagagattctgttttcgcaccagcgccggcacaggcaacgcagcaccgcaccgagccgagccacttagcgagcgagggaacagcctccacggcgaggagagaatggggagaggagggatcggaggcgcggcggccatggccatggccatggagaccgccgatcctgcccgtgcattcgtgaaggacgtcaagcgaatcattatcaaggtgggcacggctgttgtcactggcatgaatggccgattggccatggggaggctcggttctctctgtgaacaggtgaagcaactgaattttcaagggtatgaggtgattctggtaacctcaggagctgttggtgttgggaggcagaggctccaataccgtaaacttatccatagcagcttcgcagatctgcaaaatcctcagatgaactttgatggaaaggcatgtgctgctgttggtcaaagtgtcctgatggcgatctatgacacattatttagccaacttgatgtaacgtcatctcaacttcttgtgacggatcgtgatttcaaggatccaagttttggggaccagctccgtgagactgttttttcactgttagatcttaaagtagtacccttatttaatgagaatgatgccatcagtacccggagacagccatatgaggattcatctggtatattctgggataatgacagtctagcagctctgttggcagcagaacttaatgctgatcttcttatcatgcttagtgatgtggaaggactctatagtggtccaccaagcgatcctcagtcaaagattatccacacatatgtcaatgaaaagcatgggaagctaattagttttggagagaagtctagtgttggaagaggtggcatgcaagctaaagtgtctgctgctgctaatgctgcatcaaaaggtgtacctgttgtcattgcaagtgggtttgcaacggatagcatcattacagttctcaaaggcgaaaagatcggtacacttttccacaacgaagcaaatttgtgggcatgttccaaggaagctacagcccgagagatggcagttgcggcaagagactgttcgaggcgtctacagaagttgtcatcagaggaacgcaaacagattttgctagatattgctgatgctctggaagcaaatgaggatgcaattaggtctgaaaatgatgccgatgttgaggcagcacaagttgctggttatgaaaagtcgttggttgctaggatgaccctaaagccaggaaagataacaaatcttgcaagatccattcgtaaaactgctgacatggaggaccctatttcccatacattgaaaagaacagaggttgctaaagatctggtttttgagaaagcatattgcccattgggtgttcttctcattatttttgagtctcgtcctgatgcattggtccagattgcatctctagcgatccgaagtggtaatggtctccttttgaaaggagggaaagaagttatgagatcaaatgcaatattacacaaggtcataactggagttattcccgatactgttggcaaaaagctcataggccttgtgactagcaaagaggaaattgctgatctactagcgcttgatgatgtaattgatcttgtcattccgagaggtagtaagtctctagtttcccaaatcaaagcaacaactaagattccagttttaggtcatgctgatggtatctgccatgtttacattgacaaatcagccgacatggatatggcaaaacggatagtattggatgctaagattgattatccagcagcatgtaatgcaatggaaacactacttgttcataaagatcttaacaagagtgagggacttgatgatctattagtggaacttgaaaaggaaggagtagttatttatggtggacctgttgcacatgacaagttgaaagtaccaaaggtagactcatttcgtcatgagtatagctcaatggcatgcacagtcgaatttgttgatgatgtgcagtcagctatcgatcacataaatcgttatggaagtgcacacacagactgcatcatcacaactgatagaagtgctgcagaggcctttctgcagcaagttgatagtgccgctgtgtttcataatgcaagcacaaggttttgtgatgggacgcgttttgggctaggtgctgaggttggcataagtacagagcgcatacatgcccgcggacctgttggagttgatggacttctaactactcgctgcattttgcgcggtagtggacaagtggtgaatggtgacaagggagtggtttacacccacaaggatcttcctttgcaatgaggcaagcaaataacctccgttgtggtcgtaacgaatggctggactccccttttaagtacccttttcttttattccatgctacaaagtttggtgtcgtaacaagcagaatgcctatttagtaggcattgatgtaatcagaccattttgtcgtggtgttccttgtcgtataaaacatccgagacatctgtattagaggcgcggtagctagttgatacgcgattgttctggatgaaatttggatctgttccaatgcaatgataatgcatgtgtgatgaggtcctaaaaatctctgaatcgggattttggctcaaggagaatcgttttgttgcgg

SEQ ID NO: 1686 - DNA, 2009 bp, Zea mays
atgctttcccatctcctcccgcgccaccatcaccgccgcctcctccaaatcctgtccagggccgccgccgccccagatgttgacctccaccagaggctgtgctcttcgtctgcagcgtcgagcacgagcctgtcgatatggtggcggaagaaggagatgggcaaggagggcctcatggcggtggcgctgctcaagcggctcgcagctctgcccccggtggggtgtcacccgcgcctggagcagttcatgcgttcgcacgtgtcgcagctcctccgtaccgacctcctcgccgagctcctccgccaggaccatgccagcctctcaatgaaggagcctgctcgcctgcttctctactgtgtggtggctgcgggcttctcgcgcggaccaggagctgaggcaccgagcaggggcagccggccgtcacttctgccggcgcaggggccacatgcgggcggccgggcaagcaggcgcagggggccgggcaagcaagcagtgcagcaagcaggcgcagcgcaggcggccgggcaagcaagcagcgcaacaagcaggcgcatggggccaggggccacacgtgaccagcagccagcaagcagcgcagtcgcagcccggcagtctatgaagtatcctggctccgccactgccccggcaggttcacgccaggcggactgccacatctcgccgagcagattgcagattgcagctgcagaagcgaacagatctgccaacctcggctctaatccacgacatctctgcttcgcgccgccgtccagcttcgtcctgccagccgacctcatccccgccggccgtcgccccagccacgacgcctggccgtacctgtatttctcatcccgcggtacaagccccagccgagacgcttgtagccttgtaccgtccccgagcagtttcaccaaatcccggtcggtcccagactgcaagtgccaaatgctttcccgtctcctcccgcgccaccatcaccgccgcctcctccaaaccctgtccagggccgccgccgccgccccagatgttgacctccaccagaggctgtgctcttcgtctgcagcgtcaagcccgagcctgtcgatatggcggcggaagaaggagatgggcaaggagggcctcatggtggtggcgcagctcaagcggctcgcggctctgcccccggcggggggtcacccgcgcctggagcagttcatgcgttcgcacgtgtcgcggctcctccgcaccgacctcctcgccgtcctcgccgagctcctccgccaggaccatgtcagcctctcaatgaagatatatggtgttgtgcggaaagaaatctggtaccgccctgacatgtacttctaccgtgacatgctatacatgctagcgaggaacaagaaaattaatgaaacaaggcaggtatgggcggatctcaagtctgaagacgtgctatttgatcagcacacttatggcgacattgtgagggccttctgtgatgctgatttgattgaccttgcaatggaaatctatgatgacatgaggagctcccccgaccctcctctatcattgccgttccgtgttatcctgaaagggttggttccataccctgaactgagggagaagataaagcaggattttctggagcttttcccagatatgattgtgtatgatccaccagataccttatctgatatagatgaagaattcaagttttgatgaatgtacgccttcatccggattcagtgcttctgagttacattccctgcactgcaggcaaacctccatttctcgttcttttggtgggctagatcaattgtaaatgtagctgtctcgatctgcccagtagctgtggtaccaccaattttaacctcttgatgaaccatttttgttaatctatgctttggagaattgtctgcttccgtctgtgtctcgtcctactttgaatcaccttgttctgaagtttggtactgctgctgtgcactgagatttgtgttccgttgatccctgctatataatcatttgtacacttcaaagag

SEQ ID NO: 1687 - DNA, 2392 bp, Zea mays
gtgtggtgtgagtgtctgtcacctaccctaccctgctcgacaaggcaatctgaaaatgctctccgcaatctccacctccgcaatctccacctccctactagtagtactcttcggtgcagtccgcatccccacatctgaccgactctcaaagttcacagctccaatcctggtgcaagcgcacagtagcggagcaagatgcggggaggagaccggccatcggcgtcgctccagctcctctcgctgggcctcgtgctcctctacttcttcacctcagaagacgtggtgcatcgcgaagccgtcggcgtcgaacgagatcctggcgcagaacctggactacgcgtgctcccaggtgagctgcgccgtgatccagaagggcgggccgtgctactacccggacagccccgtgtcccgcgccgccgtcgccatgaacctctactacgcctacagcggcaggcacccctggaactgctacttcaacaactccgcgctcgtcgtgcagtccgacccaagctatggctcctgcacatactactgaggaggagtgtgaggaggagtggagagacgaggagaggagagagatccattcgtgcctggcggtggcggctccactgcatctgtatgcagagtcttggttttctagtctcgactgccaatttaccaaatgcacattgttgtgttgtgttgtgttgtgtagccgtgctgcagctgacatttcgcagcgaactcgtggatactccgtttcgcattcatgtgctttgaagtacattgcagcggcgctgcacaaatttccccccttgtttttctcgccacttgcgttcaaacgttggaatcgatggatctgatctgcctgcgtgtgatttgttcattccagcggccgtagaaacaaaacaacacaaacgatctacgatccactctcattctcgtctcgtactcgttcaccgtgacctacctaaacgcgtcgccgccagaaaaactaaaagcaacccccaacccacgcggcgcggcgccgcccgacaccaccgctccggtccccggcgacggcacgatgcggcggcagcctttctcgcggcacgccggcttcttctcctgcctccagcgggtggaagaccggctggcgtcggagtcggagcagcaacatcaggagcagaaggagagcccgccgccgccagctacagcaaaggcaacggcaacgacgcgccaaaccgaggcgtcgccattctcggacaccatgaccgcctccccactcctcttcctcgacccagcagcacccgcaccagcgcccggcagcagcagcggcccggcgctggacttcctcaccgccgccacccaggagggcaagcacatccaacaggaagacgacgacaacgatggcggcggcgacggcgatgaggaggacatcgcgcggctcatggagctgctcggcctgtcatccggcggcggtggcagcagccgccgcgacgacgacggaggcgggtgcgactgcagcggcgccgacgggttcctggccaaggtcgtgggcgtggtcggccccaagtgcgacagggagaaggggaggctggacgcctggatccgccattaccaccgtgggggaggcagggagcccgcgaggctggcgcacctgctgctcgccagggctgccgccgacacggcagccgttgcgttcccggccagcgtgaaggacttcttggaccacgatccgccacggcagttgacggacgagtcggagtggagtgatgcaaacggagacaataatagagattgacagacatgttttctggaactgattgaaaaggcaggcaataatagagattgacagacatgttactgttcgcatttttgtgcacaaaggtggagacattcaaataataggtcggcgaaatgtaactgaacgcacgaacagggaggcaaaatatatgcaatgtggtgttaagcaagtccaaacagtactttattagaacgcgagcaatgtaaacagtacttcacatcccgctgatcgataattatagcaaacagaacggtattaccaagcaacaaacaaaaggacatcgagcagttttcctttttactcgcggaatacgataaaaaaatagtagggagagcagccgcgcgcggatcctttttcctcggcagaacagcaaagctcacagcttcgatatgaggctattctggatggccttgggcgactcggcttccttgacatccgcatcggacgagctgggaggcacgtcgaccgcaggcgagcagttgaagaatccatgtggctgcagggcagaaacatcattagccattagaaacgaccaaagttaggctaaccatctctttgcgaagaagcaacaaagggtcccgatggttcactgcctatgacaggatatactgaaaaaaaaaaagtaaa

SEQ ID NO: 1688 - DNA, 2544 bp, Zea mays
cacgttgtgaaaactgaaaatggtaaaatagtaattgtttcgtctatagctgcaagcctgcaacccttcctttcttttcctccttctattccatcacccccagcgtgcgcgctgcactccctccctgcccctgttctctctctcgtggcgacggcgacggcgacgactgggcggccgttgctgccgccctactcgccaggcgcccaggtattcttcggccccttcgccggcgacgagtgtcaccaggtacgcccactccccttggtcttccctttctgccgtgcgaaaccgagcatccaaaccctaacggactgtttttacccggatctgatccaaccactactgtatatgcatgaattttgcctactagcttcgatcgcgttgcaaaaaatatcgggcgatgcccttaaccggctcctcgcctgtgtgcgggaaccctaccgatcggaattctgctaactctgtccatccatggttcgattaggttcctcgtctccggaacgcagtgcaaagcagatcgatctcggcccagcaggggcctcacgacttgactcccaaggtatggaattttttgggggcgtttgcgtccgcagtccattttcccggtgccttccctctgacgaaagcacggtctcagggctcccaaccttgcaggctgactcgatctctttggtttcgtggaccgtgatcagactccagggctggatcgtgtttcttccagtgtgcaagcttggatctcgtaggtctggtttagaaaggaccgtgcttgctctttgctgccgcaatcatgcagagtgggggcgacatgaggcctgtgcacaacagtgtcgatacagttaacgctgctgctgttgccatcgtcaccgcggagagccgcacacagcctcctgctgaacagagaaggaaatgggctgaccggttgagcgtgtacttctgctttggatcacagaagaatggccggcgcatgcgtgtcaaccatgccgcacttgtcccagaacctgcacctcaaaggacagatgcgcctgcagcagaaattccaaaccacccaccgcctcctgtgttcccctttgtggcaccgccatcctctcctgcttctttccttcaatcagaacccacatcaatcgtacaatcaccaagggctggagctccagctttttcgcccctctcaccaaattcccaatccccgacggggccaccatccatctttgctattgggccgtatgcacatgagacacaactcgtctcgcctccagtgttctcggccttcacaactgaaccatcaactgcccctttcactcctcctccggagtctgtccatctgacaaccccttcctctccagaggtcccatatgcaaagcttctgacatcgatcaacaatagcaagaatggtgaagcagggggtgatctccagtcgtatccaaactacccagacagcccaattgggcgcctgatatctccaagctcgggctgttctggcacatcctccccattccctgaccctgagatgcaggcttcttcacgcagcgctttacgcttgttcccagttcgtgagccccctaagatattggatggcgagggcgttgcgacacagaagttgatacctcgccatatgcgcaacggtgggtccctcttggatggccagatctcagcagctgtaccagttgtggacttctctgcccgacttcaacccaacgagcacgcaatggatcaccgggtgtcattcgagttgaccgtcgaagatgtcgcgcgctgccttgagaagaagactgcaatctccggggattctggcacggcatcattccaccttgcaccgaccggcagcggcgaccaccacagagaatccaacgaggcaagggcagggctctacgtcgacgaatcataccatgacttgcccgagaaagcgaggcggtccctgtccctgcgcctggccaaagagttcaatttcaacaacgtcgacgtcggtagcgtggagccgagcgtgggatccgactggtgggcgaacgagaaagtcgccgggatgacaactgagccaaaaaagaactggtctttccacccggtggtgcagcctggggtcagctaacctttgcactgaccataatgatcttatacagggatgaaggaattagcttcttctgcttctgcttctgcttcagtggtcgattccttagggatgacttgccagcttgttctaaacatgcagctagtggtaagttctggatttagatagtaataagtaatggggtgtccaccgtctaatatcgtcatgggatactaaaggtttttattctgggagatgtgacaaaccgcaaactctttggttaggggtcggtcggaactgtcctgttcgtctgttttatcctgataccggtgctgtgttgtgtatgtacataatgaagtagttttttttaaaaaaagtcaattaaaagggtagaacagtttccttcgataagttgccagatgctaccaaattgcttgtgattgttccctgcctgttcatgatattgttattacagaatttgtgagagaggaaacttctgggatttt

SEQ ID NO: 1689 - DNA, 2114 bp, Zea mays
gaccaaccgcctcgcctgccgttcccctccacgtctccccattcccgcctcccgagacctgaaccctgttggggacacatgggccccacaacccgcgctcacttcgtctacaatcgccgccgccgccgccgccgaggcgggcggcacgctgtcgaggaggcttccgacgaggagcagcagcagatggatagctcctcctcatcctccgacgaagaaggagatcaggaagaagatgccgaagcctccggagaggacgtcgatgacgaggaagaagaggaagcggtcgctgccgagcctgcgcccaagcagccacccgcagctgcggcggcgggggagaagaggggccgaaggaagggctcgatcaccattagcctgaagaaagtgtgcaaggcgtgcaaaaggacagggcaccaggcagggttcaagggggctgtgtacatcgactgccccatgaagccttgcttcttatgcaagatgccaggttgtcatacaaccttgacttgcccacatagagtaacaatggagcatggtgttatcccagcgcctaaaaggaatgcaaacacttctctggattatgtcttccagagccaagtcaagggaaagattcccatggttaagcctaagtttctgatacccaaccaactagagcatggaaacataaaatttcatcagagacgtgtgacatgcttggagtttcatccaactaagaacagtgttcttttatcaggagacaagaaaggacttctgggtatctgggattatgttaagttgcatgagaaaatcacttatgattctgtgcactcctgcattctgaatagcatgaagattgataccaccaacgatggtatgatatatacagcttcctctgatggtactatcagttgcactgatttggatactggtattggctctcccttgttaaatctcaacccaaatggttggaatggtccaagctcttggcacatgatatacgggatggacttaaacactgacaaaggtcttcttttggtggcagataactttggttttctttacttcctggatagacgatcaaagacgagaattggacatccaattcttatccataaaaagggtagcaaggtaaccagcctacattgtaaccctgcacgacctgaagtgcttctaagcagcggaaatgatcactatgcccgtatttgggatacaaggaagcttgaagccaactctccccttgccagccttgctcatggacgggttgttaattcaggatacttttctccacgaagcggaaataagatcttgacaacttgtcaggacaaccgaattcgtgtatgggactatattcttggtgatctgcaatccccaagtagagaaattgtgcacagtcatgatttcaatcgtcacctgactcccttcaaagctgagtgggatccaaaggattacaccgaaacagttgcagtgattggccgttacataagtgagaactacaatggtgttgctctgcatccaattgattttatagatactagttctgggaagcttctggctgaggtgatggaccctgacataataacaatcagcccagtgaacaagctacatccgcaagatgacatcctagctacaggaagctcaaggtctattttcatatggaagccaaaaattgaagatgaacttactgaagaaagagccaagcatgacaatagtagtgatgacgactcaggtggtgattctggcggaaagaacaagaaagcaaagaagactcgcttcactcatgcagtaaagggaaagggcaaatccaaagtctgatgcttggtgtacatagtcggcagcattttgacaagaaagcgtccattaaccagctcctgatgcatctccttttgtaccatcttgccaactccctcaccccccccagctaaggtgctgaagacccgtatgaaacgcatgctgatagaccccatagttgtctcctgcatcaatgctcctaaggagttagccagttaggtttcggactcttttgaatcctgacatgcttatgatcacttgtcatttgtcaacgaggccttttaacggtttaatcctgtatcaacatataaatctcctgtacagttgcctgaatgcaatttgtgcttgtaaaa

SEQ ID NO: 1690 - DNA, 3351 bp, Zea mays
ggcagggccaggcgggcagcccaacttgggggtcggggagcgtcttccggtgggtcctaccaaaattcgaacgatttcaaatctccctctcccctggtcggtcgtctgtgtctcggctccgttgttgcgctgcgctgccattctcccccctttccaattccatccgaatcgagaggcgcctccacatccacctccaccgatcctcaaaccctagatccgccggccatgtccgcgcgaggggtgcgcccgggggtgctgcaccacaaggagaacaatccggcggacgcgcagcctggaaagcgccagcgcaccgccgctggggccgggaggcagccgctcgccgctgcaccgccgccgcaggaggagcccatggtgttctcgggcagggaggacgtcgacgctctcctcaacgagaaaatgaaggggaagaacaagatggactacaaggggaagagcgagcaaatgatggaatacatcaagaagcttcgagcctgtaccaaatggcttcttgagcgggaagatgcaaatcttgttgaaatcgagaggatcactggtcagcttgacgcgacacacaagcaacactctgagatagtggctgtcttgaagaatactattgaagaaacaaaatcaatatgtgaggaacttcaaaaacaatgtgcatctctacaagaggctctaaagacagtggaggctgaaaaaatggatgccctgaggtctctaggagatgagagggaggccaggatgggtgtggaatctttgcggaatggacttctagaagatctgaacagggcaaagttggaggaaaaacgccttaatgatcagattaagatgcttcaggacacaaataaaaggcttcaagaatataacacaagcctgcaacaatacaattgcaaccttcaagcagatgcaacaaagaatgcggaaacaatagtaaagctgcaaaaggagaagaacactatggtcgagacaatgaatggtctgaaagatcatgctaactcagtaaaaatgcaactagacattgcaaggtctttgcaaaatgaagccacaaaacaaaagaccgatttattaaaggaagttgaaagtattagaatggagcttcaacgtgcaagggaggaccgtgacactaaatctgctcaagtagattctttgctggttgatattggaacatacaaagaaatgactggaaaatccgtcattgagttagatagcgccatggcaaaaacctctgccctagaggaaacatgttcgtctcaaaggaagatgatagagacattggaaattaagcttgcagctgccaatgaaaagttaaagaggtctaatatgacggcctcggaaaccatgaccgagtatgagaacatgaagaaaatgctggaaagtgttcagtctcgccttgaagaggccgagcaaacaattctggaaggagagaatttacgaaaaaagttacataatacaattcttgagttgaagggaaacatcagagtattttgtagagttaggcctttgctgccaaatgaatcaggagcagtatcatatccaaagaatggagaaaacttaggccgaggcattgagttgttacataatgcacagggatattcgtttacttttgataaagtatttgatcattcggcgtcacaagaacatgtgttcatagaaatatctcaacttgtccaaagtgccctagatggctataaggtctgcatatttgcctatgggcaaactggttctggtaaaacatatacaatgatgggcaaccctgagttagaagatcaaaaaggaatgataccacgatctctggagcaaatttttcaagctagccagacacttaactcacagggttggagatataagatgcaggcctcaatgttggagatttacaacgagactatacgcgacttgctagcaacgaatcgcatggctgttcaggatgttggtgcttcaaagtacagtatcaagcatgatactaatggtaacacgaatgtgtcggaccttacgatcattgacgtaactagtatcaacgaagtttcttctctccttaggcgggctgctcagagcagatcagttggtagaacacaaatgaatgaggaatcatcaagaagtcactgtgttttcactcttcggattttcggtgtaaatgagggaacggatcaacaagtgcaaggagtgctgaatcttatagatctagcaggcagtgagcgcctgaacaaaagtggtgccacgggtgatcggttgaaagagacagtggctatcaacaaaagcttgtcatgtttaagtgatgtcatcttctcgattgcaaagaaagaggaacacgttccatttcggaactcaaagctgacatatctgctccagccgtgtctcggaggggactcgaagacactgatgtttgtgaatctgtctcctgaagcgtcctcgacaggggagtctctttgctcattgcggtttgctgcaagggtgaactcctgtgagatcgggatccccaggcgccaaacccagatgcggagctcacaatgatgaaatacggcggaagcgagctgccagtgtaatgcttgtgtgtgtgttgatttggtgatgcaaccgatcatttgcatccccttgtctggaggtggtgtgagttgccaattttatttggtttgtggccttgttgattgcgctaacggctggcagcggtgggtgtgctggcctattatattaatcttaggacctgatctgatttgtatgttgggatgtgttgccattttcaatttttttgctttcattcgtagtcttgatttgtcgtttgcccaatgcccaatgcctctgagctgagctgggcgtgtatgtaaacaactgtgtacccgttgtcggacacgcacacagcctgacatgataattgtatttccctgctctgggaattctgcaataccccttgtgagtttcaagtattcatttacacatcatgatatatgaatgaaaaattgtggttctgctaggccatcttggccatgagctcctggaggatgagctttgtctcggcgtagcggtcgccgatcctggcgtcgtccttggctgtgacggcctcctggagcgtctcgaagctgtcgaagaggcggttggcgaggtcgacgaagggcggcttgtcttcggcggcggagatgagcttgtcgaagtcgtagtacatgaaggtggacttgaggcggaggtacttgttgacgtagttggaggcgtccttgcccagcaggtcctccagcgccagcaggtcgaaggccgtgctgcgcagccggtacgcgtgcgccgcgaagctgggcccgatgtccgccatgtagatgccgttcttgaggaaggagcgcgtgcccgtctccgcgttgttgatctcct

SEQ ID NO: 1691 - DNA, 3114 bp, Zea mays
cgtctcccggcccgggtcgtgccagacgccccccacgcgatctcgccttccacattcaccagcaccggcagcacgtacgcgtttcctttatgtactcgcgccgctcgtgggactgcaaaatctgacggcgcgcggggagccaggaccaggagaccgagcgagtgctcatcgcagctcgggggcacgcgcagcagcagccagatcagcagcgctgcatccccgaccccgagtactcaaggagcgctagcgaggacgaagagcctcatcggacgccacaacaagggattcgcgcaacatctggaacagacggcagccgtttcacttcccttcctcagaggaggagtcgcagcagagacatgcagagccagcagcagctccaagggtccgaagcggtccaggctcccggtagaaagaagctgaaaaggccggccggtccgtcgggacgcgaggaacctgacgacggcggcggcggcgacgacgacgagccgccccgacgaagcaggaacacgaaggacgcgcagacgtcgacgtccgccgttcgtggcctgctgcgcgatttcttcgagcagcagctgcgcttggacgcgcagcgccaggagacgatggagaggagggcgcgggagcggctgttcttcgaagaccaatggcggcagtcgatgcagaggatagagcaggagaggctgatgctggagcaggcgtgggcggagcgcgaggagcagaggaggatgagggaggaggacagggcggagagaagggacgcgcttctcactaccttgctcaccaggctcctgcagggagacctctagtccatcgcagatccggcgagagattaggatagaaaatcaggatagattgtagttgactaggattgcttcgttcatatacttctttacatggaaataatgttagctgactgcaggtcaattgttaagttctaggttgcaaagtggcatactagaatacgctgtcgtaatcgtaactgactcttctggagatgacgcatcttcagctggaaatcatggaacccaacaaactaatgggcagcaaaaactgaacatctgtgcaaatccaggtacaataacaagggaatccaccaagctactcatatctctctctgctcacgactgtctatagtacaatactgcaaccacagacgatcagctggaaaggtgatagatcaatctgggcgacaggtgttagtaggaaagtaatgtagacaacttgtgaacaaagtctatcctcactcctcactttctctaccatgcctctgcgtatcactctcataatatgtatagtcttgcaagccatcagaacctacattgtggctttcctcggtggaactagcaaaactgtccagtacataagtttcgactattttccagaaagagtcggcattacatccctggaaacctatccaaaagaatctccctttcctcttcactttacatgctaaagattgttgtgcttgcaaggacttcacaattctctcaacaccaccagtgtccccgccactgaccttaagaacaatatcacccgattgcagtctgacgcccccagacatgaaccaatatgccagaacccgtggggaaagccacctgtggacaagttttgggagaacaggctggcctttctgaaagaactgatctgcaaagaaaccgaaatgtgcatgaggtatggttgaaaatcgataagggatctcgctctccctattcagtgatctgcatgctgaaggcagccattcgaagaaacgttcgtgaatatgcacccttagagctgagtgagcatgagaatcttcctggaacttaaaattgacgatgtagacccctttctgtgcatgagattctatctgagtgcctccaaggagcaagccaatcagaatctcacgctgctcttcatccaacttcatgctcacaggttttggtggcttgacaactttcttactactgaggaggccactctgaagtttctccaaagattccactggtatatcgtacttttttttacacattaactcataaatgctctcagctttctgatagttctctgccaaaagatagcctctgagcaggatgttggcagacttagcattagtacctatcatcccatttttatgcatctcatcaaagatctcctcggccttcgagacattcccaatcctcacaagtgattccatataaatggtgtataatattctatttggacggcatcggccaaggcatttggtgaaagtatgttccagtttctcatgcatatccagatccagatacaaatacatcaagtcaagaaaggctggcatcagatgtttcatatcactttcaacaaactcatccatgagtttttctgcaatctctatctctctagcttttgtcattatctcaataatcttatgatatgatgcaacattaggagggatgttccggttcttcatttccttgaacatttctagggatttcattggctcaccagtgcgtgcataaagctccattcggcagatataagcttgggcaggaagctcacaaccactccgaagaagccaatgccatgttgcctcagtttctttaatatctccttccttggagaaggccctcatcagtgacaccagcacatcagtgctctcctcaaacccggctcgcttcatctcatccctaagagctttgatcctgtctctatcaatgacatcttgatagctgtggagccagatgagccctgcataaatatccttgtgcacctcaaggttacttgtgactatattgtggtagacaaactcagcctgcctgagattgtgctttgcagtgcctcctgttttactcacaagtgccctgaacagtgaattatgcaggctgaggcgaggcttatagccacccatctgtatcatctggttgtagatggtgcatgcctcctcaagacaaccccccctagcaacactgagatatgcaaccaccagtatgtggaaggtggattcagccggtactcgtccttgcttgatcatcgcatcaaacacctctcggcacttttcaaccttgccttctctggcaagacaatcggctacccttgtggctagtgcaaagttgaagcggtaccagtgctgctgtaccatccagctgtacacctgaa

SEQ ID NO: 1692 - DNA, 3813 bp, Zea mays
tttttccaagcctgaaggtactgggcactggctactgcagtctgtagctgtgcggaaagattaggctgctccgtgcagcgctgaccgttgagcagaaaaaggtgctgcccagtagattcgttcatggccaccgcccctccctgcgcctgcggcgctccgtccccatcgctgcgatgccctctagccctgccgctccccttcgctacctctcatcccgccgtccggctcgccgccccgccgcttctcgcgcgccgcctcgccgtgtctcctcgaagggcagcgtcagcgctggaagccctcgtgctggaatctgacgacgaggaagaggagtccgggataggcctgttccagggtgaggagtgggcagcgaccgccgacgagagggacgcggtaaggtcccccgagctggaggttttcgagctcgaagagctgccggagcagtggcgtcggtcgaggatcgcctggctctgcaaggagctccccgcttacaagcactccaccttcacccgcatccttaatgcccagcgaaagtggattaaccaggacgacgccacctacatcaccgtccactgcctccgcatccgccacaacgccgctgcattccgggtgtacagctggatggtacagcagcactggtaccgcttcaactttgcactagccacaagggtagccgattgtcttgccagagaaggcaaggttgaaaagtgccgagaggtgtttgatgcgatgatcaagcaaggacgagtaccggctgaatccaccttccacatactggtggttgcatatctcagtgttgctagggggggttgtcttgaggaggcatgcaccatctacaaccagatgatacagatgggtggctataagcctcgcctcagcctgcataattcactgttcagggcacttgtgagtaaaacaggaggcactgcaaagcacaatctcaggcaggctgagtttgtctaccacaatatagtcacaagtaaccttgaggtgcacaaggatatttatgcagggctcatctggctccacagctatcaagatgtcattgatagagacaggatcaaagctcttagggatgagatgaagcgagccgggtttgaggagagcactgatgtgctggtgtcactgatgagggccttctccaaggaaggagatattaaagaaactgaggcaacatggcattggcttcttcggagtggttgtgagcttcctgcccaagcttatatctgccgaatggagctttatgcacgcactggtgagccaatgaaatccctagaaatgttcaaggaaatgaagaaccggaacatccctcctaatgttgcatcatatcataagattattgagataatgacaaaagctagagagatagagattgcagaaaaactcatggatgagtttgttgaaagtgatatgaaacatctgatgccagcctttcttgacttgatgtatttgtatctggatctggatatgcatgagaaactggaacatactttcaccaaatgccttggccgatgccgtccaaatagaatattatacaccatttatatggaatcacttgtgaggattgggaatgtctcgaaggccgaggagatctttgatgagatgcataaaaatgggatgataggtactaatgctaagtctgccaacatcctgctcagaggctatcttttggcagagaactatcagaaagctgagagcatttatgagttaatgtgtaaaaaaaagtacgatataccagtggaatctttggagaaacttcagagtggcctcctcagtagtaagaaagttgtcaagccaccaaaacctgtgagcatgaagttggatgaagagcagcgtgagattctgattggcttgctccttggaggcactcagatagaatctcatgcacagaaaggggtctacatcgtcaattttaagttccaggaagattctcatgctcactcagctctaagggtgcatattcacgaacgtttcttcgaatggctgccttcagcatgcagatcactgaatagggagagcgagatcccttatcgattttcaaccatacctcatgcacatttcggtttctttgcagatcagttctttcagaaaggccagcctgttctcccaaaacttgtccacaggtggctttccccacgggttctggcatattggttcatgtctgggggcgtcagactgcaatcgggtgatattgttcttaaggtcagtggcggggacactggtggtgttgagagaattgtgaagtccttgcaagcacaacaatctttagcatgtaaagtgaagaggaaagggagattcttttggataggtttccagggatgtaatgccgactctttctggaaaatagtcgaaacttatgtactggacagttttgctagttccaccgaggaaagccacaatgtaggttctgatggcttgcaagactatacatattatgagagtgatacgcagaggcatggtagagaaagtgaggagtgaggatagactttgttcacaagttgtctacattactttcctactaacacctgtcgcccagattgatctatcacctttccagctgatcgtctgtggttgcagtattgtactatagacagtcgtgagcagagagagatatgagtagcttggtggattcccttgttattgtacctggatttgcacagatgttcagtttttgctgcccattagtttgttgggttccatgatttccagctgaagatgcgtcatctccagaagagtcagttacgattacgacagcgtattctagtatgccactttgcaacctagaacttaacaattgacctgcagtcagctaacattatttccatgtaaagaagtatatgaacgaagcaatcctagtcaactacaatctatcctgattttctatcctaatctctcgccggatctgcgatggactagaggtctccctgcaggagcctggtgagcaaggtagtgagaagcgcgtcccttctctccgccctgtcctcctccctcatcctcctctgctcctcgcgctccgcccacgcctgctccagcatcagcctctcctgctctatcctctgcatcgactgccgccattggtcttcgaagaacagccgctcccgcgccctcctctccatcgtctcctggcgctgcgcgtccaagcgcagctgctgctcgaagaaatcgcgcagcaggccacgaacggcggacgtcgacgtctgcgcgtccttcgtgttcctgcttcgtcggggcggctcgtcgtcgtcgccgccgccgccgtcgtcaggttcctcgcgtcccgacggaccggccggccttttcagcttctttctaccgggagcctggaccgcttcggacccttggagctgctgctggctctgcatgtctctgctgcgactcctcctctgaggaagggaagtgaaacggctgccgtctgttccagatgttgcgcgaatccctggtgaaaatgacggtctttagtgacaggcttagagagacaaacatgggcgcaccgatcctgttgcgattctcggcaaccaagtgaatgcgcaggaagagcatggaacgagactgaccttgttgtggcgtccgatgaggctcttcgtcctcgctagcgctccttgagtactcggggtcggggatgcagcgctgctgatctggctgctgctgcgcgtgcccccgagctgcgatgagcactcgctcggtctcctggtcctggctccccgcgcgccgtcagattttgcagtcccacgagcggcgcgagtacataaaggaaacgcgtacgtgctgccggtgctggtgaatgtggaaggcgagatcgcgtggggggcgtctggc

SEQ ID NO: 1693 - DNA, 867 bp, Zea mays
atggggagggtgcacccttgctgctccgaggagaagaaggtgaggaaggggctgtggtcgccggaggaggacgagaggctcgcctcccacatcgcgcgcttcggcgtcagctgctggagctccatccccgaactcgcaggcttgcagaggtgcggcaagagctgccggctgcggtggatgaactacctgcgcccggacctcaagcggggccgcttctcccagcaggaagaagaccttatcatagctctccacaaagcacttggaaatagctggtcccaaatcgcggcgaggctgccggggaggtcggacaacgagatcaagaacttctggaacgcgcggctgcgcaagaagatccggcagaaggaggcctcgtcgtcggcgtcttccacagccgggagcaaagaacccgccgcgagacgcaaccgaccgaacagcaccgaaaacggcgacgaccggataaaaccggcgccgccgccggtgttcaccccctaccccttcgtcccgccgtctcctcgggaccatgtcgccgcggccgcttccggcgcaagcagctgcgacgactattcctccgctgccggcagtttcgtcgccgacccagccgcggcggcggcatgtgccgctgttcatgtagggtacgccactgaccggagtgccgcggccgccgagtcgggggttacgccgacgccgccgtcaatgacgacgagcacgagcgcgtgcactgacgacgcgcggggcagctgcgacgacggcttcttacgggcgatggtcgacgaccccagcttcctgttcggggatttctacctcgacagcgatggcggtcaccatgggcagatcatgagcttctgggaaagccatgcgttcagttga

SEQ ID NO: 1694 - DNA, 2054 bp, Zea mays
gttttagttgtatcttgtatttggagtaccgtgcagtagtatctgggttgtacatgccctgaactgctcgaatttttttactggtagtggtaccctaccggtacgaagcacgaggagaggaagccaaaaaagggcaccccatgctacacccagatctggttggtacgatgcttccgtgaatgcgcgcctaccccgcgcacctgcccactgacacccacctaggccaactgatgcctcggccccatgccgtcctggtccactccccggcgtcacagccgcggcggcgcccgcagcggtggcggcctcgtgggtgactcttgttcttgtcgggggttaaaaaaatggctgccaacggaggcgctgcccccacgtctcgcgctctgattggcccggcgtcgcctctaccggctcgagcctcggtgccgccacgtagtactcctacgcccccccgagctccactgcctatcccaccttccccggatcctctgcgacctgcgacaggtacggcgtggcagtggccagtgggtgtgcgggcgcgtgcaccggcgcagacgatccgggcgagctcggcacttttttatacgtacgcagcggcgctggtaggggacacctgtccgccgccgcactctgacccccgcccccgccgcagcgagacgagatcgcccgcaccaaagcaagccgaggcggcgagcgggacaggtagcggctgcctaccaccgccagcctccgcccacccaacaacagcaccaccaccaccaccacagtccggtcccgtgccttccaattcggtcgtcccacgcatcgattgcgcccgcgcacgcgcccgtcgctttgccgtcttcgaccacccgcaagcaacctatatagcgcgccgcgaattccgcccggcttcctcgtcgcccgccgcagtgagtgagaggaggaggtcgatggatctcaaggacagcgagaggaggggggcggcggggccggggccgctgtcgaggcaggggtcgatctactcgctcacgttcgacgagttccagaacacgctcggcgggacggggggagggctcggcaaggacttcggctccatgaacatggacgagctgctgcggagcatctggacggcagaggagagccaggccatggcgtcggcctcggagcccgcggcgggggcggccggcgacggcggggcggcgctgcagaggcaggggtctctcaccctgccgcgcacgctcagcgtcaagacggtggacgaggtctggcgggacttcgcgcgggaggggacggctggcggtccggagccgcagcccaatcgacagccgaccctcggggagatgacgctggaggacttcctggtcagggcgggggtcgtccgtgacaaccctgccgccgctgctgctgctgctgctgctgtccccgcgcagccggttgcgacgcggccgcttcaggcggtcaataatggcgcctccatctttttcggcaactttggaggcgccaatgacgccggggctggagcgatggggtttgcgccggtagggatcggggatcaggccatgggcaacggcctgatgcctggggtggctgggatggcggctggtgcggtcactgttagtccggtggatatgtcggtggcccaactagattctatgggcaaggggaatggggatctgtcatcgccgatggctccagtgccctacccctttgagggagtgataaggggaaggcggagcggtgcgggtgtggagaaggtcgtggagcggcggcagagaaggatgatcaagaacagggagtctgcagctagatcccgtgcccgtaagcaggcttatacaatggagttggaagccgaagttcagaaactgaaggaacaaaacgaagaattgcagaagaagcaggaagaaataatggagatgcagaaaaaccaggtagaattttgtattaaatttccattattgatgttcctttttcatggcacactaaagatggatgcattcatgctttcaactagtgaatttcattgtgtttttcacttatccagttggagaacttatggaaactaggttgctatgctg

SEQ ID NO: 1695 - DNA, 4059 bp, Zea mays
atgccgtgcctttgcggagcagaaaagcagaggcatcaaccatcaacacacgctatagggtcctcctcccgctgctatttctctaatcgcatgcacatcacgttctcgtgtggaggagggcgtgctgcctcgctcgcacttgttgccattgcggatcgccagtagctaggcggaggcagcagctgaggattaagcagccaggttgcttaattattctgcccgcttcagaattgccgcccgtgatgagtcgtccgtcatccgtgaccttcgataaaagcaggagactttcttcgtcttagcattatccgccgagaaatagaggttagagcgagagcgggagacagttggaggccggccatccattgctggatccatctgttgtccaaggctgctgattaattctgcgacgagggtgcaacttgctttccttggtggcagcagatccagctccaggtgcgtacgtgcgtagcgccgtagcctcgctactagccactagccagcgcgcgctaagcagccgggcatccatgggttcttgcgtgtcggtgtcgtcgacgaggcaccggcggcggcggtcgaggaagctgtcggtcgcggcgaggaagttccggcggaagctgtccacggcgatcgccgccgacgcgccgatcgtccgcggcgccggcagcgcggcgacctgcctcgcccggcacggggtcgtccacgtggaggcgccggactccaacgtcaccctgcgcctcaccaagctgcagtggcagcacagccagatggacgccgggagcgtggtttgcgaagaagcgtggtacgattctgtcagcatcctggagtcgccggactccgacgacgatctcgacaacgatttcgctagcgtcagcggagaccctctccctgatgtcaccggcggctcggacgcaccgcagtgcaaggaggcagcgtgcttcttggacaccatgcagctcctcaggagcatcgcaaacgcagaagcatacgaccaaagtgaacaacctgctgacaagagtgacgacgacgactcgaacgtcgctgccactgcaactaataatagcggtagctgcaataatgacgagggctgctgcagtagtacactgaaggagcttcaggctgcaatgtcgccgcggccgttcccggcgtcggttccgagcaacaaggtccagccgatgccggtcgttggtgtcagcccggtcccgcccccgcaccagcagcagcagcagcagaagaagaaaacggccgtggtcaggctctcgttcaggcgaaggtcatatgagggcgacgagatgaccgaaatgagtggttctgcgaattatctgtaccgcccaagggcaggtttcacggtgccgtgttcgaccggcgagaaactgccacaaggttgctggtcggttcttgagccatcgacgttcagagtccgaggggagagcttcttcaaagacaagaggaagtacccagctccaggctgctccccttacacccccatcggagtggacatgttcgcctacacgaggaagattcaccacattgcgcagcacctctcgcttccgtctctgaagacacacgagacatttcctaccctgctcatcgtcaacattcagttgcccacctaccctgctacagtgtttggcgataacgacggcgatgggataagcctagttctgtatttcaagttatctgacagttttgacaaggagatttctcctcagttgcaggacagcataaagaggctcatgaacgaggaaacggaaaaggtgaaggggttcccagtagacagcattgtgccctacaccgagaggctgaaaatcctggctggtttggcgaaccctgaggacctgcaactgagcaccgcagagaggaagcttgtgcagacctacaatatgaagcctgtgctatctcgcccacaacacaaattctacaagggttcaaactactttgagatcgatctggatgtccatcggttcagcttcatatcacggaaagggctcgagaccttccaggagcggctcaagcatggcgttcttgatcttggtctaactatccaggcacagaaggctgaggagttgccagagcatgtcctgtgctgcatgaggctgaacaagatcgacttcgccaacaacgggcagataccgacgctgataactgcagctgatgagtaaatctgtcctgttactgtaaggcgctaactttctggaaaagcaaaagagactgttgcttttcgagatgctgttgtatagatcggcagatagttgtagggactaactcaagtttgtgagctaagaaacacctaatcactgaggagggaaaagaagatattgcagcaatctgcattctgaactctgaagacgatgtgtatacatgtctgtgttttctttttctttttttgaaacgaaatacatgtctgtatttccagttcaggcttactaatgttgcaggtacatcaccacaccagttctttccttgttccttccatcctcagttagaaaattttcttctcatgagaaaaagacataaaaacgtgaaaagaaaaagacaaataaagaggaaacaaatgtacataccatgcagcacaatcacatgtttagccgaaaccaacaagtcagctcatcttcaacagttgaaatctaatcgaataaacaattatccggcagaaaacacatgcccaaaagaatcaatggtgcagcctctcttattcacacacccagcaaagccacaccacagaggccaatggccagtcactcatttcccggctagcactcctccatcagctgccgagcccccagttccagtagccgtgttcgcagatgaaggggccggatcagccgaagagccgccggcagcggcttcgttgccccggcccggcgggtgcgggtcgtggttgtggcggccggtgtacgtcgtcaggacgcacctggggtcggtggtcgccctctcgatctgcttgcgcacgttgcagttatccgcggtgcacttgtagtagctcctgcatgcgcatcattgagcagagcagtgagcatgcactgagccactgagcaccatcacagataaatggttcagaatgagatagtcggtccactccaagtgaagatttcacctcggccgggggttgcccttgactaccttctgcccgtacttgcgccaccggtagccgtcgtccaggagatccacctcgctccgcgtttggatgatgatcttgggcttcttcaccaccctctgcccgcccacgccgtccgcgcccctgaccaccagaccagacaaccgacagcctgtcacacggttcacgttgcccgcgcgcaggccgggcgacagtaggagtaggaccatgcatgcagagcataactcacatgccaggagcaccctcgacgtcatcctcatgcatcgacgcgtcgtcatcgtcgtcgctcgggccttccgcgtcctcctcggcggcagcgaggccggcatcgttcccaccgccggcgaggccgccttcctgcgggcgcgggtggttgtggcggcccttgtaggtgatctccttgatgagcccgtcgaaggagcgctccacgaccttcttgacggggcacccgtcgcgggtgcacttatagtagcttcgtggtgactcggcgtccttgagctgcttctgcccgtacttgcgccaggtgtaaccgtccttcgctggctgctcgatggccagcggcggcggcggcggcagcgtgtatgagtatgagccgccgccgccgccgaatagcgcggtcgctcgcagctgcatgtcatgctcgtatggattgctggggaagaggacggtgaagttggagtgcggcagggaggaaccaacaaccgtcgctcggggaggaggccattgcggcggctggtctacgtgaaggtacggcgcgtagggatccattctgccgcccagcggcgatggggcgaatgaggtcggttgctggtactggtaggacggcggcggtggcgcgtagtttgccttcattgagaggaaacatatcatactattgtgatctttgaggtatatattattgtcaattgcactgaaacactgcatgtgataattgcatgtttatg

SEQ ID NO: 1696 - DNA, 1569 bp, Zea mays
cgcggctgcgctggcgttcagtgatatgatgccttccgtagtcccgctctctttctcttcttctttataaatgccaccagagccagctagctagctaattaaacaagccaagcgcactgtgttcttccctgcagggtcctgggctgggctggcgctggcgatggcgctagtattagggcgggaggaggagctcctggcgcagctccgcgcgctactgacgttcctaccacctcctgcgtcgcccccggcgccggcggctcccgttaaggtggagtccatcatgggcactagtggcggcggacgacgactggggagcaagagagaccgggacgacgacagcgaagccgaggccgagcagcacggcgacgaacctgcggctgcgcagcctcactattgtcctcatcctcctcctccctgcaaaaggacgaggaggaggaagaataagaagaagcggcagcagagcaagtgccttgtgacgacagtgcccgacttcgacgggtaccagtggaggaagtacgggcagaagcagatcgaaggtgccatgtaccccaggagttactacaggtgcatacagagcgccaagcaaggctgccaggcaaaacggacggtgcagcgcaacgacgacgacggcgccaccgcacccccagagtacacggtggtgtacgtggcggagcacacctgcacggccaacgacgacgcgctggaggccccgccggtcatcctggagaccaccaccagcgtcgtcgtccgtgcacctgcagcacacaccgatcccgtcgtcgtcgtcgttccggcaacggcaactacgtcagccgccgccgccgcctccgcttgttccaccaccgtcaccacggggactgaatctccggcgatctccggcgacgacgtggcctgctgctggagcagcagcggcagtagcagcagcggttacagctacgccgacgactcctgctgctgctgctgctgcgacgggttgctcgccgctgtcgtccacggtggctgcggcggctcgtgggcccccggaccggcggattcggtttcggtgccgtcgttccggttgcaggagatggaggacttgaccggaccgatccggtcgccggtgcacgttgttccccgcgcctggttggaccgttgacccgctagtccctgtgctgcatgcagctcgttgatgagaatgagatgagccagccgctttgctgctgctgctgctgctgctctttcacctagttggtctccgtatcttttagctctggtgtcgatggacgtgcagtttgtctgtactgtgataatggagttgcctggccaggagaacaaaatcatggtagttttggaaccccatttttttcagaagtttttaattttcccaagtgaaattagttcattttttccagaaattagaaatctcattgaaaattagaaatcccgagggaaattattgttctacttacttagtttttctttattttagagctagtttggcaaccctatttttccaaaaaaattccatttttcaagagaaattagttcattttctcttttgtgaaaataaaaatcccttaaaaaaataaa

SEQ ID NO: 1697 - DNA, 1815 bp, Zea mays
gggggttcattaatgtatgtgatttgatgcgctgaggcatcgacatcacgggtgtaagcagctagctgctgaggtctgccttgccttatcgtcgcgattaataaagctgtttctttctctgcttgcattgccaaagccgcggtttgggctctgcagacgtaacgtaacgatgccaaccctatattttgaaaagccaacgagagcggtttgagctcctagtaaagtagtaatagcgtgcctgtttctacagggcttcccgtactgacactgatacctgcctggatattattagtaggatatagtatatattatggtctcaagggctgctaccgattggagggtcaggtcttcattcgcaaaacacagacatttgacttgcgctctccctttctctctctctctctctgtgtatgtgtgtgtgtctcaggttctcagcaaagagcagggaggataagcttggaatgccttggcagtgagagctgcaactgcaacaaagcaaccggcgtccatggtggagagggaaaggggcgagggagaagccagggccctggccagcgggccagggcagcagcagcagcaggaaggagcagcggagggcgagagggtcgagaaagaaggagacgagcgggaggaggaggatcgagacgacgaagccgtggagtggtccgagatacggctcgccatcgaggagctgtccccggcggcccatctcaagcgcgtcgacggcgatggcaaggcggccgcgtcgtccctgcccacgctccgcttcctggcgctgtcgcacctcctcgttcgagtgctcgataagatcgggccgaccatggccgtgctgaggctcgacgtccaacggaacatcgagaggctgcaggagctgtacctgctggacccagccacgtactcgaccctgacggggatagtggagaaggaagtgaaggagggcacagcgaggaaggtcgacagctgcgcaagggcgatcctgtggcttgctagatccatggatttcacagctgcgctgttacagaggctggaggaggactctacgcagcagcagcagcagagcctcgcgcagctcgtggaggccgcgtacgaggccaccctgaagccgtggcacggctggatctcctcggcggcgtgcaaggttggggcgaccacgccaccgcgaatccttttttgtggccgcgcggatagcgtggaagctcatccccgagaggaaggtcttcaccggcatgctgctggggacgggccaggactgctctgcacttgaagacgagatcgggcggctcgcgctgttgcttcggcccttccttgatgacatccactccatgatggccaagttcagactggacaggctcaagtcgacgtgatccatggcgaacccgacgcaagcccaagccatggacatggacatggtccgatccccgtccttcgctgtgaatactgcctgccctggcttccgtcttcgagtcgcatttgcttgcggttaggtctagtttagacgctgctgctctctagtctgtacataggtcttttgcttgtagaatagactcccaagatctgcatgcggtgcccttttttcgtggtaggctacgtttggacagcgcccctcctcaattgcctctgcctgtgccaatacgttggccggccaaactttggctgcccaagaaacggccaactttggcagggaaaatgaactagcaagttgttcacgatgccaaactttggcaggcagcaaccatccaaacatacaagatgccaatagtcaacgaccttttattggtttggctggctggtaatgggctctaaattttacgctat

SEQ ID NO: 1698 - DNA, 4643 bp, Zea mays
atgcatctggacggcgtcgacgacgagctcggaggcggcagctgcgccccctcccccgcgcgctttgagctccaagaggatccttccttctggaaggacaacaatgtgcaggttgcgatccgtatccggccgctgagcggcagtgaggtgtcgatgcaggggcagaagcggtgcgtcaggcaggatagtagccagagccttacctggattggacaccccgagtccaggttcactttcgatcttgtcgctgacgaacatgtcacgcaggagggcatgttcaatgttgccggggtgcccatggtggagaactgcatagctggctataacagctgcatgtttgcttacgggcagactggaagcggaaaaacacatacaatgcttggtgacatagaaaatggaacacggaggaacaatgtgaattgtggtataactcctcgagtgtttgagcatctctttgaaaaagaattaaggagagatgaaaagctcatgtttacttgtaaatgctcatttttggagatttataatgagcagattctggatctgctcaacccaaattctgtaaacttgcagataagggaggatgccagaaagggtatacatgttgagaatttgacggaacatgaaatctccaatgctcgagaagcgctgcaacaacttattgagggagcagcaaacagaaaggtagcagccaccaatatgaaccgagcaagtagccgctctcatagtgttttcacctgccttatagaaagtaagtgggagtcacaaggtatcaagcaccaccgcttttctcgactcaaccttgttgaccttgcgggctcagagaggcaaaagagctcaggtgctgaaggggagcgattgaaggaagctaccaacatcaacaaatcactatcaactttgggacttgtcattacgaacctaattgctgtgtcaaacaaaaagtcacagcatgttccatacagagattcaaaattaacattcctcctccagcttccattccattttgaaagttacacatttgatatttctcgctttctatccagttgtgctgctgagacattaagcacattgaaattcgcgcaacgagctaaatatataaggaataatgctataattaatgaggatgcttctggtgatgttcttagcatgcgtttacagatccagaaccttaagattatcattcatcttaaacttacctgcttttgcagaaaagtaatcagccgtttgcaaggacaattgggttctgataaaacagaaagcattgcctctcatgggtttgtctgcgagtcccctagcacattcaaatgggatcagggtcatggcatgttcactccacttacttttgataaaagggctacacagaggaacgattgtgatgctgcccttgtcgctgcttttaggagggaacaagagaaggaagcacaattgaaggcagtaatagatgcaaagcagactgctgaacagctggtagctcaaaagacagaagaggtaagaagtttcaagatgaggcttaagtttcgtgaagaacggatcaaaagattggagcaggttgcttcagggaagttatctgctgaagcacatcttttgcaagagaaggaaaaccttgtaaaggaattagaggtcctgcggggtcaattagatcgtaatccagaaattacaaaatttgcaatggagaatctacaattaaaggaagagctacgaaggttgcagtcatttgttgatgaaggtgaacgagaaatgatgcatgagcaaatcattgttttacaagataagctgcttgaggcacttgactggaagcttatgaatgagaaggaacctattaacaagggtctctcattatttggggagtcagctggcgatgaggaaaatgagtttcttcgtttgcaggctattcaaaatgagagagaaattgagtcgttgcgtaaaaaaatgacattctgccttgaagcaaaagataatcttgaaaggcatgtcaatgagttgaccacagagttggagcttacaaagaaacacaacaacacatataaagagttcaaggctgcccagctccaggagcaaggagaagcagatttacataacttgtctgacgctcagatggaacttaagactttggttgatgcaatagcttctgcgagtcaacgggaggcagaagctcatgaaactgctatcggtttggccaaagagaatgaagaattgaggctgcagcttaaggttttgattgaggataacaagagattggttgagctctatgaacacactgttgtcaatgttgaggcaaatcaagatggaaaccctgtagatgatctgttgaatgcccaaccagcagccacatcagatttccatgcacataactcatctagtgtggcacaggagtctaagatagtagacgaaaaatgcaccaatgaggacaatttctcaagagttacatctgttgaattgcgtcttcagctggaggagatgcatgaggaaaatgatagacttatggggttgtatgagaaagctatgcaggaaagagatgaattcaaacggaaaattttagagcaaagcgactctgaagctgtaaaacatattcagttggacgagaaagatgtcgaaatgagtgaagcagctgagaatcctgaagtgaaacatattcatgactccacaattgcagctttgaaagaagtgctgcagattgttcggagtaagttggagcttgtccaagataaggttgtgtctgctcaggatgcagtaaaatattttaaggcactcgaaatagctagtggtaaggccgaagaactttctgcaagaattgagcttcagcgtctaggtgcgcagcgtggtcaggaagaaatcactttcctgaagtctgtgctatcagaatcacagaagaagaaaaatgcttttgaaggcaagtatttcttgcctgcagcatcatgttggaacttggttttgaagaccaaaagtcttgcggagtccaagtttgatgccagctttggatcaatgaatcagaagaaagaacagttgaatcatctccaaactcgcaaaattgaactatctgctgcaagaacgagagcacgtgaatctgaaactgagttgaaaagcaaaattgatggccttaaagcgaaacttcgcgctcatgaagctcaaagaaaggaggaagaaaaggtcctgtttgctattgataacctggatacttccactacactaatgcataaacccaagaactatggcaaggcaaccgacctgctgaaatctgaggaggatcggatgaagcttctgtgtgaactacagaaggcccgcgaacagcgctccatggtacataaggaaataagaagcatgaatgagtgtgattatattgatcgtgagattggagtccttgaagcagaaatagaggattcctgcatctccatactggaaactgacattgagaagtttgtccgtgacaacactttagcagagatttgggagggtagcgcaaaggatctggaggcattgctggtcgattaccaagactgtgttttccaagtcaacttgaaggaggaagagatcaaggtgtgcagtgagtccttgcagtatcaagccagggacatggataaacttcagtcgaagctgaaccaagcgatccgggagctgggtgagcttctgcaagatagaagaagcctaaccgcttgcagtctggatgaacccacgctgcccgttggtgaaaaggtgtgccagccggcggcaacctgtgcggggagcgccaagggctccaggaaagaatcggcggcgggctcgcgatcgggaaggggagcggggcgcatgcgcgagcactggcacggcgacggcgacggcgacggcgaggacgagcatgagccccagccggggtgcggggagggcgcggggcaggcggcggcgaactgcgcggcggtgtgctgctgctgcccgctggcgctgctcgacgtgctgctgctcgtcaccgtccggctccccgcgggcgtcatgcggcgggtgaggaggaggcgccggcgccgccgcggccacggaggtgccggagccaaccggaagaggccggcgcccgcgtcgccttcgggaagcagcggcaaggcgatgatcggagcggcgacgctagacatcgacgaggaggcgcgcggcgaggtggagtcggcggcggcggcggagctggagcgcgagatcatgagctcgcacttctacggcgccggcttctggcgcagcgtctcctccaactccagctcctcgtccaggcgctaccaatagatgcgcgttctggcgtaaatagtgagcactcggtcgctactaaactacccacgattactccatctgttcttggagtctcctccaactgccagtcagcgcagcatgcatggcaaaaggagcagcagccttcggcatcgtgcaagtgcacttattctgaatggacacgtgcgaaactggcacgtgcgggttgcatcattgtactgctacgccattgtctcgagcatggaccacgccagcagctgcagcttgggatggagaagcgaaaggggtcagtgattgtgcttaggtttttcatctctctcctaatcttttttgtgtaactggagcaggaaatgctgaaacctcaagcttctgtccaaacgatgtactcctatttagtattattgattgattgagaggccgatcga

SEQ ID NO: 1699 - DNA, 1450 bp, Zea mays
tgcctcgtccgcttctctctcacccttcctccccctcctctccctccctctccgcctccccccccccccccccccccccccaccccaagcccaaatcaccgggcctcgccccacagcaccggttgcgtgggaggaaggaggggaggcggctgtcgggcgagatgagcgactcctactgccccgactgcaagaagcatacggaggtggcgttcgaccactcggcgggggacacggtgtgcaccgagtgcggcctcgtcctcgaggcgcactccgtcgacgagacctccgagtggcgtaccttcgccaacgagtccaacgacaacgaccccgtccgcgtcggcggcccctccaacccgctcctcaccgacggcggcctctccaccgtcatcgccaagcccaacggcgcccagggcgacttcctctcctcctccctcggcaggtggcagaaccgcggctccaaccccgaccgatccctcatcctcgccttccgcaccatcgccaacatggctgacaggctaggtcttgtggctactattaaggaccgagcaaatgaaatcttcaagaaaattgaagatctcaagtctattaggggaagaaatcaagatgccatattagccgcatgtctatatattgcttgtagacaagaagatcgccctagaactgtgaaagaaatatgttcggttgctaatggggccacgaaaaaagaaattggcagagccaaagaatttatagtgaaacaactggaagttgagatggggcaatctatggagatgggaaccattcatgctggagattttctgaggcgtttctgttcaactcttggaatgaccaatcaagctgttaacgcagccaaggaggcagttcagcgctcagaggagcttgatataaggaggagcccaatctcaattgcagccgccgtcatttacatgataacccaactctcagaggacaagaagccacttaaagatatatccttggctactggtgtggcagaaggcaccatcagaaattcgtacaaggatctgtatccctacgcctcaaggctcatcccgaatacctacgccaaggaagaagacctgaagaatctctgcacaccttaggaagctttactttttttcccttctgttatataaatcggaattagatttgtcaaagaggagtgagtgaagttgttcctgttgtgaccgactgtactgagcaatgtgtcgtcgccggcgcgcttaactttgtggatggaccaatgagaacataagttgtcatcatcagatcgaatttcttttcagagcacctgccacctgaagatttttttgggatagcaaaggtgtcgttttcgtatactccctttgggaaaggatgtagatagcaagcagtccttggaagtgcacaagattttatttaaaagaacaggattctgttccccatcttcagaagaaaccgtcatttatccatc

SEQ ID NO: 1700 - DNA, 582 bp, Zea mays
aagcagcgctacttgtgctcccccaacgctactaccgccgctagctggttcaagtgcggcgagcggagccggagaccggtagaggaaattaagaggcgtcgatcgggcatggggtgcgacgacaagtgcgggtgcgccgtgccgtgccccggcggcaaagactgcaggtgcacgtcggggagcggcgggcagcgggagcacacgacttgcggctgcggggagcactgcgagtgcagcccgtgcacgtgtggccgggccacgatgccgtccggccgcgagaacaggagggctaactgctcctgcggggcgtcctgcaactgcgcatcctgcgcctcggcctgatccgtgcgcctcgccctcgtgctaccgcgctgcctagtggagggagttgtctactgtccagtgaggatctggacgaagcaactagcgctacttctagtagagtacgcgcatgaggataataaaggggcttgtgtcatgctcgccagacgcatcacgcgctgcatctgcatcgtggtatcgtgtagtaagtttgtgtatgaataaacactaccactttatgtccaaaaaaaaaaaaaaaaa

SEQ ID NO: 1701 - DNA, 1617 bp, Zea mays
gtacgtggatcgatactggccggtgaatgagcctcctgcttccttccttatagacgtcgctgccttgccttgccttgccttgcgcgcaactagctcagcacttgccaagaagcagcccctcgtagacgtcgctgtcgtcgcatcgtataagtaggagcgcgcgtgcctcttcccggttcaacctggttcaaacacctcgcttcactagaggaataatctagcagcttctgttgcctccaaattgtccggagaaaggagttgaagcagtgtgagagggccctgagacgatggcgaacctgttcctcaagcaggcaaagcagtacgtggcgacgcggccggtctacccgccggagctcttcgacttcatcgcctccaagacccctcgccgcgacatggcctgggatgtcggcaccggcaacggccaggccgcagcgtcgctggcgaagctgtacaagcacgtggtgggcacggacacgagcgcgcagcagctcgcctacgcgacgcgcctcagcaacacccgctacgtgcacaccccagcggacctgcccctggaggggatccacgccaccgtggccccgccggcctccgtcgacctcgtcaccgtcgcgcaggccttccactggctcgacctcccgcgcttctacgcgcaggcccgctccgtgctgcgccccggccacggcgtgctcgccgcctggtgctacaccgagccacgcgtcaacgccgccgtcgacgccgtgttctggcgcctgtaccacgggtcccagggattctgggcgcccaaccgccggatggtcgacgacgagtaccggagcgccgacttcccgttcgacccggtcgagggggagaagcacacgggcccgttccagttctccacgcaccgccggatggacctcgatgactacctcatgtatatcacgtcctggtccgcctaccagactgccaaggataacggcgtcgagctgctcgatgcgcccaccgtccaggagttcgcggcggcgtggggcggcgatgccaaggaggtgaagaccgtcacgtaccccatcttcctcaggattggcaaggtcaggtcggagtgagctgcacggaaaaatgaaactcgacaaactatggatacactacggacgctccgacgattgatgatcgatcatctaggaatcgatgcttataacctttttgaataatgttttattcgattgcaaatgtttgttcgatctgcacaattgtatttcaaattctaatgcatgcactattctgttcgactttttttttctttgtgtcttcttagatagtgtaaatttcaatatctgtactgtgatgacaaaatatccacaataacccacgtggctgaaatctttggtcttcatatatgtcatacttggctaagtaaaactctttgagaaatcgttttagcaatatcactaccgaaatcgtgtttttttgcctgagtgtataagacactcgatagatttttttctttgtgtcttcttgatattgtaaatttcaatatttgtactgtgatgacaaaatatccacaataacccatgtggctgaaatctttggtcttcatgtacgtcatacttggctaagtaaaactctttgagaaatcgttttagcacc

SEQ ID NO: 1702 - DNA, 3386 bp, Zea mays
ccgcgaccccaggtcagtcgggactacccgctgagtttaagcatataaataagcggaggagaagaaacttacgaggattcccctagtaacggcgagcgaaccgggagcagcccagcttgagaatcgggcggcctcgccgcccgaattgtagtctggagaggcgtcctcagcgacggaccgggcccaagttctctggaaagggacgcctgggagggtgagagccccgtccggcccggaccctgtcgcaccacgaggcgccgtcaacgagtcgggttgtttgggaatgcagcccaaatcgggcggtaaactccgtccaaggctaaatacaggcgagagaccgatagcgaacaagtaccgcgagggaaagatgaaaaggactttgaaaagagagtcaaagagtgcttgaaattgccgggagggaagcggatgggggctggcgacgcgcaccggccgtatgcggaacggctcctgctggtccgccgatcggctcggggcgtggaccgttgtcgcccgcgccggcggccaaagcccgggggccctaggcgcccccggcagccgtcgtcggcgcggacggtatccgcgcgcctctggcgcgcccctcggggcgctgcgctgcaacggcctgcgagctccccatccgacccgtcttgaaacacggaccaaggagtctgacatgcgtgcgagtcgacgggttcagaaacctgagatgcgcaaggaagctgacgagcgggaggccctcacgggccgcaccgctggccgaccctgatcttctgtgaagggttcgagttggagcacgcctgtcgggacccgaaagatggtgaactatgcctgagcggggcgaagccagaggaaactctggtggaggctcgaagcgatactgacgtgcaaatcgttcgtctgacttgggtataggggcgaaagactaatcgaaccatctagtagctggttccctccgaagtttccctcaggatagctggagcccacacgagttctatcgggtaaagccaatgattagaggcatcgggggcgcaacgccctcgacctattctcaaactttaaataggtaggacggcgcggctgcttcggtgagccgtgccacggaatcgggagctccaagtgggccatttttggtaagcagaactggcgatgcgggatgaaccggaagccgggttacggtgccaaactgcgcgctaacctagaacccacaaagggtgttggtcgattaagacagcaggacggtggtcatggaagtcgaaatccgctaaggagtgtgtaacaactcacctgccgaatcaactagccccgaaaatggatggcgctgaagcgcgcgacccacacccggccatctgggcgagcgacatgccccgatgagtaggagggcgcggcggccgccgcaaaacccggggcgcgagcccgggcggagcggccgtcggtgcagatcttggtggtagtagcaaatattcaaatgagaactttgaaggccgaagaggagaaaggttccatgtgaacggcacttgcacatgggtaagccgatcctaagggacgggggaaacccggcagatagcgcgatcacgcgcgtcacccgaaagggaatcgggttaagatttcccgagccgggacgtggcggcagacggcgacgttaggaagtccggagacgccggcgggggcctcgggaagagttatcttttctgcttaacggcccgccaaccctggaatcggttcagccggaggtagggtccagcggccggaagagcaccgcacatcgcgcggtgtccggtgcgcccccggcggcccttgaaaatccggaggaccgaattccgtccacgcccggtcgtactcataaccgcatcaggtctccaaggtgaacagcctctggccaatggaacaatgtaggcaagggaagtcggcaaaacggatccgtaacttcgggaaaaggattggctctgagggttgggctcgggggtcccggccccgaacccgtcggctgctggcggaatgctcgagctgctcgcgcggcgagagcgggccgccgcgtgccggccgggggacggaccgggaacggccccctcgggggccttccccgggcgtcgaacaaccgactcagaactggtacggacaaggggaatccgactgtttaattaaaacaaagcattgcgacggtcctcgaggatgctgacgcaatgtgatttctgcccagtgctctgaatgtcaaagtgaagaaattcaaccaagcgcgggtaaacggcgggagtaactatgactctcttaaggtagccaaatgcctcgtcatctaattagtgacgcgcatgaatggattaacgagattcccactgtccctgtctactatccagcgaaaccacagccaagggaacgggcttggcggaatcagcggggaaagaagaccctgttgagcttgactctagtccgactttgtgaaatgacttgagaggtgtaggataagtgggagcctccgggcgcaagtgaaataccactacttttaacgttattttacttattccgtgggtcggaagcggggcaccgcccctccttttggctccaaggcccggcctcgccgggccgatccgggcggaagacattgtcaggtggggagtttggctggggcggcacatctgttaaaagataacgcaggtgtcctaagatgagctcaacgagaacagaaatctcgtgtggaacaaaagggtaaaagctcgtttgattctgatttccagtacgaatacgaaccgtgaaagcgtggcctatcgatcctttagaccttcggagtttgaagctagaggtgtcagaaaagttaccacagggataactggcttgtggcagccaagcgttcatagcgacgttgctttttgatccttcgatgtcggctcttcctatcattgtgaagcagaattcaccaagtgttggattgttcacccaccaatagggaacgtgagctgggtttagaccgtcgtgagacaggttagttttaccctactgatgaccgcgccgcgatagtaattcaacctagtacgagaggaaccgttgattcacacaattggtcatcgcgcttggttgaaaagccagtggcgcgaagctaccgtgtgccggattatgactgaacgcctctaagtcagaatccaagctagcaaccggcgcctctgctcgccgcccgccccgacccacgttagggcgttcgcgccccaagggcccgtgccattggctcagcccgcccggccgacgcgccgcggcgggccgcctcgaagctcccttcccaacgggcggcgtgctgaatcctttgcagacgacttaaaacgcgacggggcattgtaagtggcagagtggccttgctgccacgatccactgagatccagccccgcgtcgcacggattcgt

SEQ ID NO: 1703 - DNA, 1342 bp, Zea mays
atatttttttaccccatttaactcggaagcggatggaaagaagattcagatccagctgacagggttcatggaaaagaacacagtgaagttcatgaaggagctctggagccttctcctcagtgcgcagcagaatgccagtggggtgcctcaacagtttctggatgaaaaggaggctgagatacatcagaaaaaggcataggatgacaggagtgcgcaggagatccaaaagaagccagaaaaggagggaatggactcagaactggaaaagaacaaaacgatggatggggatgttggtaactcaagatcctatggtgatccagttgcctctgctttaaacagtacaaatttcaatatcgaggaagaaaaggacaatgatttcaagcgcacctcaagaccaaaaaataggttcgttatcactttcttgcataatcttgtagggttttactacaacttagatgcatgctttgcattagatgctgttactaggtgcccatatttaggttgtaaggatgccacaaaaatgatgcttgatgttaaggagatattcacatgccaaattcaggttgaacttccaaaaaccaatccagtatacctcatgctacgcacatcatttggtttctcagctaaaggaaccgggcttaaagctcttgaatttgccctctccatctgtgacagttttgatatgtatggcttcaccgtagacccaggttacaaggaatggacaaggtacttctcagaggtaagaaagggacacactccactacatggtagagcatattatcagatgatggaatgtcttggtctggtgaaaatccattcaccgatgcaaggagatcctggcaggacagtgaggtggctgcctaccaaggctaccatcgaggctgctagagttgcttccgagaagttgttgaagagacctggtgctggaagtgatgatcctctggggacttgcaccatgataaagaagcgcaggaaagggaaggcgccaaacagatctggtctacgagatgctgccatgaagcacctcgaggacatgaaaggtgccaccaggtatcccttggagcgaaatgcagggggtggttacctctgcatgatcaatgatagatacgaccgcggctgattatggcatcagtgccccctccgcccctcccctccacttgagtcgaagaaaggaatgcttgtgataaacttgcagtttgagggaacgaaaaggtcgattctttgatttatgcagctggtgtacaacgtttgagtgtagtgaaagttaggtgtaatgttttgagtgtagagaaagctatatgttgtggatggatacgaatggtcaaattgtagcacttttggt

SEQ ID NO: 1704 - DNA, 744 bp, Zea mays
atgatgagctatcaattagatgttttttttctgattctattcaatcggcttctttttccttctgcttcttggggcattacaaacaatgaggtactcatgacttcaaacatggcccgaatgtctgatattgactggtgtcaactagtttacacggatttgtgtgatgctgccgcacgttggcataaaaggaacaaaacaaacatcacggcaacaatatatggatgctcactcattgttctgatttactaccttgatcacctacatcaccctgcatctcctgttaacaaatatggtactccacgcattaagttttttgacaatgagaccataaaagagttggctcgtggtgacaggcgccccccccgtaaaactggtgaaccattcggatatgcagagtttcgtagccgttcagaaacgtgttacgtcattgctccagaacggcctgcttctgccgttttcaacatatatgtgccacatatcaagaatttgattggcaacaagttgcaatgtttgccctcccagcagcgtccaatgtttcaatcattgtttgatgctcatgacaaagaggtggataaatactgtgattccctacagctgagccatcagatgattgtttcgaagcagattgaactctctgaaacatttggtgaaatgatcgatgaagttttgagagctgcaacgcagcgcgattcacagccagaagataacccccccccccactacctcaatgcctccaacaaatga

SEQ ID NO: 1705 - DNA, 1329 bp, Zea mays
ggaagaaaaaaaaagagtcgatagctggcaggaatgttagttgagttttcgttttctttaataaagaagacgaaatatccgttgagctgaaactggcagagcagcctgccctgcctgaaaccacaagcggcctggaaaaccaggagccgagccagcaggaacgaagaagacaaaacagaaggcgggggcctccggtttggttcccctccctccccgttcccaggcttccagtgggcagggcagccactggttccactcgtccgttcagctataagttagtcgagacacggccttgcactcagactcatcatcagttcaattcaatccaatccaatccaatcccaccccgccccttccaagaactctagtatcaaccaaccgtccaacaaaagcaggagtcgcatccgaccccccgcatcagagacaggcagggagggaaccgagatccgtccgtccgtgtcgatggagtcaacggtggagcggataagctcgtcggtgcagtcctgggtgaaggaccacgagctcgcagccatcggaggcgtgtgggctgcggcggtgggcacttcggtggcgtacagccggaggaaggcgccgcagcggggcacgggcctgcgcctcatccacgccaggatgcacgcgcaggcgctcacgctcgccgtcctcggcggcgccgccctcttccactactacggcgacggcgggcgcaggaagagggccgacgacatcgacctcgacttctactcgcagctgccgccggccaccgacgccgacggcaacgagaaccagcggtggagctggtaggaggagaaggaagaactgtagcagactagcagtgggtgcttgcagcaataataattgaggtggggccctatgacgtggcgggcgggagggattagtctgtgctaatcctaatccatccagctcagacaagacgacgggcggcccgtttacttaacattatcggtccatgctgtcatggccggcaccacatccacatctactagtcatctaggagcagccgcccatagctgctgctgctgctgcttctctcctgtgtcacagtactactaccaccaccatttgtttatctgatgaatgaacggtgacgatgatgacgatattgtttatatcacggtttcatttttttttttgcactcttcgtttttctgtacccataatcggccgtctgttttctgctacacgtggcaatcacagctagcgaaacgtgtgtgccgtggagccacgtgtaggtgacgtgacatgctttgtatgtataccacatatgacatctctgtatttctcttcaacctcgagctcggaccagctgac

SEQ ID NO: 1706 - DNA, 2119 bp, Zea mays
ctgctgcagcagcagcttcttcgtcttcgcgccattactcacctcgacccgtggtcccggatccccggccccggccggctctccctactcacgtcttctccatcgtcccgcgcctataaatccgccgtcctgcaccgcgacttcccacacaccttagctcttgctcagtgttcagctagctcacacactatactctgctctcgttccttctctagcagcacgtacacgttgtggtgtagctggatcgatcaacaagaaccccagccacgaatccacgatagcattcccatggcgtcgttgaatcagcatcggtccatggccacggaccgagagctgttccggacggtgcggcaggcggcactgaaccacgcgaggcagctgtaccaccggctggtgaggcgcctgccgcacctcctggccgtgacgctggtcgtgggcgcggtccagctcgtgccgccgtcgtccgcgccgctgccgccgctcggggcgctgctgcgcgaggcggcggcgcgcgcgcgcgccgacgcggggctcgtggccgcggcggccgcggggctggcggcggcggcgtgcgcgtacgcggcgtcgcgcccgcggcccgtgtacctggtggagctggcggcgtaccggccgggccccgcgcaccgggccacccgcgccgagtccgtgcggcacttcgcgcgggcggggcggttcacggacgagagcgtggcgttccagacgcggatgctggagcgcgcgggcgtcggggatgccacccacttcccggcctccatcctcgcgttccccgtggacatgagcctccgcgccgccagggaggagtccgaggccgtcgtgttcggcgtggtcgacggcgtcctggccgccgccgccgtgcgcgcggcggacatcggcgtggtcatcgtcaactccagcctcttcagccccacgccgtccttcacgtcgctgctcgtcagccgctacggactccggcacgacgtcgtcacccacaacctcagcggcatgggctgcagcgccagcatcatcgccattgacctcgccaagcacctgcttcaggtgcacccggagacgtacgcgctggtggtgagcacggagaacatcacgctcaacgcctacctgggcaaccaccgcccgatgctggtgaccaacacgctgttccggatgggcggcgccgcggtgctcctctccaaccgccgcgccgaccgggcccgcgccaggtaccggctggtgcacacggtgcggacgcaccggggcggcgccagcgacgagagctacgcgtgcgtcacgcaggaggaggacgccgagggcaacgtcggcgtctcgctctccaggggcctcatgtccgtggccggcgacgcgctgcgctccaacatcacggcgctgggcccgctcgtcctcccgctgtcggagcagctgcgcttcctggccgccgcgctgctccgccgcgtcgccgcggtcaagccctacgtgccggacttcaagctcgcgctggagcacttctgcatccacgccggcggccgcggcgtgctggacgagctggagcgcagcctcggcctcagcgcctggcacatggagccgtcgaggatgacgctctaccgcttcggcaacacctccagcagctcgctctggtacgagctcgcctactgcgaggccaagggccggatcaagagaggggaccgcgtctggcagatcgcctttgggtcgggcttcaagtgcaacagcgccgtctggaaggcgctacggacggtggacgacgccggccgccgggacaccaacccctgggccgacgacatccacgacctgccggtgcacgtgcccaaggtgtcgcccttcgcttcttccgaccaggcgccgcccaccaacgcccagcatgcctagctatagccaacgttgcccgtgctacgccaatcttgcttctgctgctactacctacgtatactgtatgccccaagcaaagaaccggagcatgtgcctgcacttctgcttattggccgccattgttatcatcattgttgttactaattatacagggcattattgctcagtttgtactgctacgaattacaattactagtagtgtgtaaatcgcaatggactgtctgaattagaattataataa

SEQ ID NO: 1707 - DNA, 1779 bp, Zea mays
caactgatgatgcccccctgttcctcctgtcatcttctcctcctcagaaacccaccaaccccgtccagccgccggctgtctcggccgccgccgccgccgccgccgccctatcccggtccttcaggcgaaccaggttggtcatggccttcaacaagatcaaggtctccaaccccgtcgtcgagatggacggcgatgagatgaccagggtgttctggaaatctatcaaggacaagcttatattccctttcgtagacctcgacatcaaatattttgacctcgggcttccacaccgtgatgctaccgacgacaaagtcacagtggaggctgcggaggccacactcaagtacaatgtggctatcaagtgtgccaccattacaccagatgaagcaagggtaaatgagtttggcttgaaggctatgtggaagagcccaaatggcacaattaggaatattctgaatggcactgtgttcagagaaccaatcatctgcaaaaacatcccacggcttgttccagggtggacaaaacccatttgcatcgggaggcatgcattcggtgatcagtaccgggcaactgatgcagttatcaaggggccagggaagcttaaattagtttttgagggaaaagaagagcaagttgagctggaggtgttcaacttcactggtgcaggaggagttgccttatcaatgtacaacactgacgagtccatccatgcctttgctgacgcttctatggccactgcttatgaaaagaaatggccattgtatcttagcaccaaaaacactattttgaagaaatatgatggcaggttcaaggacattttccaggaggtgtatgaagctggttggaaaaccaaatttgaagctgccggcatatggtatgagcaccgccttatcgatgacatggtagcatacgcacttaagagtgaaggagggtatgtctgggcttgcaagaattatgatggagatgtgcagagcgatttcttagctcaaggttttggctcattgggtttgatgacttcggtactggtgtgccctgatggaaagacgatcgaagctgaagctgcccatggtactgttacccgtcattaccgtgttcaccagaaaggaggtgaaactagtacgaacagtattgcctcaatctttgcgtggacaagaggacttgcacacagggcaaagcttgatgacaatgctagactacttgacttcacccagaagcttgaggctgcctgcgttggagccgtcgagtctgggaagatgaccaaggaccttgcccttctcgttcacggatcttcaaatatcacgaggagccattacctgaacacggaggagttcattgacgctgttgctgatgagctcagatcaaggctggcagccaactcgaacctttgaaatccttgccgaagttgtggtgctttcctgcgcgacgctttcgaaccgtttttattatgtcgccattttctttccctgtgccaccaccctgatgaatgaagaaggcctgagctaggcgaacatctgcaggctgcagcagtatgccaaatcattatcattaccgttaccattaccaattggagattgccgtagatttccgcgattatgggaactcatttacctgattatctgatacgtttgaaataaaaggtcgcccattagaatgatttctggttgtctcttcatctgtgcccgatttcgtgctagccattggatttttgtcaatttcaaaatacacgttaccggctttcatcgttctaaacgttggaattggtttgtgacaccttttctg

SEQ ID NO: 1708 - DNA, 1589 bp, Zea mays
cgcgtctgccggccaaccactgcgggccgcagagcatggccgggcgcgaccgccgcggggccttcctggcctcgtcgtcgtcgtcggggtcagggtcggggaggcgggcgccggagcacgagtggtggccgcgcagcccagcgtggtcgcgcccgctgtccgacagcggcggagcccgcggacgcaagagcggctcctccacgtcctcctcctccttcaggtccctgttccgctccatcggagtgtggttcagctcgctctctaccgcgtcgccgtcgcccgcgtcctcgtccatgaagcagaagagcagggacgccggggccaagaagccgcctttgccggggtacgccgggacgaagacgtccgcgcgcgggctgtacagcggcggcggcggcggcaggcagcaccggccttcgttccagaactccgtcttctccattgaggagatccttagcgccaccaacaacttctcgccggcgctcaagatcgggcagggtggcttcggcgcggtctacaagggcgtcctccccgatggcaccgtcgtcgccgtcaagcgagccaagctgcggatgcagaaccctcacgtggacgtggagttccggagcgaaatcaagatcatggcgcgcatcgagcaccagagccttgttcgcttctacggctacatggagtgcggcgaggagcgcatcgtcgtcgtcgagtacgtccctaacggcaccctccgggagcacctcgacagtaagcgaccacctgccattgctgctgctctgcttccaactccatctgccatctctcacctcgcaagaaccaactccaaccaagcagggtgcaacgggcggttcctggacttcggcacgcggctcgacatcgccatcgacgtcgcgcacgccgtcacgtacctgcacatgtactccgaccaccccatcatccaccgcgacatcaagtcctccaacatcctcctcaccgactcgatgcgggccaaggtggccgacttcggcttcgcgcgcctcggcgccggcctgggcgccggcggggaggccacgcacgtcaccacccaggtgaagggcacggcggggtacctggacccggagtacctcaagacgtgccagctcacggaccgcagcgacgtctactcctttggcgtgctcctcgtggagctcgcctcggcgcgccgcccaatcgagaccaagcgcgagatgaaggagcgcctcaccgcgcgctgggccatgggcaggttcatcggtggcgcctcggccgacgtgctggacccgcacctcgcccgcacgcccgccgccgaccgcgcgctggaggcggtgctggagctcgcgttccggtgcatgggacccgtcaggcaggacaggcccgccatgagcgactgctgcagggcgctctgggccatcaggaagacgtaccgggacatgctcgccgccgatgccacgccgcagttctccgatcggcgggccaccaccagcagcagcagcgccgacagcagcggcgacctctggaggatctgatcgttccaaggtcatgaatcctgctagctaagctgctagctgattttgtttgactgaaacacttaagtttgctgtaaa

SEQ ID NO: 1709 - DNA, 1320 bp, Zea mays
atggtagggaagctgccacagcaccgccatcaccatggctcctcctcactcggggcagaggagctcaacctcttacacatggccagggggggctccccgccggacggtggcggtggaggcggcgagagccggggcgcgctgggccagtggaagtgcaggctgctgggctccctccgtccgtgccgcgcgcgctgcgtggtgtgcctgcaggtgcagcacgtcaccggcctgcccccggccgcggagggccacgggctggtggtgggctggcggagcaagggcggcgagggggagcacacggcgcctgcccgggttgcgcggggcgccgccgcgttcgacgaggtgttcctgcagcacttcaccgccggcagcgccacgctgcggggcttcaccgtgtgggcggcgctcctggacgcgcctgccgataatggggatctcggcgcgttccccgtcgacctcgccgaggtcgccgcggccgcggcggagacctccaactccaacgccagcaagttcggaggcaaggcgctcagcttcccgctgggcggggcggcggccggtgcggtgctcagcgtcagcgtctactgcagagtgatggatcagcacgaggacagccatggggctgctaacaataatgcaagagagaagaaaaagaacaagggcaaagcaggctcctacgcctcctgcctgccggacctgagctgcctccgcaaccggcaggtggcggcggcgtccggcgggtcggcgcgccgcgccccgtccatccgctccgatcgcggcggcttcatcaccatcgagaactccatgtccgagataattggcggcggcggggcggccttcggcgtggcggaggacgtggacgagggggcggaaggcgcggggttcatcacgatggaggagggcagggtgtcgtcgaggcggccgctgacgccggacacggtggcgtcggaggaggaggacgagaagccgtgcctgttgatggagctgtcgtcggaggaggcggcggtggacgtggagaaggtggaggacgagttcctggcgatgctggaggacaggtacttggcgaggagcaaggagatcgagaaggggctgggcgtgagcctggacatcgggctggacctgggcctggacctggactcgctcatcaaggacgccgagatggagctcgccaaggcggagcaggcgtggaagagcaaggtcggcgccgccatcgtggaggaggaagagtacagggagctagtccggaggtggagcgccagggagaccgccagccaccactctgcgggctgctcctggggctttggattcgggagcccgatctga

SEQ ID NO: 1710 - DNA, 3846 bp, Zea mays
cgctatgctctgatcttcccctatctctcctcgctgcgcacagagcagcggctgccccccgaaagcaaccacagtcacgtcgctatcgccagcgccaccagaaaaacgcatcccacgcagaacccctcgcactcctactccctctctgcctccctttcctctccttgtgcccgtcgcattgaaatggagcagcagcagcagaagcacttgcgccggtgctagctgcgacgtgagcccgcagcagccactgccaaggacttcctggcccgcccggcttcgctgttgccggaaaggcggtggctttgggggaagcaaaagcaagcgacggttgcggaaggttcttgcggattcgcgcgcgggaggaatggcagcgcggtcgtcggcggcagcggtggcggtgctgcttcttgcggctgcgggggctgcggcggcagcaggaggagcggagggcgatggggacggccaggcgctgatggcggtcaaggcggggttccggaacgcggcaaacgcgctggcggactgggacggcggccgcgaccactgcgcctggcgcggcgtcgcctgcgacgccgcctccttcgccgtcgtcggcctgaacctgtcaaatctaaacctcggaggggagatctcgccggctatagggcagctcaagagcctacagttcgtggatctcaagctgaacaagctcacaggccaaatcccagatgagattggggattgcgtctccttaaaatatttggatttgtcgggcaacttgctgtatggagacatccccttctccatctctaagctcaagcaacttgaggacctgattttgaagaacaaccaactcaccggacccatcccctccacactgtcacagattccaaatctcaagaccttggatctggcgcagaacaaacttaccggcgacatccccaggctcatctactggaatgaagtactacaatacctaggcttgaggggtaactcactgactggaactttgtcacctgacatgtgccaactgactggcctgtggtactttgacataagggggaacaatctcacaggaacaattccagagggcatagggaactgcactagctttgagattctggatatttcatacaaccaaatctctggagaaataccatacaacataggttaccttcaagtagccacactgtcacttcaaggaaatagactgattggcaaaattcctgaagtgattggcctcatgcaggctcttgctgtcctagaccttagtgagaatgaactggtggggcctattcctcctatacttggcaacctgtcctacacaggcaaactctatttacatggcaacaaactcactggacatataccaccagaactggggaacatgagtaaacttagctacctgcagctgaatgacaatgaattagtgggcacaatcccagctgagcttggcaaactcacagagttatttgaattgaatcttgccaacaacaatcttgagggccatatccctgcaaacatcagctcttgcagtgcactgaacaaattcaatgtgtatggcaatagactgaatggctctatccctgctggtttccagaagctggagagtttgacatacctaaacctttcttcaaacagtttcaaaggccagattccctctgagcttggtcacatagtcaacttggacacactagatctttcctacaatgaattctccgggccagttcctcctactattggtgatctcgagcatcttcttgaattgaatttgagtaaaaaccatctcactggatctgtgcctgctgaatttggaaacttgagaagtgtccaagtgattgacatgtccagcaacaacctgtctggctacctccctgaagaacttggacagctgcaaaaccttgatagcctgattcttaacaacaacagtttggctggggagatccctgctcagctggctaactgcttcagtttagtcagcctaaacctgtcatacaacaacttctctgggcacgtcccgtcatcgaaaaacttctcaaagttcccaatggagagcttcatgggtaatctgatgctccatgtgtactgccaagactccagctgtggacattctcatggaaccaaagttagcatctctcggacggcggttgcctgcatgatcttaggcttcgtcatattgctctgcatcgtgctgctggcgatatacaagaccaaccagccacagctacctgagaaagcatccgacaagccagtgcaagggccaccaaagctggtggttcttcagatggacatggccgtgcacacgtacgaggacatcatgaggctgaccgagaacctgagcgagaagtacatcatcggatacggcgcgtcgagcaccgtgtacaggtgtgacctcaagagcggcaaggccatcgccgtcaagcggctctacagccagtacaaccacagcctccgggagttcgagacggagctggagacgatcggcagcatccggcacaggaacctcgtcagcctccacggcttctcgctctcccctcacgggaacctgctgttctacgactacatggagaacggctccctgtgggatcttctccatggtgaggccgggttcctgagctctctttcttttttttttcttaattcatgtcgcttcgtccttccgataacccacgggccacggccattcccaggcccgtcgaagaaggtgaagctggactgggacacgaggctgaggatcgcagtgggcgccgcgcaggggctggcgtacctccaccacgactgcaacccgcgcatcgtgcaccgggacgtcaagtcctccaacatcctgctggacggcagcttcgaggcgcacctgtccgacttcggcatcgccaagtgcgtgccggccgccaagtcccacgcctccacctacgtgctgggcaccatcgggtacatcgacccggagtacgcccgcacgtccaggctcaacgagaagtccgacgtctacagcttcggcgtcgtcctgctggagctgctcacggggaggaaggccgtggacaacgagtccaacctgcaccagctgatactctcgaaggccgacgacgacacggtgatggaggccgtggacccggaggtgtcggtgacgtgcacggacatgaacctggtgcggaaggccttccagctcgcgctgctgtgcaccaagcgccaccccgcggaccggccgaccatgcacgaggtcgcgagggtgctgctctccctcctgccgcccgccgccaagcctcccgcgtccaaggcggcggcggcttcggcggcggccggcgactacacgcgcttcctcgcgacggcggccgacctgaggcgcggcggcgtggccgacgacgacaccggcgacaacagctcctccgacgagcagtggttcgtgcggttcggcgaggttatatccaagcacacgctgtcatgatcgtccgtccgtccgtctccctaactcccccccagaaagttttctcccaagtagagatcgaagtgaaagcataggagcacagcgcaggaaatagacgtagggttatgttgtgaggtccgccgtagaatggagacgatgtccgttggttcaggagtggtccaaatggaaggagaggcgttggttactctgccgctgctgctgggacgacgcatttgcagtggttggtttggttgtccttgggtgtaatcacacggcggcacgacaggtgccccccccccccccccccgtccccgtgaacggacgtaagttttcttggatcctagcaggaaccgcattgaatcggaccatgcatcctgcctgcattggaccagggtcgttgtaaatgagatgcatcaccgtattattatttttggctgccatttatgagctgc

SEQ ID NO: 1711 - DNA, 1388 bp, Zea mays
cccaactgtataaaaggcagctgctgtgttctgttatgacacagccatcacacgcatactgcatacacaacacagagcatcagaaggagctacgatctgatcgacatggctgccgccaccatggctatcacctcccgcgcgctcgtcggcaagccggcggctggcacgagggacgtcttcggcgagggccgcatcaccatgcgcaagaccgccgccaagcccaagccggcggcctccggcagcccctggtacggtgccgaccgcgtcctgtacctgggcccgctgtccggctcacctccgagctacctgaccggcgagttccccggcgactacgggtgggacaccgcggggctgtcggcggacccggagaccttcgccaagaaccgcgagctggaggtgatccactgccgctgggccatgctcggcgcgctcgggtgcgtgttcccggagctgctcgcccgcaacggcgtcaagttcggcgaggcggtgtggttcaaggcgggctcccagatcttcagcgagggcgggctcgactacctcggcaacccgagccttgtccacgcgcagagcatcctggctatctgggcgtgccaggtggtgctcatgggcgccgtcgaggggtaccgcgtcgccggcggcccgctcggggaggtggtcgacccgctgtaccctggcggcagcttcgacccgctcgggctcgccgacgacccggaggcgttcgccgagctcaaggtgaaggagatcaagaacggccgcctcgccatgttctccatgttcggcttcttcgtgcaggctatcgtcaccggcaagggccccatcgagaacctcgccgaccacctcaccgaccccgtcaacaacaacgcctgggcttacgccaccaacttcgtccccggcaagtgagcgagggcatgatgcttgcatgcgtgtaccgtagacgtacgtattcctacgtactgcaggttgcaccagtatttgtgaagggagctttgggagccagagattgtaccgctagtgtatttgtatgcatgatgtggagctgatcaataaaatatgttgtaaatatattatgtcttcatttatgcataatgtacatgattgttgtgagcacgccatgcataaaatacatggtcaacaaataaaaaagaacggagggaatagattgcaagcgtagctcatgctgacaacgacaattggagccaaattcacgtgaagatatgtgaaaaacgatctactacataaaaccctaaacccatgcatccagaagatcaaaactaaatttattgtttgacaatgactgaaattgtctctgctcgaggctgtagtgtaaaacagtattttacacgaccatatatacgacctgctggagccagtctagccatatgcacgat

SEQ ID NO: 1712 - DNA, 2839 bp, Zea mays
ccttttccgctccagacacagcagcccctcttgtaccagtaaaccgtgctgctatcccccgctaccgctacccgccgcgctgctgcggctcgcctccctcctccccagtccccacgccccgccgccgccgccgccacctcctctcgctccctccttttaccccgagcttaagctcgcgcgtacctgcctacctatccgtaggagaggaagaggggacaaggcccggtcggtcggtcggtcggtcggggggctctcggatctcgccgctgcctccccgttcgttcgttcgttcgttgggatctcgcgccatggccgccgtcgcgccgcccccggcccccgcgccggcaccggttccggctcctgctcctgccaccgtccctgtcgcggatcaaaccacggatctgctgcagaagctgtcgctcgactcgcagcccaaggcggcggacgcaacacagcctgctgctgccaccgccaaaaagcagggcgccgcggcgagccagccgctgagcgtggcgatcccgccggagccgtccatcacgccggtgatccaagactttacggatcccaacctgttttatctaccagcgtattactacggaggctacgacagttccatgagcgagtgggatgattatccgaggtatctaaattcagatggagtggagattgccccagcggtatacggagatatttatggatatgggtatgctccttacggggcatactctcctgccacttccccagttccaacagttgatggtcagatgtttggtgcacagcattaccagtatccaactgcgtatttccagcctcctacaccagttccttctaccactcaaagtgacctacagtcttctaaaaatcctgaaaagccagcagctaaagcagatccagccaagactactaacggtgttcccaatggtactgctcacagtaacagtggaactgtaccccttgcgtcgagccaacaaaattcatcactgacgcctgatggaacttatagggcgcccttgctaggtggagttccttctgctggttacctggacacgacatatgggtatgacagcacaggggcacactttgcatggtatgatggctctgcttatgcaaatggacaacaaagagcaactacaactaaccattttccatcctcaacatttggtaatggttccccagcaaggtatcagaacaagagcaccaccacaccgcagatgggtatgcagaatagaagacctacaactacatcaccagctcctacttatcccaataggatgtaccctagctcccgaccgtacacccagtatgggaattcaataaaaactggccttccctacgggagcaacggttatgattccaggatatatgggcgatggggtcttggtatggataacaggtacaggcctaggggccgtaatggatactatggttatggcaacgagagtcaggatggaacaatcgagttaaacagaggtcctagatctggccgtttcaagaaccagaaattgtacggccatactgtcactattgctgtgaaagggcagagccttccttctggtgaaagcaaggatgatagtgccgtgcctgatagagcacagttcaatagagacgatttccctgttcagtatgatgctgcaaagttctttgtcattaaatcgtacagtgaggatgacatccacaagagtgtaaaatacaatgtgtgggcaagcacaaccaatggaaataagaagctcgatgctgcttatcaagaagctcagtcgaagggttctgcgtgccctatattcttgtttttctcagtgaatacaagtgggcagtttgttggtgttgctgaaatgacgggggctgtcgattttgagaaaaccctggggtattggcaacaggacaagtggaatggttccttctctgttaagtggcacattgtcaaggacgtgcctaacaacattctcaaacacatcatcctagagaacaacgagaacaagcctgtcacgaacagccgcgacactcaagagatacacctagaacaaggccttcagatgctcaagatattcaaggagcatgtcagcaagacgtccatcctggatgacttcgccttctatgagagtcgccagaagctgatgcaggataagaggtcgaaacagcagcaggtccaaaagcaggtctgggacagtaggacccccatttctgtcactggaagcgagcaacagcaggaagctgccaatgggaagcccaatccgtctgtaccaaacggtgtccctgcagaggtgaaggcggcgaaggcttctgcagagaacggcaccgccactccagctatttcctacgcggcaaaggtggcccaagcagcaacagagaaacctgtgctcgccaacggagtcgctaagaccggttagctggaccgcccaaccgatgctccatagctagccgcgagcgacggtcgacgtccccaagagctcgaccgaatcactgtacaagggaaactggtgaccaaccaaggcaggctgtggaactgggcaggcatggcgccctagagcgttgcggctccatctcgtcgctgctggagagcagctggctagctgttagcgttttccctagtctctctctctgttccccgtttcagtttgcttatagcccgaagacttttctgctgtagtattggaatgccagagacctttggccggacaagaggaatttgcgaaggccgtctggctgggtgtgttgcgtcgtcattggggtcgagtatggccggttgtgttcgtcgttatattgagtggatccgaatgaatgtgggttagattggagctttccttttctttctctttcctttacctgtttgattattgcggac

SEQ ID NO: 1713 - DNA, 1061 bp, Zea mays
ctctcacaagtttctctgccctctcttactactgctggggtgcgcggcgctccacccgcagcagcaacagccggctcccgctccgctgccccgccgggccgctcccggccatggatacttcgtggattatgaatgggttgggtcttgctgaaaaaataagaagcgcaacccagtcgttcaccctccgacttggtgagctttttgcaaaaccgcgtaccaaatgcacctactgcgactgcgtcattgacattagcaatgtttctttggtgtggccagcccttcctgctggtgtcaaatttgatcccacggaccttgaaattctgcagcatctacaagaaaaatccagcctgccgaattcagtgtcacatacgcttattgatgaatttatacctactataaaagaggaggagggaatttgctatacacatcccaaaaacttccctggtataaagatggatggtagctacctccatttctttaatagagtactaaacgcatatgacactggtacccgcaagcgtcgacggattattgccaccggcgacatttgtgatggtgttgttaacgggaacagcaggtggcataagactggagcatccaaacccgtatttgacgagaatggtgtgagaaaaggttggaagaagatcttggttctttataaagctcccaagaaagttggtgacagaccagaaagagagaactgggtgatgcatcagtaccatcttggtgtaaatgaagatgaaagtaatggggaattcgtagtctgtaaagtattctaccaatcgccattgaagaaaaacggcaagtctaaaacagatgttgtagtcgagtctgatgcatctgttgcaaaaatcaatcctaggaccccaatgacagatcctccccagcgccgtcggctgaacaacagctcatgcaataccgggcagcatacccccactcaggctttgtttgggtacagagggattgaagtgtattaaggtgtattgaaggggattgaaaaaaaattagttcatattacacttcaatacaccacataccacctcaatccatttcaatccgag

SEQ ID NO: 1714 - DNA, 2300 bp, Zea mays
aaacaaacgctggcacaaacgaatcggccgagcaaactgcacaaacgagtactgaactctccgctctcgtctcggtccttgtccgtgatgaagctcatgaggctcggcacgcggccggactccttcttcacttccgggcccgtcaggtccgtctacacggaggtggccaccgacctgcaaatccaggtggatcactgcttgtttcgactccacaagttccctctgctctccaaatgcctgctgctacaggctctgtgcgcgggctccgacgccgccgagctgccgggcttcccgggcggcgcagaggcgttcgaggcctgcgccaagttctgctacggcgtggccatcacggtcggcgcgcacaacgtcgtgcccctgcgctgcgcggcggcgcgcctcggcatgacggaggccgccgaccgcggcaacctcgccgccaagctcgacgcgttcctcgcctcctgcctcctccgccggtggaaggacgcgctcgccgtgctccgctccgccgccggccgccacgccgccgagtgcgaggagctcggcgtcacgtcccggtgcgtcgaggccgtcgcgacgctcgtcgtctcggaccccggcggcggcgacgccgccgccgcgccgtccagctccgcgtcgccgtggtgggcgcgcgacgtctccgacctcggcgtagacctcttctggcgcgtcatggtggccgtcaaggcggccggcaccgtcaaggggagagccgtcggcgacgcgctcaagacctacgcgcgccggtggctgccggccgttgccaagagcgggtacctggtgctggagcaaaccgacatcagcacagccgagtggaacagccggcttcttgtcgaaaagatggtgagcttgctccccgccgagaggaacgccgtctcctgcagcttctttctcaagcttctcaaggcagccagcgtcctgggcgcctctcccgcgtccaaggcagagctcacgaggagggtggcgctgcagctggaagacgccagcgtgagcgacctcctgataccgtcgtcgtgcgcgggcgagacgctgtacgacgtggacgccgtgacggccatccttgaagagctggcgctgcggcaagcggcggcggcgggggtcccggaggcaagcccgccgcacgcgcgcggacacaggcggtcgcggtccgccgagagctcggagtacgagggagcgcgtcggtccgcgtccgccccggcgtcgcacggcgcgatggtcaggatcgggaggctggtcgatggattcctgatggaggtcgccaaggatcccaacctgcccctggacaagctgatcgccattgccgaggcagtgccggactgcgcccgcccggagcacgaccatctgtaccgagccgtcgacacttacctcagagtgcacccggagatagacaagggttcgaggaagaagctgtgcagggttctcaactgcaggaagctctccgagacggcgtctatgcacgccgcccggaacgagctgctgccgctccgggtggtcgtgcaggtgctcttcttcgagaacgcacgcgcggcggcgctgtccgtccgcggggctaacggccgcgccgccgccggtggcgtcaaggcgctgcttgccaagacaaggagggaggagacagacggcgaggagaaaaggctccggggcctcgccgtcgccggcgcgcctggcgacgacggcaacgactggagcgtggaggggctgaagcgcgcggcgtcgagggtgtcgaccctgaggatgaggctggaggaggacgcggacgacgaggcgttcgtgcacagggcgcgcgcgggggcggggctggtccggagcgcgtccgcccgcgtcagggcgctctgcgcgatcccggccgggaagcccaggcggatgctgagcaggctgtggccgtcgagctccagcagcgccgtcactgagaggcgttgaattgaaagacctgcacgagagcaatgcggaatgcggtggcagattgatcgatccaggcacaccattctggtcgcgaaggctgtgcatgtgtaaaaaaaaaggaaaagagaacgctgtgttggcagtgttgccatgtttacgtttgattccaaaattcactgaaaggagtttggatatatatagagagagagagtagtaaaatcaaccaaaaagttgtaaaatctttcgaaagttcacgctcggcggcatcagtagagctgcaaaacatccttggacggcggcgacgggtggtcaagcggttctctccgtggaagacgtgagccggaaggaggggctttactgtgccagcaataagggccaac

SEQ ID NO: 1715 - DNA, 4750 bp, Zea mays
cgcgtgcatcatcatcggttcagttcagtgttcaccacgcacccccggccccagcggctgcaagacccgccgctccgtgtatataatagaataggcgcgcgggcaggcgtgtggcgcggctgtgtcgtctgtgagtgcatgcgaggcctccggttccggctctctctctcggtgcagttcgtccgggagggggagagcgaggtggagtggtgctaagccaagccaactagatcgagtcgtcaagaaggttggagaggagagatcgagatggggaagcaggcggcggtggtgctggccgtgaacggcaagcggtacgaggccgccggcgtggacccgtcgacgacgctgctggagtacctgcgcacccagacgcccgtcaggggccccaagctcggctgcggcgaaggtggctgcggtgcatgtgtcgtccttgtctccaagtatgacccggccaccgacgaggtgaccgagttctcagcgagctcctgcctgacgcttctccacagcgtggaccgctgctcggtgaccaccagcgagggcattggcaacaccaaggatggctaccaccctgtgcagcagcgcctctccggcttccacgcctcccagtgcgggttctgcacgcccggcatgtgcatgtccatcttctccgcgcttgtcaaggctgacaaggcggccgaccgcccagccccgcctgccggcttctccaagctcacttcctccgaggctgagaaggccgtctccggcaacctgtgccggtgcaccgggtacaggcccatcgtcgacgcctgtaagagcttcgcggccgacgttgatctcgaggacctgggcctcaactgcttctggaagaaaggtgacgagcctgcagatgtcagcaagctgccaggctacgacagtggtgccgtctgcactttccccgagtttctcaaatctgagatcaagtcctcagtcgagcaggttaacggcgctccagttcctgtttctgacgacggctggtaccgtcccaagagcattgacgagcttcacaggctgtttcaatctgagtccttcgatgaaaattctgtcaagatagtagcttcaaacactgggtccggggtgtacaaggatcaagaccttcatgacaagtacattgacatcaaagaggtcccagagctttcagtcatcaacagaagcaacaagggggtcgagcttggatcagttgtgtccatctctaaagcgattgaggtgctgtcagatggaaatgtggttttcgaaaagattgcagatcacctgaacaaagtggcctctccgtttgttcggaacacagcaaccattggtggaaacatcattatggcgcaacggttgcaatttccctcggacattgtgactgtactactagctgcaggtacaactgtcactatccaggtggtttccaaaaggctttgcctcaccttggaggagttcttgcagcagcctccatgtgattctagaaccctgttgctgagtatatttatcccctattggagttcagatggcatcacctttgagaccttccgagcagcacctcgtccacttggcaatgctgtcgcatacgtcaattcagctttcttggcaaggacttcagtggatgcagcatcaagggaccatctcattgaggatacatgtttggtgttcggtgcatatgggactgatcatgctattagagctagcaaggttgaggattacctgaagggcaaaacagtgagctcgactgttatacttgaagctgttcggttgcttaaagcgactgtcaaaccatcagaaggcacaacacatcctgagtatagaatcagcttggccgtcagcttcttgtttaccttcctatcttcccttgtcaacaatgagtcaacaaaggttaatggtcccaacgggtcatgtagtaatggagccacaaacggtgcccttgagcactcaccagagaagcatcttaagtttgacagcaacgatttgccgatacggtcaagacaagaaatatttttaactgatgaatacaagccagttggaaaaccaattaagaaagcaggtgcagagatccaagcttcaggggaagctgtgtacgttgatgatatccccgctcccaaagattgcctctatggagcatttatctacagcacccaccctcatgcccatgtaaaggctatcaactttaaatcatctttggcctcgcagaaggtcatcacagttatcaccgcaaaggatattcccagtggtggacaaaatattggttccaccttcccgatgatgggagacgaagcactttttgcagatccagttactgaatttgctggtcagaatattggtgttgtgattgctgaaacacagaagtatgcctacatggctgcaaagcaagccattattgagtatagcacagaaaatctgcagccaccaattctgacgatagaagatgcgatccaacgaaacagctacttccaagtccccccatttttagctcctaagccagttggtgattacaacaaagggatggctgaagctgatcaaaagattctatcagcggaggtaaaacttgaatcccaatactatttctacatggagacacaagtggcgctagctattcctgatgaagataactgtataaccatctattcttcgacacaaattcccgaggtcacacaaaatgtggttgcaaagtgccttggcattccatttcacaatgtccgcctcatcagcagaagagtcggaggaggctttggtggaaaggcaatgaaagcaatacatgttgcatgtgcatgtgcggttgctgcattcaagctgcggcgtccagttcggatgtacctggatcgcaagacagacatgataatggcaggcggtcggcatcctatgaaggtgaagtactctgttgggttcaagtcagatggcaagatcacagccttgcacattgatcttgggatcaatgctggaatatcaccggatgtgagcccaatgttgccacctgctatcataggtgctctcaaaaagtacaactggggcaatcttgcatttgataccaaggtctgcaagacaaatgtctcatcaaaatcagcaatgaggggtcctggagatgttcagggctctttcatcgctgaagccatcattgagcatgttgcctcagcactttcagtcgacactaacaccataaggaggaagaaccttcatgactttgagagccttgtggtgttcttcgaagatgctgcaggtgaagcttctacctacagcttagttacgatgttcgataagctggcctcctctccagaataccagcgccgagctgcaatggtggagcacttcaacagaagcaacaagtggaagaagcgtggcatttcttgtgtgccaattacatatgaggtcaatcttcggccaactccaggcaaggtgtctatcatgaatgatggttccatcgttgttgaggtcggaggggttgagataggccaagggttgtggacaaaagtgaagcagatgacggcattcggattgggacagctgtgccctgacggcggcgaaagcctcctggacaaggtccgggtcatccaggccgatacattgagcatgatccagggagggttcaccggtgggagcaccacttctgaaactagctgcgaagctgttcgacagtcgtgtgttgcgctggttgagagactgaagcccatcaaggagaatctggaagctgaggcaggcacagtggaatggagttccttgattgctcaggcaagtatggcgagtgtgaacttatcggcacatgcatactggaccccagatccaactttcagaagctatttaaactacggagctggcattagtgaggtggaaattgatgtgctgacaggagcaacaacaattctaaggagtgaccttgtctacgattgcgggcaaagcttgaaccctgctgtcgacttgggccaggtggaaggcgcattcatccaaggagtaggcttctttacaaacgaggagtacacaacaaactctgaggggttggtcatccacgatggcacatggacgtacaagatccccacagtcgacaccatcccaaagcagttgaacgttgagctgatcaacagcgcccgtgaccagaagcgtgtcctctcttccaaagcatccggcgagcctccgcttcttctagctgcctcggtgcactgcgcaatgagggaggccatcagagccgccaggaaggaattctcggtctgcactggtccagcaaactctgccatcacgttcgagatggacgtgccggcgacgatgcccatcgtcaaggagctctgcggcctggatgttgtggagaggtacctggagagcatgtccactgccggaccaacaaccactgccaaagcatagatccagcaggtgcaccgcccatggtgagagagcttaataggtctgtgtaaaacactgaacagcatgacatgccaagcttacatgtgttagctctgatgtacagaagacgaggtagcaatgggagctgtggtcttgtgaatcaggatccatgaacattagaggaaaaaataaagtaaataagtgtcgggcagacaaatgtgtggatgaaatcatgtggttttgattggattttgaagaaatttttgcaatgaatctccgttcatactcctaggtgtgtacctgcctactgggtacatgggggataggattgtaccatccagctaggtttggccttgctgtctcgttgtgaccttcaccggtagctactccctgcgcacctatttgaactagcagagcagtgttgtgacct

SEQ ID NO: 1716 - DNA, 1329 bp, Zea mays
gagcggtgagccgcggccgccccgcgaagagaggtgacgcggcgagcacacggccatagaggttactgctctcctgggctgtgaggctgtgaggctgtgaccaaacgctctacgctcccacttcccaccaactcccaaatcctccctgaaaataagaatacgagggtgagcgatcgagcggtcgagggggttgtgcttgtgcgtcagatcaaccgactggtggcgaggctgcgggaggagatggccggcgaagggaatggggatgaagggtggaggcggagcggcatcgaggtcagcgccctgcagttcggctacgacgggcagccgccgctcttcgcgcgcttcaacctctgcgtcgcacccggctcccgctgcctcctcgtcggcgccaacggatcaggcaagaccacactcttgaagattcttgcgggaaagcatatggttggaggaagagatgtggtccgtgtcctcaatggttccgcttttcatgatacacagctagtgtgcaatggtgacctttcgtacttgggtggttcttggagccgtactattggttcagctggggatgttccactgcaaggcgacttctctgctgagcacatgatttttggagttgatggggttgatcctgtcaggcgagagaagctggttgatctgctagacattgatctgcagtggcgcatgcataaagtttcagatgggcagcgccgcagggtgcaaatctgcatgggtcttcttcatccatacaaggtgcttttgctcgatgagatcacggttgatctggacgtggtgaccaggatggacctgcttggtttcttcaaggaagagtgcgagcagagggaagctaccatcgtgtacgccacccatatatttgacggactcgagacgtgggctaccgactttgcgtacatccaagaaggcgagctgagaaggtccgggagatactccgacatcgaggagctaaggagcgccaagaacttgctgtcggtagtcgagtcgtggctgaggtcagagaccaaacttccgaagaaggaacccccaccacgtcctgagacccaggccaggcgttcctcgccgttcgatgcttctcctttccgttcgtcacgccacatggcctactaccgttgatggtttcccaactcgtactacaccattgcctcttgttctgcgctatatatatatatttttgttgtcgctcatatcgtatagtagctgtggagtttaatatgtgtcctcttcacggcccttgtagacatcaatcaatatatagcaggcagcacagaaataaaagtttggttcggttggtcttgcgttgatgagcagttggtg

SEQ ID NO: 1717 - DNA, 1365 bp, Zea mays
aaatagccgccccagggagacgttcgaaaccttccccatctccggataaaagataaggagtgtctctcctttgccatcctcctctctttcagctaagtccctgccccctctctttttcttacattcaggtcctcgcagctcctctcttttttcttgtttctttcgatctgcgagccgtccaagtccagtactcttctttccctcaaggaactcttgcagccggcccctctggtttcctcgaattcttgttccccggtccctcctcctgtccccgcgtagatccgtccgtccgaggagcacaccgtccccacccccatgtttacccaccagttcctctgacggccgccgtgctccgatgaagctgagcgtgctccgtatccgccgctcccactccttctccgtcgccttcctctactggttctacgtcttctcatgaacgcatcgcccctctccaactgctgatccttcgccgtctctccctctctctttctctctgagatagtctttcgaatccatctctagggctcctgtttctccccatcctccccccaccccaccccccaccaaacagattcaatccgacaagacaagcatccatgtcgtcgtcacgccggagctcgagccccgacagcaacgacacgacggacgagcgcaagcggaagcggatgctgtccaacagggagtcggcgcggcggtcgcgcgcgcggaagcagcagcggctggaggagctggtggcggaggtggcccgcctgcaggcggagaacgcggcgacgcaggcccgcaccgcggcgctggagcgcgacctgggcagggtggacggcgacaacgcggtgctgcgcgcccgccacgccgagctggccggccgcctgcagtcgctgggcggcgtcctcgaggtgctccagatggccggcgccgccgtcgacatcccggagatggtcaccgacgaccccatgctccgcccctggcagccgtccttccccccgatgcagcccatcgggttctgagaatctgagcctcagccggcgggagagagccaatttctgtcgtcgtgccgctgtctatctcgtattggtatatctattcataaatcatccttgtcatggtttgctcttcttgtcagtgttataaatttgcttcttgttagtgttataaatttggccatcggaaaggatgtgtttgtagttgtaatatcttgtttggagttgtaatatcttatcttgcttatgaaatcgaatatgcctatatatatatatgttatgctgtacgagtatgtggctccaaatttgtgagccttctgtctgttatggtgaggcgatgaatccaatttgtgagcacacatgaatcaatttcgagattcgacatgtc

SEQ ID NO: 1718 - DNA, 1433 bp, Zea mays
aaaaagacggcccgttggcccggaattattaccgtctgtttgtcctcgtctccctccgctgtccgattgtgcgctgtcgcagcctctgccctctcccagcccgctcctccatctccggtgagacgcgaattgaatcgcatcgaatccatgggcagctcctcgaataccaacacgagcggcggggccagcgacaaggaggagaagaagaaggaggacaagatcaaaggcaaggactcgtcggggccatccttcaaggagaacgaaagggtcctcgcctaccacggccccctcctctacgaggccaaggttcaaaggatcgaaaaccatgaagatgaatggcgctactttgtccattatctcggttggaataagaactgggatgaatgggttgcaaatgaccgcttgttggaattgacggaggaaaacgtgcgcaaacaacaagagcttgataagaatcaggtagttgacaaaacaatgaagtctggacggtcaacacagcataaaccaaaagtctccaatgcggatgcaaaagctgataaagatgacactaagagtctcatttcagtgaaggggaagaaacgtaaaagtcagcttgggactgagattcaggacaaggaaaaaagatcatcacatagtctactagtgttgcagtttcctttgccactgaagaagcaacttgtggatgattgggagtttgttacgcagatgggtaagcttgtgaagctaccacgatcacctactgttgatgatattctaaagaagtacttggaacaccgggcaaagaaggatggcaagataaatgactcctatgctgagattctgaaaggattacgctgctactttgataaagcattgcctgcaatgcttttatataagaaagagcgagatcagtatgctgaagaagttaaaggtgatgtctcaccatcaactgtatatggagctgagcatctattgcgcctttttgtaaaattgccagagctacttgcttctgtcaatatggaggaagatgcgttgaacaagctacagctgaaactgctggacgttctcaagtttcttcagaagaatcagatcaccttctttacctctgcgtacgatggttcttgtaaaggtgcagatgaggataaaaccaaatgattgcatgtgaacgttttatatcatgtaacatctttcgatggacttgtctggcactattgttgatatgaatgtcgcttaggacaacaatcggtttatgtaggatagatgctgcagattcctgaaagacggtacttgaactgcccggagcatgttgtattttcttaagatgctggaactaagacggcttagttgaattttcactatcaagtgagtctcggtcttgccccaaaaagaatgttttgtacctcctctgtcccaatttatacgacaatttataattcgtatgacttttttggacc

SEQ ID NO: 1719 - DNA, 122 bp, Zea mays
caacaggcgcagccatggcctccccggcggcggcgtgggagcggcctaggcacggccatggcggccggaagcacggccccctgagcgggcccccccggcggcgcatgctctggcggcgcgcg

SEQ ID NO: 1720 - DNA, 1675 bp, Zea mays
ccttcagatccaagaaaaggcgcgcgctccctgtgaccacctcacgaactccgtggctataagactcgccgggccataacactgaactgatcgagtcacatgctagcgtgcgtgtgcgtgtgcaacggctataccacctgcgcgacccaccgcgagcgcccgcagctaagctagctctcgctcgcgcgctctgggagaggagagatcaatggcgtcccgtggcagcatgacctgtagtcttcagctcgccgtcctcgtttccgccgccatcgcgctcgggttcggcgtccgggccggcgaggcgcagctgtccagcgagtactacggccagacgtgccccgtcgtgcaccgggtcgcgcggcgggtgctgaagaaggcgcacgaggccgacgtccgcatctacgccagcctcacccgcctccatttccacgactgcttcgtgcaaggctgcgacggctccatcctgctggacaacagctcgagcatcgtgtcggagaagttcgccacgcccaacaacaactcggcgcgcgggtaccccgtggtcgacgccgtcaaggcggcgctggaggaggcttgcccaggcgttgtctcctgcgctgacatactggccatcgccgccaagatctcggtcgaactgtccggcgggccaaggtggcgcgtgcctctcggccggcgcgacggcaccacggccaacatcaccgccgccaacaacctcccgagccccttcgacaacctcactacgctccagcagaagttcggcgccgtcggcctcgacgacaccgacctcgtcgcgctctcaggtaaaaaaaaaagggggggagagaaaaccggcgatgcatgcctcgtgattcttgcacctgcacagcacgacacatggcgtcacaacgacggcggatgcattgcaggggcgcacacgttcgggcgcgtgcagtgccagttcgtgacggcgcggctgtacaacttcagcgggacgaaccggccggacccgacgctggacagggggtaccgggcgttcctctccctgcggtgcccgagggccggcaacgcgtcggcgctcaacgacctcgacccgaccacgccggacaccttcgacaacaattactacaccaacatcgaggcgcgccgtgggacgctgcagtccgaccaggagctgctgtcgacgcccggcgcgcccacggcgccgatcgtcggacggttcgccgccagccagaaggagttcttcaggagcttcgccaggtccatggtcaacatggggaacatccaggtgctgacggggagtcagggtgagatcaggaagaactgtaggatggtcaacggaagctagacccgtcgacggcacaagttactggtgaactgaaagcagttctgctgtatgtacgatgcctcaaacatgttgatgggataatggtgcgccgatcgatttatttgtcaaggagatccaataaattggttttttgcatttttttttcaacaaatatatacatgtactaaaggtccgtttgacagagccattcagctctagtttcactagaaagtagtattttttagagctgaagtcatttcacgaatcgttatcttagagctagagttatttcttttatcttagagccagagttatttcgccgtattaaagtgtcagagccgatgaagctactattcatggtttattctttac

SEQ ID NO: 1721 - DNA, 2167 bp, Zea mays
gtacccggcttccctcgtcaccggctccggctccggcaccggctcaatacaatcccatcaccgatcattcattccctttgcctacgactgctacctccccctccttccatcttcgatagacgaccaaataatggcggtattcgacgtctgaatcctcgtactgatcttatactgcatacagacagacagacccttcttcttccttagttccctatagctagctctagctaggagaccgatcatgagcatctcggtgaacgggcagtcggtggtgccgccggggttccgtttccacccgacggaggaggagctgctgacctactacctgaagaagaaggtggcgtcggagcgcatcgacctggacgtcatccgcgacgtcgacctgaacaagctggagccatgggacatccaagagaagtgccgcatcggttcgggcccccagaacgactggtacttcttcagccacaaggacaagaagtacccgacggggacgcgcaccaaccgcgccaccgccgccgggttctggaaggccaccggccgcgacaaggccatctacgcctcgccgggcgcccgccgcatcggcatgcgcaagacgctcgtcttctacaagggccgcgccccgcacgggcagaagtccgactggatcatgcacgagtaccgcctcgaggcgcccgtcgacgccggcgccggcgccgcgcaccacctgctgctccccgccgccgaacatcctccctactacacctcgccgccgcaggcgccttcttctactactaccgcaacgatccgtggcgcggcgggagaccaagcggcgcaggagcaggaggggtgggtgatctgcagggtgttcaagaagaagaacctcgtgcaccacggccagagcagcggcgtgaagcagcaggcagcaggagacgaccacgcggcgtcccatacggcggcggcggcagcgcacatggacgagagcagcccgagccagtgctcgtcggtgaccgtcatcagcgaccacgtgcacgccaacgttaacgacaagcagcagcaggcgcaggcgtcgttgctgatgatgcacacgcaccactccgccagcagcgacgacgacgcgctggaccacatcctgcagcagtacatgggcggcggcaggcaggcgcccgcgccggacaccaagccggcgctgctggagcagctggaccatctgcaccaccaccttgccgcagcgcctactactagggccgccgccggcttctactacgggaagttcatgaagctcccgcccctcgagcacgccggcctgccgccaagcccaccaccaccaggagcgcgcgagtacggcgccgccgccgccgccggctgggacgacgacgacgacgcgctggaccgcctcgccgcctacgaccacctcaacggcctctccaacgacgcgtccaagaacatggccgcgttcttcgacgtcgagcctagcgccgccgccgccgccgccgtggacggcgacctgtggagcctcgcacggtccgtgtcggcgctgcacgcggacttgaccatgaacaacaacgtctagctcccgaccaacaacaacagggccccgatacacatccatatggcgtgtgcatgcatgcatgcacgcattgcataccgcgcgcaccactaaccactcgaccagcatgcatgcatacgtgcgcaccccacccgcgcccggggccgctagtgcgtcgtgctcccgtagtgcgtgcatgcatggccgccgcacgtacgtattgcacgctcgctcgcgcgtacgtgtacgtacgtacgtacgtgcgcgaataagctagctagccctaggatcggaaacatatgtatgcatatccattgcatggccggatgtacatcaggagctgctgctggtgtatgtccgccgccgccgtccaaactccaaagtgagctgagatcgatcgatcgagctcgctcgctccaggtgtgcagtacgtacgtacgtaagcgcctgtgtatgtgtaagcagacagcgtggtagtagctctagctagtagaacatacttacacacactatatactgcataccgtttgtacctatcatatatagattactactgtattattgcaaaccgctttggggggtttttttagggagtgcagtgaggtgtgatatcatttcacctaatttaatttgctagtgcta

SEQ ID NO: 1722 - DNA, 2978 bp, Zea mays
gagtaataagtactgacgcggagccaagtaaccgcgccgtagttctgttctgtcgtgtcggagaagacgactggcatcgacaagcaggccggtcagcgccggcaccgcaatatacggaagaaaacgagcgcaagtcggggccattcacacccacgcacgcccaatcacaaagatctcttctgaattttctttaacaaaaaaaaggaggaacgaaaaacgaaaatcatatcctgcagaggatatatacaggagtaggagtaatcatgcatgtcatgggtcagcacgatgtcattgacccgatgagaggtcgaagaagggcggatcagcggatgcttcaagctttctctgctcggttaggttgctgtcactcgctctgaggcctcgacgcgctgctagctgagagccgaaagaaggaatcctcggccggcagcaggagaggagagccaccgtttgatcagcgaccgggcaaaagcaggccgcggccggccacccccgcccgtcgctgtccctccgaccccgcaccagcgactcgccgagcgcaggcacaagagggggggctccatccatgaggcagccatgctggtgctcatcaacaggtatttcaggagcaggaacagcagcccggccggaggaggcggcgaagagatggcgccggcggcggcttccagcgaccacctctgcctgccgggctgcgtgcccgtgcgcgccaagcgggcctccgcctccgcctccgccgccgcagcggccacggtcaccacggcgcgggcgtcgcggcacaacttcgtcagggccgcggcgtcgggcctgctggcgggggcgcacttcaccaaccacgagtcgctgccgccgcttcccgacgcgtacgccgagttcgtcgcggcgttcccgcagtacgcccacggcgcgctggcgcgggcggacgcgatccgtggcgaggagtaccagcacctggaccgccacgtctgcctggactacaccggcatcaacctcttctcgcacgcgcagatgagcgcctccctgccgtccacctcctccgcgccgcccgcctggcagccgcccttcttcgacatcgcgtacaagtccacgagcctgcgcgcgcaggtgcaatgcggggacaacgccgcgggcgcggaggcgggcgtcggcgccgccgtcacccggcgcatcatggcgtcgctcaagatccccggggacgagtacgccatggtgtgcacggccaacaggaccgcggcgttccgcctcctcgccgagtcctactcgttccagccaggcaagcagctgctccccgtgtacgactacgagagcgaggccgtgggcgccatggccgacagcgcgcgccgccggggcgccgaggtcgcctccgcgaccttcgcctggccgagtatgaggatccacggcgccgacctccgcaagaggctggccaggggccggcgccgcggcggcgggggacgcggcctcttcgtattcccgctcgcgtcccgcatgacgggcgcccggtacccgtacctgtggatgagcgcggcgcaccagcaggggtggcacgtggcgctggacgcctgcgcgctcggcaccaaggacctcgacaccctcggcctctccctcatccggcccgacttcatcgtctgcaacttcttcaaggtgttcggcgagaacccgtccggcttcgcgggcctcttcgtcaagaggtccagcggcctcgcggcgctcgagcgctccgtcatcgcgcgcagcatcggcatcgtcagcatcgtgcccgcccgccgctggtcgctgcacgacggctactccaccgagctggagcactcgcggagcttccccatgctcgccgccgacccggccctggacgacgccgacgtcgagaccacgagctccttctccggcccgctcagctccatcgccatcactcgcagcaggaccctgcagtcggacgcggcggagaacggcgacgcccacgcccccgagatccgcgaggtcggcagcacggcagagaacggcttctactcggaggaacccagagcagaggaaacagagcggctggccaaggaggagcaagacggggaggggagagagagcgtgatggaggtggagtgccggggcctggaccacgcggacgcgctggggctcatcgccatcggcaaccggctgcgttgcatcagcaactggctggtggtggccctgcagaaactgcggcacccgcacgccgataacgggcacccgctggtgaggctgtacggcccgcgcgtcaagttcgaccggggcccctcgctggcgttcaacgtgttcgactggaagggcgagcgggtgtcgccgctgctggtgcagaagctcgccgaccgccacaacatctccctcacctgcggtttcctgtgcaacatctggttctcggacaagcacgaggccgagagggccgtcgtcctggagcacagggtcgccggcgatcccgtcgccgcgggcagcgccggagggaagaggaggaaggacgccggtggtggcgacgtggggatcctcgtggtgaacgcgtcgctgggattcctgagcaacttcgaggacgcctacaggctgtgggcgttcgtggccaagttcctggacgccgacttcgtggagaaggagaggtggaggtacaccgcgctgaaccagaagacggtcgaggtgtagacgaaacggagagcgctgcagtagcttcagctcagcttggcatattggtacggttcagttcactgtctgtaaagcaccattcttttaggatcagctctgccatcccctccagccattctttcagtgtaaactgtaaggtgtaaagtgtttccataatgatgatatcatttgatatatgaaataagtttcacttttcagcacaaatatacgcccaatattataaaaaaagaagcttaattagagctccgacaatccgaccttccataggccagcctatctccaagagtgacaagacgcttgcttcataaatcatctagtgcctt

SEQ ID NO: 1723 - DNA, 3512 bp, Zea mays
gtaggcattagtgaaaagagctgacacgctgcggtccacgtgtctacagcccaataaaagcccaaataaaaagatggtccagtaggttagatccaaatataatttttgaagaaagaaaaacaaaagcccaagattgtcgttggtgccatttgggcccgcggggtcatttctgttgcctgttgttgtggccgacgattcgagttcatcgtctttgcactgcacgatcttttgtctgcttctttgctctgattttgaatctaacttcttcccagatctcgtatggctgcctgtgtctgcgacttcatgtgatcatttcgaatggcctcccccatcgacagtgcgatggatagtgtgagcatctttggacttcgatgaccagacgctgacgcactgacagagtcacagttcattgcgcactggactctcccagatctgctctgattcctcatcagtctcagggcttcagccaatcgtctgctaattaatttccttcctgttggcatgttccatcccgaattaatccccacttaatttctccgcacattctctaactctgaatcatttccaaatcagccagtcttaatttcttgctacgcttggtgatttttttttttttgttggcatcacgcgcatccactttgacgaaagctggtagagtgacaggtctctgtctctcacctattggcacatcgtttcctccgttctggaactggaagttggaaggtgaagttatcttggacaacagcagcacaagcgagctgtggaggaggtggaggtgcagccatggcgcacctgctgctgcacggcactctggatgcgaccatcctggaggccgaccacctcaccaaccccacccgggccaccggcggcgcccccgggatcttccgcaagttcgtggaggggttcgaggactcactcgggctcggccagggctccacgcggctgtacgcgacggtggacctcggccgtgcgcgcgtgggccggacgcgggtcatcaccggcgaccccgtgaacccgcgctggtacgaggtgttccacatctactgcgcccacttcgcctccgacgtcgtgttctccgtcaaggccgcgcagcccatcggcgccacgctcatcggccgcgcctacctccccgtccgggacctcatcgctggccaggagatcgagcggtcgctcgacatcctcgacgccagcaagaagcggctcccgcacgggcccaagatacgcgtgcgcctgcggttccaggacgtgtccgccgacccccgcgggtggggccggggcgtcggcggcgcgcggtaccctggcgtgccgtacaccttcttctcgcagcggcccgggtgcagggtcacgctataccaggacgcgcacacgcccgacgcgttcgcgcccaggatcccgctcgccggaggccgcctctaccagccgggcaggtgctgggaggacgtgttcgacgccatcagcaacgcgcgccacctcatctacatcaccggatggtcggtgtacactgagatcacgctgttgagggacggcagccggccgcgccccggcggcgaagccactctcggcgagctcctgaagcgcaaggcgagcgaaggagtgcgggtgctcatgctggtgtgggacgaccgcacctccgtcgagtccctcgggatgaaatgggggttcatgagcacgcacgacgccgagacggcggagtacttccgcggcagcggcgtgcactgcgtgctctgcccccgcaaccccgacgccggcagcagcgccgtcatgggcgcgcagatcgcctacatgatcacgcaccaccagaagatcgtcgtggtcgaccacgaaatgccggcgaagcgcagcgaccgccgccgcatcctcagcttcgtcggcggccttgacctctgcgacggccgctacgacacgcagttccactccctgttccggactctggatacagcgcaccacaaggatttccaccagcccaacctcgccggtgcgtccattgacaacggcgggccgagggagccatggcacgacatccactccaagatcgaaggcccagccgcatgggacgtgctctacaacttcgaacagcggtggaggaagcaagggggcggcattgatctcctcgtcaacctcaaagctatggcggacctgatcataccgccgtcgccagtgatgttcccggaagaccaagattcatggaacgtgcagctattccgctccatcgatggcggcgcgtgttttggcttccctagcaccccagaggccgcagctcaatctggccttgtcagtggcaagaataatgtcctagacaggagcatccatgatgcctacatccacgccatacgccgtgccaaacacttcatctacatcgagaaccagtacttcctcggcagctcatttgcgtggaaagccgacggcataaagccagaggagattgaagcactgcatcttgtcccaagagagctctcgctgaagattgtgagcaagattgaagctggcgagcattttgcagtctatgtcgtcctgccaatgtggccagaaggccctcctgctagtgggtcgattcagggtatactggactggcagaggaggaccatggagatgatgtacaatgacatctctgttgcgctcgaggcaaagaggatcgacagggacccgagggattaccttacattcttttgcttggggaacagggaggtgaagatggatggtgagtatgaaccttcaggtcgtccgcttgatgggacagactacgctcgggcgcagaatgcacgccgcttcatgatctacgttcactctaagatgatgatagtcgacgacgaatacatcatcgttggatctgccaatatcaaccagcgctcaatggatgggggcagggactcggagatcgccatgggcgcgtaccagccgtgccacctgaacaccaaaggccaggtcgcccggggtcaggtccacggcttccggatgtcgctgtggtacgagcacctcggcatgctacacgacgatttcctcaacccgggaagcctggagtgtgttcgaagggtaaaccagatggcagacaggtattgggacctctacgctggcgacagcctcgacgccgacctccctgggcacctgctcaggtacccagtcaccgtcacgaaggagggcacggtgacagagctcccgggggccaagttcttccccgacacacaggcgcttgtgcttggggcgctatcgaagctgcctcctattctcactacatagagaaaccttctgtactgttgccatgtgacgtttgcgggctgaattggttgaggtttttgctactccgtattatgctactactggtaatgttattgtatggtttcttcctaataatagtatttatagttttggacttatctaaaatagtatttatatgtgtctaaaatagtatttcagttttatttcattcatatatattttattttcttattttctaccacttatagctgatttaataaatagcaagaggatttctctccataaatccacttgggatc

SEQ ID NO: 1724 - DNA, 2835 bp, Zea mays
agctcgctcccctcccgccccactcgtcggctagtcgcctagtccctttcccttccacacgattcggagcagcacgtgcgcgtcaaaccttaccaccaccgccatcgtcttgcggctaaattgccttgagacgccgcagcactgcagcagcacagggggggagaaggggcgggcgctcgagtgaaccaccactacactactccgcgtctccctcccctggctacgaggctataataacgagcgcgtaagacggccggcggcgcacgcagccatgtccgcgcacctccgcctactctcggccgcccacgtctccgcgcccacacccacctccctccaccgcctccgtggccctcctccttctcctcccgcggcccgcctccggctgctgctgcgaccgccgcggctcggggggagccaggcgcgcttcgccggcgccgtccgctgctccggctcggcgtcggcgccggcggtcgcgcgggttggcgaggacagcgacgcggcggcgggcatatgggagcaggtgcgggatatcgtcgtgttcgccggccccgcgctagggctctggatctgcggtccgctcatgagcctcatcgacaccatggtcatcggccagacctccgcactccagctcgccgcgctagggcctgggacagtgttctgcgattacctaagctacatattcatgttcctctcggtcgcaacatccaacatggtggccacctccttagccaaaaaggatgaagaacttacacaacatcaagtgtctatgttactgtttcttgctcttgcttgtggcataggaatgtttttgttcaccaaggtgtttggtactcaagtattgactgcttttactggatctgggaattatgaacttatttcttcggccaatacatatgcacagataagaggtttcgcatggcctgcagttcttgttggcttagttgctcaaagtgctagtctgggcatgaaggactcttggggtcctttgaaggcattggcagctgctagtgttataaatggtgttggtgatatatttctttgctctgtttgtgactatggaattgctggtgctgcctgggcaactatggtttcacaggttgttgcagctttcatgatgatgcaaaatctaagcaataagggttttcgagctttctcatttacgattccatcagttagagagctattgcagatatttgaaattgcagctcctgtttttgtgacaatgacgtccaaggtggcattttatgcattgctcacatattctgcgacttctatgggagcaataacgcttgcagcccatcaggttatgatcaatgtcttatgcatgtgtactgtttggggcgaacctctgtctcaaactgcacagtcattcatgcctgagctggtatatggtgctaatcggaatctgaccaaggcaaggatgctattgaagtcacttgtgatcattggagcgataactggattgaccttgggggtagtagggacacttgttccatggcttttccccagtgtctttaccaatgaccaaagggtcatccagcagatgcaccgagtactggctccatatttcagtgtattgctggtgactccttcaatacactcccttgagggaacactcttggctggaagggatttgagatatttgagtcaatcaatgggtgtctgcttttccattggaacccttctcttgatgcttctccgcagcaagggtagcttggcaggatgctggtgggttctcgtcttatttcagtggagccggttcggaagcgctttgctacgacttgtttctccgacgggcatgctgttcaacaaaaacttcaaccaggtcgagtacattgaggcaaaaacgacatgaagatgcactgtacccatcacaagaggtgggatgatgaagatgtagaaaatgaggcacagaaacctggaaagatgaatagatgcaaaaggattcgcaaaaaccatgggaagatcatttgggcaaatcacttccgtccagaaggggatcagagttggctacgatcacttccattcgtcctaggaactatatacctcacagattcatggaagctgagaactgtagtagtggctacgctttccaacacttggcagtttgcgcccgtagaatggagttaaactgagtgctaaattttgtttcttgttactaaccgttaagaatcacgagatggttaatgatggttgagcttgtccagaaaacatggataagtgaggtctcaaaaaatgtagcatcttttccaatattatcgtttcttatgccatcatcacacaggatctcttgctttctcgtagcgattcccatatcgtttctgctgtctccggaattttattaatatcgtcacaatgtccagagaactgtcatctgagctatcaacaaacactagagcctcgtttctgcgggagccagtcggggcgcgtgggcgggacgatgaagaggcgctcgtcgtggcgcagcagcgccgggaccggggcccgcggcgcgatgaggcggtgcggcggctcagtgcgcgtgagcgcggtcgggcgcggcttgggggccgggatgaggaagcggaggaaggggtcgacggggcgcggcggcggggcctcggcggcgtggtccttggcgtcgccgccggccatggcgcaggcgagggtggttcgtccggtggcgtgggcgaggaaggcgtgagtggggcgtgggggagagcagagcagctgccctgcccggctttggtccctcgcctcgctcgccttttaaaaagggccgccaccccccttgcgcttccctgccttctctcgatcaaggatttcgttgcatatttgcatttcaaatcaaaattt

SEQ ID NO: 1725 - DNA, 3482 bp, Zea mays
gaagaaatcgggagggaagaggaggaggaggaggaacgcgatgaaggggatagaggggtactgtagcccctatcccagcaacagtaataggggagggggcgcgtgggggcatgcgttgaagacagtctcagatgtgtggcggcgcaggatcgtagcaccgagggtttccagtccacgttctagaagattcccgtctacattggccgaccccgcggcccacaccgtatatcaccgcctcctatccggcctctgcccttctcgccgaacggaaaaccctgcccggaccttcgttgcagcgctacgagcttcgacgggccgctcgatctccacctctgaagtggctgcttgtgatctagatctgaaagctgcagtggttgacagctgagtgtgaaactgtgaatcgaagatgagcgtggtgggcttcgacctcggcaatgagagctgcatcgtggcggtcgcgcggcagcgcggcatcgacgtggtcctcaacgaggagtccaagcgcgagacacccgccatcgtctgcttcggggacaagcagcggttcatcggcaccgccggcgccgcgtcctctaccatgaaccccaagaactccatttctcagatcaagcgcttgctaggccgcaagtactccgaccccgaggtacagagagatctcgcctccttcccgttccgtgtcacggagggccccgatggttttcccctggtccatgtacgatacctgggcgaggaacggacgttcacctctacccagctgcttgccatggtgctgtccaatttgaagggcattgctgagggtaacctgaatgctgcagttgttgattgttgcattggtattccagtctactttacggatctgcagcgcagggctgttcttgatgctgctactattgcgggtctccagccattgcgattgttccatgagacaacagccactgcactggcatatggtatttataagactgatctcccggagaatgaccagttgaacgttgcatttgttgatgtcggtcatgcaagcatgcaggtcagtgttgtcggttacaagaagggacagctcaagatgttgtcgcatacgtatgaccagtctcttggcgggagggactttgatgaggccctgtttaagcactttgcagctaaattcaaagaggaatataagattgatgtgtaccagaatgcgcgtgcatgcattaggttgcgtgtggcatgtgagaaacttaagaaggtactgagcgccaacccagaggccccactgaacattgagtgtttgatggatgagaaggatgtgcggggttttattaaaagggaggagttcgaacagatcagtgcctcggtgctggaacgcgtgaaaggaccactggaaaaggccttggctgaagctgggttgactactgaaaatgtgcactttgttgaggttgttggatctggttctcgtgttccggctataatcaagataataactgatttttttgggaaggagccaagacgaaccatgaatgcaagtgagtgtgttgcgcgaggatgtgctcttcagtgtgctattctcagccccactttcaaagtgcgagaattccaggttaatgatgggtttcctttctcaattgcattgtcatggaatggagactcccagaacaccccccaacaaacccttgtattcccaaaggggaatgcaattcctagcactaaagttcttaccttctttaaatccagtacatttgaagttgatgttttgtatgtcgacccaaacggcttacaaattccacaaaaaataagcacatacacaattggccctttccaaacctccaaaggagagaaggccaaactgaaagtgaaagtgcgtctcaacatccatgggaccgttacagttgattcagcaataatgctggaggatgatgtggaagttccagtttcatctgcaaatgaagctccaaatgatactatgaagatggacacagatgatgcaccaagtgatcctgctgttgcatctgatgtgaatatgcaggagcctaaaagcgctgataccgctgaggctgctcatgcagctgaaaatggaccacaagatactgaggaaaaatctgttccgatggaaactgatgcaaaggttgagccgtcaaaaaagaaagttaagaaaattactgttccggtccatgagttggtctatggggccttggctgcggctgacctgcagaaggctgtagagaaagagtatgagatggctcttcaagacagagtaatggaagaaacaaaggagaagaagaatgctgttgaagcttatgtgtatgacatgcgtaacaagctatatgacaagtacagtgattttgtcacgtctgaggacaaggaaggtttgattgctaagcttcaggaggttgaagactggctctatgaagatggcgaggatgaaactaagggggtttatattgctaagctagaagaacttaaaaaagttggtgatcctattgagctgcgcttcaaggaatgggagattagaagttctgctgttagccaactggtatactgcatcaatagcttcagagaagctgcacagtctaccgaccagaagtttgaacacatagacatgtcagaaaagcgaaaggtcattaatgagtgttcggaagcagagacttggctaatagagaaaaagcagcagcaggatgctctgccaaagcatgctaattcggtactccttgctgctgaccttaagaagaaagctgaaacacttgataggttctgcaagccgatcatgacgaaaccgaagccagctcctaagccgcagactccgcctgtggcagaaaaccaagctcctgagcctcagacaccagagcagcagcaatcaggtggcgaaagcacagccagcgagggagccgcagaggagcctcgagccgagcagatggagacagacaaacctgagggagccacagatccctcggcttagctttgccagtgatcaaacatttgtgtgattgaccctgttcacctgctgttatagtcggtaggggggagtgaactaagcgagaggttcgccacatttgatttgaggatgtgtgttgggacattcaaggtattctgtttcttgtccttgacaagggaggtggttgggtgtttgaaggataagagcagtggggtacactttctcacgtttttgtgccccacacgctcgatatctttattgatgatggtccgtaaaaccaaggtaaatggctattccaaaattttcgtgttttttactgtaacggtctacttaaaattttttttctgcaaaaacatcagtgtctgaacatttagttcgttggttagaccatattcaacagtttacccaaaacactgttttttgactgtactgtttgtagagtggagtttgaatatgtgtatagggatgggtaagctgctgtagatagttttaaggttatttgtcttagtctgcaccaactgttccaactaagataagattattcatctaagtctatgcaccaacttttctaact

SEQ ID NO: 1726 - DNA, 2046 bp, Zea mays
acaccagagcagggactcagcgagcccgaaccgagcaaatcgccaacgcgaggagaagcgcacgcctatctgccgccccgctccttttccccggttcgaggatcacgtcgcgcctcggtcgcagcacgcacccgcagcaaggtcggcggcaatggacgctggggacgccatggagaggggcgaccgcacgccgctgctgccagagagtcacgggccaaaggttcaggacgacggcggcctgcaagtgccgctgctgaaggataaaaaacgtgccggcagcaaggcgccggcggttgttctcggattcgagtgcctggagagcacagcgttcaatggcatctcgaccaacctggtggtgtacctggagaccgtcctccatggcagcaacctgtccagcgcctccgacgtcaccacgtggttcggcaccagcttcctcacgccggtcttcggcgccgtcatcgcggacaccttcttgggcaactacaacaccatcctcgtctctctcgccgtctacctcctggggatgatgttcgtcaccttctcggcgttcctgcccacggccgcggtgctcggcggcacgtcggtgttcggcgccaagactatcgccttcctcgggctgtacctcgtggcgatcgggcgcggcggggtgcagtcgtcgctggcgccgttcggcgcggagcagttcgacgacgacaacccggcggaccgggagagcaaggcgtctttcttcagctggttctacctctgcgtcgacttcggcatgatcgtctccggcctcatcatcgtgtgggtccaggacaacgtcagctggggcctcggcttcggcatctccacggcctgcctcgcgctcgccttcgccgccttcgtgctcgccacgcccatgtacaagcgccgcatgcccaccggcacgccgctcaagagcctcagccaggtcgtcgtcgccgcatgcaggaagatcgctctcaaggtgcctgccgacgccgacatgctctacgaggtcggcgacaaggtggacgcccagcagcccaagatcgcgcataccgatgagttctcgtttcttgacaaggcagccgtcgtctccgaatcggacatggaggagatgcgcgtgtcgggggagaccggttcgtcgtcgtggacgctctgcaccgtcacccaggtggaggagctcaagatcctggtgcggctgctgcccatatgggtgaccagcgtcatcgtgtcctcggcgtacgcgcagatgaccaccacattcatccagcagggcagcgccatgaacatgtccatcctgtccgtgccggtggcagcggcgtccatgggctcgtttgaggtggtcttcctcctcacatgggtgctgctctacagcaaggtgatcgtgccggtgctcaggggcttctccacccgcggcgacggcgagccgtcccagctgcagcgcatgggcgccggccggctactcatggcgctctccatggcggtctcggcgctcgtcgagatgaagcgcctcgacagcgcggcgcgcggcgaggaggtcaccatcgcgtggcagctcccgcagtacttcttcatggccggcgctgaggtgttctgctacatcgcgcagctggagttcttctacgccgaggcgccggacaccatgaagagcacgtgcacgtcgctctcgctactcaccatcgcgctgggcagctacatgagctccttcatctacgccatcgtagcggcgttcacggcgacggccgacagtcccgggtggatctccgacaacctcaaccaggggcacctcgattatttcttctggaccatggccgccatgtgcacgctcaacttcgtcgtgtacagcgcgttcgccaagaactacaagctcaagacagtgctctcatgacgcgagtacaagctgctcagctcacctccgtcttggtcttggagattccactgcatttttggcacagatgcaaagtgatgattggtaattacgatgcaagtagcgggctagcggctcgaccgaatttttttgtattttagcccttaaacagaagtaaattcacgtttagacct

SEQ ID NO: 1727 - DNA, 1900 bp, Zea mays
agcactgactcttccatggccctgagccacctgggctcgggcctggcgaggcccttcaccagcttccgcatcttcgtcagcagccctccggcagcattacgacatctccctcccctccgccctcttcggagagatctgaaagtcgtagagacctcgccgccgccgccgccgccactgcggagtggaatggatgggaagtctcgctttgcagtttctctctgccgaaggacggagccgccttccgagctcgtgtgctcgcgcggtgttatgggcttagttgggccctcgacccagccgcacggcctgctagacacagtcgccgttggatcgtacagctcgtagcggacaacgcggattgcgcgactgcggcctgagcgacgtgaatccaagcgtgcaagcaagcggcggtaatggcggcggctctgcaagccacgccgctcaaaaccctatccatctcccgccggcgcgtcggcggcgcgggggcgcggccgcgtccgatggcggcgagcttccgatgctccgcggcggcgaggagctacaatatcacgctcctccccggagacggcatcggccctgaggtggtcgccgtcgccaaggacgtgctgtccctcgccggcgccctcgaaggcgtcgagctccggttccaggagaagcttgtgggtggctcggccctggacgccaccggcgtgccgctccccgacgagacactcgacgcggccaagggttccgacgccgtcctcctcggcgccattggaggctataagtgggataacaatgagaagcacctcaagcctgagaccgggctgctgcagctccgtgccggacttggggtctttgccaatctgcgaccagctgcagtattgccgcagttggtagatgcatccactctgaagaaagaggtagctgaaggtgttgacatcatggttgtcagagagcttactggaggcatctacttcggcaaacccaggggttttggaacaaatgacaatggagatgacattgggttcaacacagaagtttattcagcttctgagattgatcgtatcgcacgagtcgcatttgaggttgctcgcaagagaagagggagactatgctcggttgacaaagcaaatgtcttggaggcatctatgctttggaggaaaagggtgactgcactagcttcggaattccctgatattgagctctcacacatgtatgttgataatgctgcgatgcagcttgttaggaatcctaagcagtttgacacaattgtcacaaacaatatttttggtgacatattatctgatgaagcatcaatgattacgggaagtattggaatgctcccatctgccagtgttggtgaatcgggacctggtctttttgaacctattcatggctctgcccctgatattgctggacaggacaaggccaatccattggctacaattcttagtgcagcgatgctattgagatatggcctaggagaagaaaatgctgcgaacagaattgaagctgcagttactgaaacactgaaccatgggttccgaactggggacatatattctcctggaacaacattggttggatgcaagcggatgggggaagaagtcctgaagacagtgaactcactgaaggaagtggctgctgtaaactgatgcatgttggtacttaatttataaccctacaggatgagatggttgaaagggacttgcattttattagaagttgagcctggtgaaagagagcactgcgtctggttttgaatcgcaactgtagcggctgaaccgacggtcttttttcatttctggtgtttgttggccttcctgtaactcaattttgtacaaggaaggataagcatatgtatgataaaatgggatagtttatgccagttgaataaaatatgttctataacttctattca

SEQ ID NO: 1728 - DNA, 386 bp, Zea mays
taggaagaggtacggtgctggctaagctagctagatccatcgtccatggaactgagagcagcagctacctatatatctagctggttttctaacgacgatgacgacgaccgcgggactagcatgatgcagctagctgaagacagttgtaggcagctctcctctggcaggcaggcgcgcggtcatcgtcgccatcgacgacggttgcttggctctgctatgctgtgttcgttcgtccatggtgtgctagctagccgtgcatgcattgcagtgtaacatgcgtgcatgcacgcgcgtacgtcctgccaaaggagagttgccctgcgactgtcttcagctcgaacaagatcgaccggcccggacaggaatgttgggcgtacgttgtcatc

SEQ ID NO: 1729 - DNA, 2487 bp, Zea mays
gaaatcctcgcccccttgtactgctcgccacagcgcggaatctcacctctcttccccgacccgagagagctcggtcggacaaacccaccacccacaccggccggccgggagagccacgaagttactgcgcgcgtacgtcgccggtttcctttctcaccgcacgtcgtcgtcatggacacctcgcaccactatcatccatggctcaacttctccctcgcccaccactgtgacctcgaggaggaggagaggggcgcggccgccgagctggccgcgatagccggcgccgcgccgccgccgaagctggaggacttcctcggcggaggcgtcgccaccggtggtccggaggcggtggcgcccgcggagatgtacgactcggacctcaagttcatagccgccgccgggttccttggcggctcggcggcggcggcggcgacgtcgccgctgtcctccctcgaccaggccggttccaagctggccttgcctgcggcggcggctgctccggcgccggagcagaggaaggccgtcgactcctttgggcagcgcacgtccatctaccgcggcgtcacacggcaccggtggactggcaggtacgaggcacatctgtgggacaacagctgccgacgcgaagggcagagccgcaagggccgccaagtatatttgggtggctatgataaggaggagaaggctgccagggcgtatgatcttgcagctttgaagtactggggttctagcaccaccaccaactttccggttgctgagtatgagaaggaggtcgaggagatgaagaacatgacgcgacaagagtttgttgcttcccttcgaaggaagagcagtggattctctcggggtgcttccatctaccgaggtgtaaccagacatcaccagcatggacggtggcaggcgaggatcggaagggtggccggtaacaaggacctctaccttgggacgttcagcaccgaggaggaagctgcagaggcctacgacatagcggccatcaagttcagaggcctgaacgccgtcacaaacttcgagatcagccggtacaacgtggagaccataatgagcagcaaccttccagtcgcgagcatgtcgtcgtcggcggcggcggcggcgggtggccggagcagcaaggcgctggagtcccctccgtccggctcgcttgacggcggcggcggcatgccagtcgtcgaagccagcacggcaccgccgctgttcattccggtgaagtacgaccagcagcagcaggagtacctgtcgatgctcgcgttgcagcagcaccaccagcagcaacaagcagggaacctgttgcaggggccgctagtagggttcggcggcctctactcctccggggtgaacctggatttcgccaactcccacggcacggcggctccgtcgtcgatggcccaccactgctacgccaatggcaccgcctccgcctcgcatgagcaccagcaccagatgcagcagggcggcgagaacgagacgcagccgcagccgcagcagagctccagcagctgctcctccctgccattcgccaccccggtcgctttcaatgggtcctatgaaagctccatcacggcggcaggcccctttggatactcctacccaaatgtggcagcctttcagacgccgatctatggaatggaatgattcgggccgcccggtcgtggctgctggtcggcctccgctcgccgctggcgtctcgcatgtgcgaaaagggtggggagaagccatgagaacacgagactgacatgggcgctctcgcacaaaagacataaagcggggggactgaaagatcagaggtaccagtagacagtagtagtatgatggaagagacagtaagcagcgagtagtgtgctgcaggatacactgaccatcgatctgctaacaacaaaatgatcgttgcagctagctatagcatatttgcctttgcccttttgtagctttggtctggtctctctctctctctctctcttttttcagctttgttgctccccagcgtcctgcactgcatgccagctgctttgaagctttctctttctactgacatggttctgcaagtgccatcatagctttagtcagccctgtacaatggatgcaggaacgtcgtctttgaattggatctctgtagctcatctctccccctagctcccccactttgttttcttttttgtgctttcctttctgctgcctctgctagcgttatgtgtactgaacaagttcatcaaacagatatagcacccttgcaactatgaatcaatgtcggtcttatttaatgaaactctcccaaatttaccgccttaacgatacgttcatactacaaccattttgcctccctggaaggtacggtttcccgttctgctgttgatttctcgtttgcagcattctgtatgcctttcctttgcccagcgagaataatattgtatgcgtttgaataccaatgattttgcaaaatctctactattttatcaatagtgaatgtgtcac

SEQ ID NO: 1730 - DNA, 3669 bp, Zea mays
agtgcggggccttcctccactcccactcgtctcgcagactcgcacccgcgttccccgtggtcaactcgctgcctccagcgacgaccgcgagggggggccgaaataggcaggcaggcagcggcaggccacccaaaaagcgaccaccctgcgcgcaccacctcggctgccattgccattggccattgccatagccatggccacgccatgacgccccgcccagctgcacgcgctcacacccccaccgctccactccgctccgcctaactctcaccctcacccgccaccgctcgcctccccatgcttccgcgctgctgccgccgccgctcgggtgcctcctgcctcgccgtgctcctcctcctgctgctgcacgcgggcgcggcgtccgcgcagggcgcgcttgcgcggcaggacgtcgcggcgctccacggcctgcgcgcgtcgcttggcgtgcgcgccagcgactggcccgacagggccgacccctgcaccttctggtcgggcgtcgtctgccgcgccggccgcgtcgcggagctccgcctctccgggctccgccgcacccgcgcgggcgcccggagcgcggccttcgccgtcgaccaactcccgcggctcgcagcgctccaggcgttcaacgcctccgggttcccgctccccggccggatcccgtcctggttcggccgcggcctgccgccgtcgctcgccgtcgttgacctccgctccgcacgcgtcaatggcgagctcccggtcgatctcggcatgtccgggaacctcaccacccttgttctctccggtaacaacctgtccggccctatcccgctgtcgctcctctcaatcgctggtctccgcgttctcgacctctccgccaacaatctcaccggcccgctgccgaacgtgtcgttctctggcagtggtggagctggagtcttgttcaacgcctctggtaatgccttgtacggcgccgtcggcgatgccactggctccctcaggaagaggttctgggttgttgatgtctctgacaattacttcgatcaggtgcttggaactgggtttcagaatggaaccgatggtgtagtggatctcaggatgaactgtttgtctggtgcagcaagccagcgtacccgcggggattgtgaggctttctacacgaggaacggggtgaggcttgcgttggaccccaagccaccatcgccattgccagagccacagccaccacaggtgctgatgccgtcaacgaaaaagagagggggcaaatggaagtttgtattgaccggggtccttggtggtgctgcaattctggtaacacttggccttagcgttctggtattttgcttgttgagaagaaaaggaaggaaaccgagagggagaggagtggagcagactgaagagggcattcggtctgggcggagaagtagtagtgtgaatcccgtcacaatgtcacccatggcatcccccagagccagtggttcaccaaagggcgttcctattatcacagatgaattcacctatgagcagttgcaccatgctgcagggggctttggggatgataacctcgtcaagcatgggcactccggtgacatgtactatggtgtcctggagagtggctttcaagttgtcataaaaaagattgatctgaagaccaggaagaagtgccagggcgaattgagcttccttacaaagcatacccatgggaggatcgttccattgctgggccatttggctaaggatgaagaggaattgcttgtctataagtacatggcaaaaggtgacctcacaaccgcactgcacaagaagtcagtggaagttgaacaggggttgcgctcattggattggataacgaggctcaagattgcaataggtgtggctgaggccttgtgcttccttcatgacgaatgcaatcctccgttggtccacagagatatccaagccagcagtgtgcttcttgaggacaaatttgaagtgtgccttgggagtctgagtgaaatatgcactcaacaaagtgcaggaagccaaagtttcttctctcggattctaagatcatcgaagtcccttgacaagaacataccaggtccaccagctagctgctcatacgacatttactgtttcgggaaggttctactagagctaatcactggaaacttcggtgcgagtggctcaaccaacgcagattcagaagagtggttagcaagaacattagattacatcaacgcaaatgacaaggagggtgtctcaggtattgtggatcccacccttgttgtggatgatgaccatctagaggaagtgtgggcagtgtccatcgtcgcgaagacatgcctgaatccaaagccctctaggcgtccactcgctcgatacatcctgaaagcactggagaacccactaagggtggtgcgggagcaggaagagttccaatccagtccatctcacctcagaagtaccccatcccagggctcttggcgtttcgctttccatggaaacaagtaccacagctgggaggccatgccaacgtcggggcaagcacttgctcggaaaaatacagcgaagtctcaggggaccgaggggagtgacgaggacgaagagaactcgttctcgttcaagagggcttctcgggacgattttccggatcccatagagtttgaaggaggtgttgttgtgaaggagtacccgcagactagctagcgatacttgatgtgcatctctttgatgtctctaggtgaaaagctgtgtatacagaatagataaatttttcccctcttttctctttacttgtttatctcagtcgattgaaatggaataaatggcgcactgggtgtgccatccttgaaatgcaagccagtaaagttctcagatagagccatttgccattcaaaaactgttatgaaattttagtggttgatccaaagtgaattgtagtggagagcagtttaagccttacccgggaggtggttctggtcgttggattgaatgggatcatacttctgcagctgaaaacttttgagcatggccactggtgcgtactgagtgtgatagagcattcatctgcagctgcagtttcatccggtgagcttgaacaccgaagacgaaatggagggcacctccatggtctgttgtagcttctgttgagtttgaaaaaacggacaaaagaagcaatctgaacattatggagatcggtgataccagactagtgccatggacggatggcacgcagttatggagatcggcgacagcactgcccgccccctccgcgaggcagcaccagttacgggaggttgacttcaattatttctgacgtaaatccgcgcggaattggagttgggttttttctgacgtaaatccgcgcggaattggagttgggtttaacccgacgctggatcagctggtccaggacatcggtgactcgttttgccttcaggctctggtgggacagtcagactcgagcccgagcacgggaagttaagcctcgcaaactcaattttgtttgaagatgtctgaaaaacaattttgtttgcaaatgtctaaaaaaactttgttgcagacccacatcaggagcagcaccgttttatattccttcgtaatggtaaaaaaaattgtggatgagagggaacaaaatacaaaaaatgaggtcccaccgagatttgaactcgggttactggattcagagtccaatgtcctaaccac

SEQ ID NO: 1731 - DNA, 1927 bp, Zea mays
ggcggctttgcttggttgatgccagcgtagacctagcaaaacgaggggattacacgttttgccgataataggtcggctgccttctgtcactctcccctctgctcaaaatttcccccaaaacttctcctcttgaggaaggcagcccaagcgagcgcgctgcaatggcggactcgtcggcgccgacgagagtgatgatggcggtgaacgagtcgtcgctcaaggggtacccgcacccctccatcagctgtcgcaccgccttcgactggacgctctccaagctcgtccgctccaaccctgggggcttccacttcctcttcgtccacgttcaggtccccgacgaggacggatttgatgacatggatagcatctatgcttcgccggaggactttcaccaaatgaagcagagagacaagataagagggcttcatttgctcgagtactttgtaaaccaatgccatcagttagggataaaatgcgaggcatggatcagacatggagatccaaaggaggttatctgcagcgaagtgaagagagtccagcctgaccttctagttgtgggaagtaggggtcttgggccatttcagagggttttcgtgggcacggtgagcgagttctgcgttaagcatgccgaatgccccgtcatcaccataaaacggaacgctaccgaagctcctcaggaccctgtcgacgattgatgcttccaagccaagccatgccatgtcactggagaatgagatgttcttcttcactgcttttataatgggttgatgtacaaaatacgatatggaagtggtgcctggaactagttcgcggagggttccaactcttgcacactgcgcccccaaaaactagagttgaagatgtaaaacgccgtcgtccgccgagggacgacgagagattgtacgtgatacatcgatcgagtctcgtgaacctaaaaagctgccgctacattattgttcgctcatgtgccaggcttcgctggaacgaacgccccgccccttatttgcccctgcccgtccacagccacagccacagcttgagcagggtacctgaagcccgcgtagtcctttggcacggcgtagcctttgggaacgccgacgagctggggctgttgctgatgcttaagctgacgccccttgttgctgccagcaagcttgccgtcgctcttccacgccggaggcttccccggcgcgaacttgatctcgaagccgtcgtcgatgtcgtggatcgtggcgcgggagctcgccacgggcttcatcgccgggcacttgatctcgaatccgccgcccttctccaggtcgcctccgacggagtcggaggcgtaggagtcctggtcggcggcgtacctcttcctggagagccggcgcccgcacagcctgccggcgacgcaggcggccacggcgaggaaggagatcgccgcgagcacggcgaagaccgggccgaacgagcccttggcggtcgtggaaggcgcccgcgcgcgcaggacggcgttggaggacgcggggtagtagaccgtggggtcaggcatatccttggttctcggcgctctctcaagctgctagctgctgatatatgccaccaccacgctctccctcgaagaaaatggttcggccgtttgggtgtcgcactcttgggcaccgaggggagtgctggtcgttttatgatggggagctgaaggcgccggtttgaaccgagcgattactttgcgattttgtttttcatcacgagccgactctcactcagctcagctgctgtcatggcatgatgatgcccgctgccgccccatcctccctctccctcgtcgggccgcgagaaaggctggcgctttgggatccctttggagcagttcaatgcgagcttggaataacgtctcggcacgtctgcactctgctgcagcagccgcctggcctctctctctctctcactc

SEQ ID NO: 1732 - DNA, 571 bp, Zea mays
aggagtaagcaacttgttagccgagctccctacacttgtccgtcgtcaatccaacagggcaacagaccccggcgagagaagacgaagaaactagcatgtcgctggcgctgtctcgcatgatgctcgacaggttcttccccgacgccgccgggggcgcgcggccgcccacggactggaaggagacgcgggacgcgcacgtgttcaggatggacgtcccggggctggccagggagcaggtggccgtggagctggtggacggccgcgtcctccgcgtccgcggcggcggtggcaagcaggacggcgacggcgcggcggcgggccacgaggaagaggaggggggcggcgacggaggcggcgacgcgagcgtgaggtggcactgcagggagagggccggcgcgcgcgcgttcgagacgcagttccgggttccggacgacgcggccgcggacgaggcgcgcgcggccatggcggacggggtgctcacggtgaccgtgcccaagcggaagggcggcagcggcaagaagcggcgccacggcggcagcgggcccgtgtgctgcaagttctggccatgagc

SEQ ID NO: 1733 - DNA, 1772 bp, Zea mays
gcttgcgcagttgcgcctgcctcgggcactcgccgtctcttgccgcgggcgcacgactttttccccaacaaccgatcgcccacgcaaacctctcctcaactcgatcaaaccggggacggaaaaggcccaccaaaatcccccaaaatttcgtacctcctcagccccagcaatctcgaatcccgatgctcacagcctccaccgaatccctggcggtcgtcatcagcgcatgagctttcttcgctcgctagcggactccttctcatcgctgctcttctcgtcgggaggcggggcggtgtccatggacgcggcgggggcggccccgtcgccggcggcggtggtgggggagcgcgtggcggtgaagctcagggggtacttcgacctcgccaaagaggagatcgacaaggccgtgcgcgctgaggagtgggggctccccgacgaggccaccgcgcactaccgcaacgcgatgcgggtcatgctcgaggccaaggccgcgcgcgtccccgatgccgtctcctccagcgagagggggcaggtcagggtgtaccaggagaagatcgccaagtggcaggcccaggtcgaggagcggctcagagtgcttggtcagagaagcggtgaaggggccactgctgcagaagtgcccaagaaggttgctgcaaacaatcctatcattaggactgcaaaaacagcgtcaaatagcatccaaagatctcccttgcaaaatagccctaccttcaacaggggtggccaagcatctacacatcagaagatagggagcggagcttccagaccagttcagaaggctggtggaaactatgatgacaagcttgttgaaatgattaatacaacaattgtggacagaagcccttctgttaaatgggatgacgttgctggtcttgacaaagcaaagcaagcactcatggaaatggttattttgccttctaaacgaagggatttgttcaccggacttcggagacctgctaggggtttgcttctctttggcccacctgggaatggaaaaacaatgcttgccaaagctgttgcatcagaatctgaagcaacattttttaatgtttcggcttcttcattgacatcaaagtgggtaggagaagctgaaaaacttgtcaggacacttttcatggttgcaattgatagacaaccatctgttatttttatggacgagattgatagtgtcatgtctacaaggttagctaatgagaatgactctagcaggcgtctgaaatctgaatttcttatccagtttgatggggtgtcctcaaacccagatgatctagtaattgttataggggctactaataaacctcaagaattggatgatgctgttcttcgaaggctggtaaaaagaatatatgtgccactacctgatccaaatgtacgaaggttacttctgaaaaatcagctcaaaggacaatcattcaaactgtcgaaccatgattttgaaagacttgctgtggagaccgaagggtattctggaagtgacctgagagccttgtgtgaagaagctgcaatgatgccaataagagagctcggtccacaaaatattcttactatcaaagcaaatcaggtacgggttttaaacagtctgaacataaagttcactcgttctgagtttttttcactgttaaaacagaagcttaaatggacttctagctgtagtatctttacagataacataccctacataagtggttgtttcccagcgaaactttggaatgtcagtgtacgaagcacttaaccctcggtttctaatctcg

SEQ ID NO: 1734 - DNA, 1139 bp, Zea mays
cacccgcccacctcacctcccctctatatatcccccgcgtcccgcccgcgccgtttacaccggcgccccaacccaaccatcgctccacgcccgcgtggaaaagacggagagagaccgggagagaagaagaagaagaaaaaatcaggggaggaggagactcagcggccgggaccggaacgtgaaacgcggacgcacgtcgggaaagtaatgtaccaggccatcccctacagcagcgcccgggcgtggctgatgccggcggcggcggctgaggcgggcgtcgccgctgtgaagccggagccggtggcgaccgtcgcggagcctgcggcggaggaggagcgcgcccggccggacgccgcggccggggacgacgacgacggcggcagggcggaggtggggagggccgtggcggagaggccggtgctggtggtggggcggcgcgggtgctgcctgagccacgtggtgaagcggctgctgcaggggctcggggtgaacccggccgtgcacgaggtcgcggacgagtcggcgctcgcggggctcgtcccggccggcgccggcgccgccgccggcgcgctgcccgcggtgttcgtcgggggcaggctcctgggcgggctcgaccggctcatggccgtccacatctccggcgagctcgtgcccatcctcaagaaggccggtgccctctggctctagtttctattactaatcaatccgtacgtcggcgtgtttcttccttcctgcctcttctgtcttctctcagaaacgatggcgccgtggtttcgcccgtggccgttggatcgagcatcacaacaccacaccgcggctgatgcatgatatgagtttggaaataggactttggtttcttttttatctgtttatttatttaggcgaagcaaaaaaaaagaatggtgagaattcgaaccacagagtaattttattgtccgctaagcgtgtgcgtgcgatgacaagtggtcgcttcgcttcttccatcatgtgaatacggaagacgggcgagagacagaggggacggacgtttgtttgctgccggcatctgtacaatcctttccgtttcagattttaatgagggatgagctgtccagtttcccatcttctcctgtggtctggactctggaggaccatttgcg

SEQ ID NO: 1735 - DNA, 4411 bp, Zea mays
tgcaagtccaaaaggctcaagctgataggaaaagcctcctccttgtagagacaaccttgttactaattgtgctctatccctaattgtgttagcttagaaattccataagttgcttgtggaagtgcaggcctgacattggtgatcataataggattattgacttgattctactggttttatttataaacagctaatgtacatcctaaacgaaccttatatgttgatttgcatcaacgttttctttcaggtctgccattgaggagtcacatgtgtttcagtggcggttagaagcctacaactctacactcacgtgaagttgtggttggatttgttaaccgtccatgttgagggcaaagcaactcagcaccctaactcagtgtgcacggtccttctatcttaatggatcaaggtgcggtagcacagatggagcttcatgcacatgccctgaggatgagacttatgctccaaaaaggcagactgcaagtgctatcgagcagaattctcattcaacccacagaacatttgtgaagattcagcctcctttgcaagatgctactagagctactggccacccagttccagctgttcatgccactacctcaacttcaggaaaggaggctgcatctagtaacagaagcaatcatcctcacagtcatcatcagatcataagaagtgattatgtacagccatctaagcagacagccagaagcatttctcaatctggaattgctggagctggtgtatattcagagctggttaatatcaggtcctcatctaataatggaagcactgatcaggctccacagatgggtactaactattcttatcagattttatctgataaccattcttctaataatagggcacagaatcaacttaactttcctgagggaaagatggcttataacccttccgtgaacaatgaatttgggaagggttacccaagagctggctatgcaaagccaaagcagagtttctcaggaccttctgtgatggtttccagttcaccatcacaaataaggagtcaagggcatcctggtctacctcctgcaaaatatcattctaatcatttcaattcagatgccaggcaagatgatgtacaaactcggaacccatcaggtcccaatgtgtttagtggttctggcaacaaaattcagggttctacaggaagggtaaaagctcatagtggaggaccccaatctaacttaagatcattgaagttattgcgatcagttgagcagtactaccacacactgcagcaaatgaaatggggtccaatgaccgagcatgttctagacaatcttcattgcaagatagatgcattccaggcaaatcaagtactcaagctgcttcatgaccacactgtcgctcttggcttctttcaatggttaaagaggcaacctggattcaagcacgatggtcatacttacacaaccatgataggcatccttggacaagccaggcaatttggtgttttgaaggaacttctggatgagatgagccgagctcactgcaaaccaactgtggtgacctacaacagaataatacatgcatatggccgtgcaaattatcttaaggaggctgtcaaagtatttgaggaaatgcaggaagctggttatgagcctgatcgggttacatattgtacattgattgatatccatgctaaagctggatacctagacattgcaatggatttatatggcaggatgcaagaagtaggcttgtcacctgatacgttcacctacagtgtcatggttaattgccttggtaaaggtggtcaattagcggctgcttataagcttttctgtgagatgattgaaaatggctgcacacctaaccttgttacttacaatattatgattgcgctccaggccaaagcaagaaattatgagaatgttgttaagctgtacaaagacatgcaggttgctgggtttcgtcctgacaaaataacttacagcatcgttatggaagttcttggtcattgcggccatctggatgaggctgaggcggtttttattgagatgaggcgtgattgggctcctgatgagccggtatatggacttttggtcgatctctggggcaaagctggcaatgttgacaaagcgctaggatggtaccaagcgatgcttcaggatggtttgcagcctaacgtgccgacctgcaattcgctcttgagtgctttcctgaagatgaacagatttcaagatgcctacatcgtgctccagaacatgcttgctcgggggcttgttccatctgtgcagacttacaccctgctactcagctgctgcaccgtgggtcaggcacagatgggtttgtgctgccagctcatggccatcactggacatccagctcacatgttcctgctgtacttgcctgatgcagaagctggtggccagaacgtcagggatcacactggttatttcttggacatgatgcacagtgaggacagagagagtaaaaggggtctaatggatgctgtcatagacttcttgcacaagtccggtctcaaggaggaagcaggctttatatgggaggttgctgcacagaagaacgtgtacccagattctgtaagggagaagagctcgtcgtattggctcatcaaccttcatctgatgtctgagggcacagcagtgactgcactgtccaggacgcttgcctggttccataggcaggttctgacattgggcactggtcctgaaagaattgacattgtcactggctggggcaggaggagcagggtaactggatcttcgctggttaggcaatcgattcaaaagcttctaaacctctttgaatccccattcttcaccacccgtggaaatactggctgctttgtcggctgcggggagccactcaacaagtggttgcacaatccttatgttgagcgcatgcatttattgtaagcttgcacagttttgtggaagaatcagcttggaatgaatataagatgcgcaccatatatagttcgctctgatttagtcaggccaggtgtagtttggtagccggatagtctatgcttggaaactatttattgtgattgtgataacatttagagatggattttttcgtttagcttgagataaattttctctcaagataaattttctctcaattagccagtgacagtcgctgctgagtgctgacaggtaatgttgttgaaaaaaattgatgattattaattgagacagaagaatcatagctggatgcacactctgatcggtcaagtacaaatcacaacttgtttaactcgattgtaactattatcgttccagattgcactttgtacacctagattgtaaccaaaatcgtgcggtcttgtcatatgtaccccatcttaggttagtgttacaattcagtagcaattgtagctccctgatcctggtcatcttggaatatccttatcttgattgcaaacttgttggtatccctgaatcattcccagatgatctgaggagtctctttcataactcaatccatttccttctctgaaactcccagttacaactggaaacatgactgctgctctgggagattgctagtcgatgccaatgtgcctatgcttgtcccagctatatacccaccggtccatgcattctgtggaaaaacaaacagctaatgctggttaaaaacttttattctcactttaaatatgaaatactcgaatcaagtttccattgccaaagtttgtggtgaacctattgatcttttaacaaaaaaaacaatattctgaatgacttgtatggatgacctgaaaattgaatccgcctgtgaccccatcaacattaagaacctagagcaaaaccaacagcaacaagttaaataaagtttaagcttgctgctccagaacgttttgacttcaagaacgatatattacctctcctgcaaagaacaggtttggctgtttcttgctttccatagtgccaagcgatatctttaacaatagtgaggcaagttaggtctatactcaaattgatttcatgttcaagaaatatgcagttaaagattccggacctctgtaattggaacacctcctgcagtcacaaattcatctttaaattggccctacatatgatataactcacactgagtaactgttgatatcatattctaaatgactaacagatttcagttattagcatattatgatatcacacacctttccaacaacctcaaacgtccattgtttcaaccggaaggccactgcgtttagatgattatttggcatggaggcccagtgtgtatcaccatttaaactctgaaaaggttagactttccctgatgaaaccttctaattaagtgggtaagcaaagcactattcagtaattgtatcacctcctgttctagcaggaatctccaaaatctcttcaccaggccaaactccgtggggaacgtgttactcactttgtgcttc

SEQ ID NO: 1736 - DNA, 1063 bp, Zea mays
cacgagccaaagctagctagctcctctcggtgcacgatcgagttacgagtacgagcacacgtcgccttccctaccgttgccaacaagcaacagagccaagaaatcagtcgcgctagagcgagcaaggacgatgctgggatgcttctcgcggctgcggcggccgacgacagcggcgccggagcccatgccggcggcgtccgacgacgcgtccacgtcgacggcctcggcggcgggctccacctcgccgtgctcgtggtcgtcctcggcgcgctgcaaggacgacgaggaccacggcggcggcgcggtgggcaaggacccgtcggcgctgtccgagcccgggctgtcctcggccatcgcgtcgcgccggttcttcctctcgtccccgggccgctccaactccatcgtcgactcgtcggcgcacggcggcggcggcggcgccgccgccgcccccgccctggacgtgggcgtgggcgcggccggggtggcggtgcccacgtactcgccggacccgcacgccgacttcctccggtccatggaggagatggccgcggcgctgcggctggacgcgcggcgccgcggcgacagggcgcgcctccacgagctgctgctctgctacctcgcgctcaacgacaggcgcgcgcacaagtacgtcgtcagcgccttcaccgacctcctcctccgcctcaccgccgccgccgcagccgccaacctcagcgacgacgaccggcacgagtaaccgccttttttttcacggtcatggccgtgcgtacggacagaatttcgggtacggcggaggctcaaaaatcctcgacagcatgagcgagcgttccaagatcacccagagctgtacatactgcctccagctccagatcgagctccgtagctagaaatctgttcgtgtgcgcagcattttggttcccttttacctctagctctgggtgtgttcagttgtgtgagtgtgactgtgtgagcagtgagcgtgctggcgaagatatgatatggtatggccagcctctaaaaacaaagcggcatttgcatcgcgctcgcttggtttgctttgtga

SEQ ID NO: 1737 - DNA, 5863 bp, Zea mays
ggagatgggggaaaggaaaaaagaaacaggagtcaggagcagaggccaggggtggcgaggcatttttggccacaggggcgcagccaaaaggcgtcgtcccatcgaatccgccacgtccgcatcggcgacccggcaggaacacggccgcgggcagagtgcctgtctccgccacaaccccggcgaggcccccctccccctccgtccacacctcctcccctccgtcctctctctctctctctctctctctccctgccgcgtcgccgctataaatacctcttgccgccgcctccttccctcccatctccaacgccaagcacatactgacacacacacacacacacaagcccattgcattcgccaaacattcgcccacgcgccattgtagcgcacgagctcccgaagccctcatcgccgtgccgttcgtctcgccggatcgatcgctccgcccctgctcctggctttggtgccgtatgcccgtccgtctccatagggcttgcattctctctgctttgatttgacggtacccagctgaagcacacaaattgcctccgtttgccggtcctgtgcgtgcgcgatcgagttttgttgatggtcatctagcaggatcgcaggagttgacgagccgcacgccctagctcgtacgtgaaaaaaacgtggccacgtttcaggtgctgaaaccaagatggttaatttcggtaagaaattgatggcagaccagttggaggagtggcgagagtactatattaattataagatgatgaagaaaaaggtaaaacagtatgtacagcagacccaaactggtggaaaaaatcgtgaccaggttcttaaggagttctcaaggatgcttgatgatcagattgaaaagattgtgctatttcttctgcaacaacaaggtcatcttgctaggaggatcgagaatttaggagaacagcgtgtcgtgcttatggaacggtctgatgtatcccaaatttgtcaaatacgccaggcttacagggaagttggatatgatcttgtgaagctacttaggtttcttgattcgaacgctactggtatccggaagatacttaagaagttcgataagcgctttggctataagtttacagattattacgtctctactcgagcaaaccatccttattctcagctccagcagatcttcaagcaagtgggagtcgtggctgttgttggtgctttgtctcgcaacctttcttatctacaagatcatcaaggaagcctagcaaatatctatgattacccatcactcatcttgaaggatcccgtcatagaacaaataaatcactcagtacagaaactcacacactccacaagctttctgcaatttctagggcagcatgcacttatcgttccgggggatatgcagagcggctcagatctcggtgatgacaaggattaccatttcctgtcactgctgctgaacctagtaaacacgtttctgtacatggttaacacatacatcatcgttccaactgccgatgactattcagtaagcctcggagctgcagcgactgtttgcggtgtgattatcggatcaatggcagttgcacaaatcttctcctcggtatatttcagtgcctggtcgaacagatcgtacttcagacccctcgtatttagctgcatcatgttgtttctggggaacctattgtatgctttggcatacgatctgaattccctaactgttcttattgctggccggctactgtgcggtttgggttcggccagagccgtgaaccgccgctacatcagcgactgtgtacccctgaaaaccaggctgcaggcgtcggctgggtttgtcagcgctagcgctcttggaatggcatgtggtcccgctcttgccggtctgctgcagacaaagtttaagatttatgggcttacattcaatcagaacaccttgcctgggtgggtcatgtgccttgcttggattgcatatttgttctggctgtggatttcattcaaagagccgggccacattgccacagagaattcagtcagcacgcaatcatctgattctggccgtcgagtaagcggtaacttggagggtggcctcggagagcctttgctcatagacgcaaaggcagggcaggatgaggacgacgaggacaatgacgaccccgaagaatctcatacacctgccacatcgcttgctgcagcatacagattgctgacaccatctgtgaaggttcagctactgatctacttcatgctcaagttcgccatggaaatcctactctcggagtcgagtgtcgtgaccacgttctatttcaagtggacaactagtaccgtggcgatctttctggcagttcttggtctgacggttctcccagttaatgtcatcgttgggagctacgtcaccaacctgttccaggacaggcaaatcctggtggcctccgagatcatggtgttgatcggcatcgtcatgagcttctgcttcacccctcactactccgtcccccagtatgtcacgtcagctctcatcacgttcgtgttcgccgaggtgctcgaaggggtgaacttgtccctcctctcccgcgtgatgtcgtcgaggctctcccgcgggacctacaacggcgggctgctctcgacggaggccggcacgctggcccgcgttgccgctgacatgaccatcacggccgctggctatctggggcagggccgcctcctgaacgccaccctcctgccgtccttggtgatctgtctagcatctatcgtcgcgacgttctgcacttacaactcactctactgattaccggtcgatgaactcctctccctcttatacaagttgccgaattgcgtcttgcagtgacgctgaaaattttcgggctgctgctgctaatgtaaactgctgcggcctgcgggtggacgagcggtccatgtgtatcgacgcctgtagtgttgcgaacttgctacggctgtaacatgacacgtgcgcgttaaataaaatgccctactgaagtaccctgtcatcgctcctcatgtgtcggcccagcccaacaattgcattaccaggaaggcaggaagagctctcgtcctcggactgcaagaatcctgtcctcacccccacatcgccttcctgctattctccccttcggttgctgacatggcaagttcaaaattgccgttagggtttcaagttcagaaattcatttgccagattccttgaataggatatactagcactgaacaccatacatgtttgagtgttgatgcgaggcaccgcgcgaacacaaggttgttgcgtaattgtgcaaccaagtaaaaaaaaagccgctggcagttcttcccgacgggttgttgaggcctttctttcctcacactcatggcatgctcggtgaagctgtgcaaaatcaaatgtttattttgcctatggacaactacgactcgccaggaggagacttccgaggagagagtgacacaaaggctgcggaccattgagaccaaaagagccggtgtgtcagctcaaaccgcaacaaacaaacaaactaccaactcaccccaagaacagtttcttcagcaacctctgattgcttgctagtagtatataagcacacgaacctctgagagttgacaccatcatcacactcgaaacccaacagcttccttcctggcgatccaattaacggcttctcttctgagctcagcacgaacaatggccaccatcctcaccgtcgcaagcttcttcgcacttgtgtgcatctctcaacaaggtgaccgctcgtcttctagtttctaatgtcagagtcgctcgtcactgttgcaccttgcacgttgtgcctgactgacgactcttcactccttttgtgacgcgtgcgtgcgtgcgtggcagcgcgggctgcgaactacacgttcatgaaggacgcggtgcacgcgccgcggacgggcttctacgactacatcatagtcggcggcggcacggcgggctgcccgctggcggccaccctgtcggcccgcgcgcgggtgctgctgctggagcgcgggggctctccgtacgaggacgcgcgcgtcctgaacatggcccacttctcggacgtgctggcggacacgtcggcgtcgtccccgtcgcagcggttcgtgtcggaggacggcgtgatcaactcccgcccgcgcgtgctgggcggcggcagctgcatcaacgccggcttcttcacgcgcgccggcgcgggctacgtcagggccgccggctgggaccccagggaggtgcgggcggcgtaccggtgggtggaggacgtggtcgcgttccgcccggcgctgggcccgtggcaggccgccgtgcggatgggcctgctggagaccggcgtgctgccggacaacggggccacgtacgaccacatcccggggacaaaggtcggcggctccatcttcgacgccgacggccgccggcacacggcggcggacttgctccggtacgccaacccggacggcatcgacctgtacctccgggcgagagtggccaagatcttgttccgtttcaaaggaaccaagccggtggcggacggcgttgtgtactacgactcgcgaggcaacactcacgaggcgtacctcagccccggcgccgccagcgaggtcatcctgtcggcgggggcgctgggcagcccgcagcagctgatgctcagcggcatcggcccggccgaccacctccgctcgctcggcatcgacgtgatcctggacctgccgggcgtggggcagggcatgtcagataaccccatgaacgccatctacgtgccgtcgccgtcgccggtggaggtgtcgctgatccaggtggtcgggatcacccggttcggcagctacatcgagggcgccagcggggccaactggaacagccacccctcgggcacgcagcctcctcctcctcctcctcggaacttcggcatgttctctccgcaggtaaacgttcgctctccccctactagtgcttttatacggatcagacagaggtgcacaatggacatggagtagagacgtgtgtttgtcgctcgcagacggggcagctcgcgacggtgccgcccaaggagcggacgccggaggccatcgcgcgcgccgtggaggccatgagccaggtccccgacgcggcgctccggggcgggttcatcctggagaaggtgctgggcccgcagtccgtgggccagctggcgctccgcaacctgaaccccgacgacaacccttcggtgcggttcaactacttcgcgcacccggacgacctccgccgctgcgtcgcgggcatcgccgccatcgagcgggtgatccgctccagggccttctcgcggttcacctaccaaaacttcgcgttcccggccgcgctcaacgtcacggccgagttccccgtgaacacgctgtaccggcgcggcggcgaccccagggcgctggagcggttctgcagggacacagtgatgaccatctggcactaccacggcgggtgccaggtcggccgggtcgtggaccgcgactacagggtgctcggcgtcgacgccctccgcgtcatcgacggctccacgttcaacgcctcgccgggcaccaacccgcaggccacggtcatgatgctcggcaggtacatgggcgtcaagctcttgaaggagaggatgcttctggaaggatgaagcagaaaaaggcctagtctcactcacatctctacatctctacagggtgcgtttaaccttgaagattcttttagtggcgatcgtacaagttaattggagatgctaattgtaatggatgaattccacaccgattaatttgcacaaaatgtggatggtataattcagcacatcgttcacttcgttgtctcagtcgaactctactgcaaagctccagctaaccaagactaacagcacagaaaaattgtaagcatcac

SEQ ID NO: 1738 - DNA, 2534 bp, Zea mays
ctgcaggcaggcaagatgcgcaggggccgatcgattcgaagagagctgagctgctgggccagccacccgttcccgcgctatctcccggcccaggccctcccctcccgcttcctgctctgctcaactcgatcccgccccaccatgccgcaccagggtagccaccgcccgggcgcgccggtccagggagaccccgtgttcccgcgcgccacgtccacagtgctgcccgacccgtcccgcttcttcgcgccgccgctcctcgccgcgccgctgcccaccaactccttcttccagaacttcgtgctcaaggacggggacatgcccgagtacatccacccctactccgtccgctccccgggcggcggcgcgctcgacgtgtgctacccgtcgcgggtccactcgccgtcgtccgtcacccagacgttcgtcgccgacctcaccgtctccgacgccgccgccgggagcgcgcagcgccacgtcgtgtcggccttcgacgacctctccgtcacgctcgacgtgtccccgtccctccgcgcgcacctcgtccgcggctgcccctacgtcaccgtcaccacgaccgccggaccgatcgacgtctccgtctcttccgtccacgccttcgtcgagctggtcggctcaaggtccagccaccacggctcgcccggcaccaaatggcgcctccggatggacagcggccagaccttcctgctctacgcgtcggccccgatccacctcgcgcaggccagccccacgcagctctcggcgaccgccttcgccggcgccatccgggtcgcctacctcccggacgcgtccatggagccggtcctcgaccgctacagccgctgcttcccgaccgccgggcacgccgcgctggacccgatccaccggcccttccgcgtcgactacgcctggcacagagagggacccggggagctgctgatgctcgcgcacccgctccacctccgcctactggcactggccgccgcggaccacggcgagaaccgtgccgcgcgggtgctctacggcttccggtaccggagcatcgacggcgacatggtcggcgtcgtcggcggctgctggacgctgcgcgccgacccggtgcccccggcgtggcactccacccgcggcgtccgcgcggacggcgtggccgaggtagtggccgcgctgcgcgccgacgtgggcgccctcgcgcccgccgcagtcaccaccacctcgtcctacttctacgggaaggcggtcgcgcgcgccgcgcggctggcggtggtcgcggaggaggtcgggtgcgccgacgtcatcccggcggtgcgggagttcctcacggccactgtcacgccgtggctggacggcagcttccaggagaacggcttcctgtacgacgccacgtggggcgggctggtcacgctgcaggggctcagcgactccagcgccgacttcgggttcggcatctacaacgaccaccactaccacctgggctacttcctgtacgccatcgcggtgctggcgaggctggacccgggctggggccgcgagcacgcgccgcaggcctacgccatggtggccgatttcatgacggtatcgtgcaacaaggccggggacggcggtggcttcttcacgcggctgcggatgttcgacctctggacgctgcactcgtgggcaggggggctggcggcgatccccgacgggcgcaaccaggagagcaccagcgaggccgtgaacgcctactactcggcagcgctggtggggctcacctacggggacgcgcgcctcgcctcgctgggcgcgacgctcgcggcgctggagatgctggcggcgcagacgtggtggcacgtccgtgacggggagggcatgtacgaggaggacttcagcgggagcaaccgcgtcgtcggggtgctgtgggcgaacaagcgcgacagcgggctgtggttcgcgccgcccgagtggagagagtgccgcctcgggatccagctgctgcccctgctgcccatcagcgaggcgctgttcccggacgtggcgttcgtcagggacctggtggcgtggacgctccccgcgctggacagggacggcgtcggcgactggtggaagggcttcgtgtacgcgttggaagggatctacgacacggaggcggcgctgaccaagatccgcgcgctcaccgcgcatgacaatggcaactcgctgaccaacctgttgtggtggctgcacagccgcgggcccgccgtaacgtcgtcggggacggggacgccgggttcgggttcgggcgttgccgctggtaccgccactgactctgacagtggcagtggtgggcaacacgagcagtggcggagacaggcatagggccgctagggctcgggccctactcttgagccgaaaaattactaggggcccaaatatgttccgaagaattgagagaatttgtataatccgttcatggtcatatatgtcattatctatatatttgtatgatttaagtttttctaactgatataaatatttgttagtgttatatcgggccctacacttagagaaatcctggcttcgcc

SEQ ID NO: 1739 - DNA, 176 bp, Zea mays
aggcagctctcctctggcaggcaggcgcgcggtcatcgtcgccatcgacgacggttgcttggctctgctatgctgtgttcgttcgtccatggtgtgctagctagccgtgcatgcattgcagtgtaacatgcgtgcatgcacgcgcgtacgtcctgccaaaggagagttgccctgcg

SEQ ID NO: 1740 - DNA, 2559 bp, Zea mays
cgggccccggggcccatgaggagtcgctaggggcttcaacttcatcgctgcccagaagtcgcacgcagcacggcctccgatcgatttcctcttgtccgcgtgtcccagcgaatcgccgtcatgccgcgcccgatggcctcctcctccgccaggggccgggcgaaggattccgacccctcatcatcctcggcagcggcggattcctccatggcatccctaatcgagcgcgccacctccaccacggcgcacgccgtcgacccggtgctcctccgcgccatcaaatcttcggcccgtgcctccgatgccgccatccgggacgcgttccgcctcatcctctccctcatgtccaagccccactcccacgtgcggctcctcgccttcagcatcgccgacgagctcttcatgcgctccaagctcttccgctccctccttgctgactcgctcgacggcttcctcccgctcgccgtcgggttccgccgagcaaaccccctcccgccgccgaccacgtccgctgccttactccggaaggccgccgtccaggcgctcgagcgctggcaccatctctttggtgcgcactaccgccagctccgcctggccgtcgagtacctcaaggagtccgcgcgcgtccagttctctggtctgcgggccaccgttgatgctcgtgcagctcgtgaggctcgcatgcaggagatctatgctggcaaggttgagcagttgcgtgaaaaccttgcgtcaatcaaggcggagattcggtccacgattgatgagattcgcaatggattggagatcatccgtgctgaacataagaaatttgagggttattatgtggatgacgaggaggagattgcatccttgtcaatgcggagcattagaacagcatcattgatggctggggagtgggtgcctgagactcaggagaatgaggcagtttttgatgcactgagggaagcacaccggttgcttgtgtcaaagcatttggtcacagtacaggagtggataactgtgcttgtgagggtcaaccttccagacaaccgtttccgagattctgcattgaaggatttcattgatgttaagaatgagataagggctgtgagagatcattgcagtgagcttggtcttgaccttgataattttcataggcggaagggtgaccaggaggaagaggacaatgagttctgggtggagggaaacatagaggcaccaaatcgtgccagagtccagagcagtttagatgttgcgagcactagcaaggacactgagaagggaaagtgggtggttggtggagtgtgtcacattggcaaggcaccagttgcagctaatggaacgagaaatcttgatccagaaaaatcaaaactcctcgctgaagcccctgtgctgccatggagctctgtcttggatcgctggggctcaagtggggatgtacacgtaaaccagaggggacttgaggtcgagagtcattggggaagagtggataatgatgccactatacctgcagcaaagattgcagagttgaatgttcattgctcaatttatagagaagccccagttgagatcctaccatgccacgcccctctaaaaaaaggaggactttgccagagaagggatcttagggtatgtcctttccatggaccgattgtcccacgtgatgcagaaggaaatccaattgagcagaacagtggtagttctgatgcagaagtaaatcctgttgagcacttagacattggaggacattcaaatgagcttaatggaatcagtgatgatgattatatggagggaacctcttcaagaatgacaggtgtcaataatgattatggtgacatagctggaacttgtgatctaggtaagattactgcagagcagttagcaagacaatcagttaaaaatgtccggaaaagagaaatggatcgcaaggcacaggaaagggcccaacgtgcaagaatccgtcagcacaatgaagatgtcctgcgaaatgcggctcttgcttcaacttcctattctgcagcagcctatgagcagcctacagaagcacatggtcggcgaggacgccgaggtaaggcaaaggcaccaacgctggcatcgatgctgaaaaagaaagttaccaccaaagacagaattgcagagaggcttctgaacactcgagccacagatgccacagtaagggatgtttctcataatgaagatatgagctacagggaagcatttccaaatcagtggtagcagaagcagttgagttgttcttgtgtaggctggataaacacgttaggaatggaatcgatgttgtttattggttcatactgtcagctaaataatacatattctgttgctatctaaatcagcacagaactgtgagtatgtttcctgatattctgttcttgtacagttagtaggataagttccttgtacatttcctaatgttcagtcttactatgtgtttttgaacttacactgctattgcttgcatttcaaagtgaacttgtttgtaaaacccgtaaaccgtgccctgttaagatgtactccttacataccaaataatcaaattggcaatggattgaacaggaa

SEQ ID NO: 1741 - DNA, 1923 bp, Zea mays
cgtaacagagaatcgccgcccgccaggccaggcgatagctagcgcgcggcggccatcgccaacgcccggcccggccccgggcagctcggctcctcacgcgcgcgtttgcagcgtgatcgtcgagcgccgccacgtacatacacgcgcctcctcctccccgcctccaggctggttggctagctgcaaccactcgcgagctagagctagctaactggccagcagctccaggtcgaacgaagcttagctagctagctcaccggcaggagcggagctacccctcgagtactcgcgcgcgcatgggaaacgccctcgggtgcgcggggctcggcgagcggctggcggccggcgccagggacggcgacgcggcggaggtgcggcggctgctggacgccaacccggggctcgcccgctgcgccgccttcggcagcctcagctcgccgctccacctcgccgccgccaaaggccaccacgagatcgctgcgttgctgctggagaacggagcggacgtgaacggcaggaacatctacggccagacggcgctgatgcaggcgtgccggttcggccactgggaggtggttcagacgctgctgctgttcagatgcaacgtgtccaaggcggacagcctgagcggcaggacggcgctgcacgtggcggcggcgggcggccacgtcaggtgcgcgcgcctgctgctcgcgggcgccggcagcggcaggagcaagctcgtgaaccgggcggccagcggcggcggcggcggcgtgacggcgctgcacctggcggcgctgcacgggcacgccgactgcgtgcacctgctggtggacgagcgcgccgacgtcgccgcgcgcacgctgccctgcgccgcgccgcccatggcgtccgtcggcgccgggagcgcgccgctgcactacgcggccgccggcggcgaggtcaagtgctgccagatcctcgtgtcgcgcggggcggacagggccgccgtcaactgcaacggtcaggtggctcccggtggacgtggccaggacgtgggggtgccactggctggagcacgtcctgtcgcccaagtctctgctgcccatccccaggttcccgccctccgcatacctctcgtcgccgctcgccagcgtcatcaccctcgcgaggtacgtacccaccgccgtttcaataagaaccatcacgagcactttctgaacatggatggatggatcgatgatacgtgcagggattgcggcctggctctgaacatgtcgtcgctgccaatggacaccatggacggcggcgccgacgacggcgacgcatgcgcagtctgcctcgaaagaccctgcaacgtcgctgccgaagtgtgcgggcacgagctgtgcgtcaagtgcgcgctggacctgtgctcggtgatcaggtcctacgacgcgccggggatcgccggcaccatcccgtgcccgctctgccggagcggcatcgcctcgttcaggagacgggccgcggcggccgaggccgagcctggcgccaatgccggcgaccggcaggcgtcgtccagcccacacaagaagcggagcacggagtccgaccaggacggcctccccctcgtctgcgctcctcccgccgtcatgtcgtcctgatcagcgctgcagacatagaaatagaagctgctgtgctgcatcgtctcttcgtcggtagaaatctgcagggtacagcagcagcatgggtggatcacaggatgcatagaagctagacagacagattgtttggttctgtttgctgatgctcgccttcggcatcggtggattttattttattttcattttattttttatggtgattcacatggcattagctagtctgctagtgtaacacgttgatttgctgtagaaaaagatggaacattcttttgctgtaaaaaaaatggggttggttggtttcgggcgttttgactca

SEQ ID NO: 1742 - DNA, 1463 bp, Zea mays
atgagacccaaatatttaacgggcaagtggccatcatggccgtgtttctggagacttcctgcggcgcgtggagagtggaggcagggggagaaggaagcagcagcagcagcagcagcagctccatccgctcgcttccttcccccaccgccagcgtcgcctctccgtgtgcgcgccccgccgggggtggcgtcgctgcacctttgggcagcaggcacctacgtgcggggggagccacacgcctccctctcgcctcttggcatggacgccggcggagagaagtgcggcgacgcggcggcagagggcggagacctctacgcggttctcgggctaaaaaaggagtgctccgaggccgagcttaaggtcgcttaccggaagctcgccaagaaatggcacccggacaaatgctcgtcctccagcagcgtgaagcacatggaggaagccaaggagaagttccaagagatccagggcgcctattccgtactctccgacgccaataaacggctcctctacgatgtgggagtatatgacgatgaggacgacgaggaaagcatgcaggggatgggggacttcatcggtgagatggcccagatgatgagccaggcgcagccgacgaggcaagaaagctttgaggagctgcagcagctttttgtggacatgtttcagtccgatattgattcaggattctgcaataggactgccaaggcccatcagtttcaggggccagccaaaagtagaacatgctcgacctcaccttcatcatcaccgtcccctcctcctaccacagcaaaggatgcagaggtgccatcatgtaatggcttcaataagcggggttcatcagctctggactcagggaagcctccaaagcctgttgaaggtggtgcaggtcagaaccaggctggattctgttttggggtgagcgacacgaaggaaacgccgaagctgccaggtcagaacgccagccggaggaggaacggccggaaacagaagctgtcatccaagcacgatgtttcatctgaagatgaaacggcggccggttcgtagcacaccagcagtttgacccattggcttcggtgatatatcattcgttggcccttggctgtgcctaggggccctagtagctagcagcagcagcagggacggcacatcatgccagctgctgtgatctgaagaggcgtttagctcatcatatgcctcaccttaggcctgtgggggattttccattcaaactcgtcgatgatactacatctttctttctccatctgtgtcgtttgtgttgtaagacagtgacttctgaagtctgatcgtctcggttctttttattaacatctgatatacgttactgcctgtctatagtagttaaagattgtcagcgtatctcaaaagacttaatacctttcgaaggagaagatatgcatcgttggggacgtagctcatatggtagagcgctcgcttcgcatgcgaga

SEQ ID NO: 1743 - DNA, 2641 bp, Zea mays
cgggcccgcagttgaaaccgccagccgttccttcccacgctcctccccgcccccggtccgccccccacctcaattccacaccccgcggcgaggccgcggggcgcccgcgcccaaacgccaaaaccctagctccccacccacccaccccaagcaccgcggggccgccgcgcgctcgcccacggtcgccacggatgcgcgcggcccgctcgcggacctcgacgacaccccgctcgcttgccgcggctgttccgccatggacgagcccgagaaagtgaggggcagggaggatgcggcgtcgggccgcgaggctggcggcgccgaggaggccggggatgggttccagctcgtgatccatggcaagaagaagaagagggcggccagcggccaggactgcgggactgctggctctggctctggcgctggcgccgggccagtgcgggcgttgaccagggagaagggagccgcgccggcgccgggggccaaggccaaggtgcctttccacgatccaagcattccccggccgcaggacgtatacaaaatcagagtggataactacaagccattcgagcatgtctggctggagcgcagcgaagacggcacccgacgtgttcacccgctggaaaacctgcctgttgaacagttcgttgacagaaatgttcctgacagagaaccagtgaagccagctgatttagaggatacaccatttacgctggttcaagatcacaaaggcttaacagaattagctaagaagttgaagagcgtaactgaatttgctgtagatctggagcataatcaatataggtcatttcagggcttgacctgcttgatgcagatttcaacaagaacagaagactttattgtggacactcttaagctacgcatatacattggtctctatttgcaagagcctttcaaagatccaacaaagagaaaggtaatgcatggtgcggatcgtgatataatgtggctccagcgggacttccacatctatgtgtgcaatctttttgacacaggacaggcttcaagggtcttacagatggagagaaacagccttgagcacctattgcttcatttttgtggagtaacagcaaagaaggagtatcaaaatgcagactggaggtcgagaccacttcctgatgaaatgatcaagtatgctagagaagatacacactatctgttgtacatatatgatttaatgagacagagactacagagggagtcaacatttgaaaatgatcttcttctagaggtccataagcgcagtaatgaaatttgcttacagttctatgagaaggagcttctgacagatacatcctatctccacatatacgggttgcaggaacatgaactggatgcaagacagctggctgttgttgctgctctacatgagtggagagatcgtatagctcgtcaggaagatgagagtactggttatatactgccaaataaggctttaattgagatagcaaagcagatgcctacagatgttggacatttgaaaagaattgtgaaatcaaaatatccatatgttgagagcaatcttgagctaattgcttacactgtctggaatgcacttgagtattcttatgccttcgaaggaatagctgagcaactaaagaaggaacggctggaacaggtggcactgaaaagtggtcagaccagtgatgaagtgactcctttggatgctgacattgataggagtaattttgattcatctgatcagtctgcaaatgtcaatgttgcttctggtagtagggctggttttatgagtgaagcagctttgatcagcagcatccacctagaggacaaaactcaaaccatgtcctcagttaagacctctcagaccttgctaggccagatcagaccagtgaataaggatgtcctgagcaataatatacatcagcaggctattcaggacctaagtctcactttaaaagctctaaaaggaaacttggcatctggaggagagtcaaatgagcaggctgggatcaacgtggagaactttagatcttctgtatttccttcccggcagttgtctggtgaggtaaaaccattttatccaaatcctggaatgcacagtgagaatgtttggattcaaacaactcagacaaacgagacaatgaagctgtgcaacacaacttactacagacagcttccaggacatagcactgagtcaataaaccaaagaagtacaggaagtttccagagttcggtgagacgtcaatctttcccaccttcaagttacaagaaatgagattcataccagtagccgtcctgatgtatagcagaaagggagaaaaagatgaacccctgtcattgatccttgttgtgctagtgcacatattgactgtagagaacaaagacttggggctgttttacttgccctctgaatgcctctttggatttttggcattcggttaactgaaaggtgaggaacccaatattgactgtaggtgcagggtatcggaagtgccatctcattgcccattggctcatggaatgggtggatgggactaacaaacatgttctggttcaatgatgaatactggaatcgcacaggaaaaatatactgtgacattgcgacagtgcaacacctaaatacaaagacttggaaacaaacaacttgctttgttctgttctt

SEQ ID NO: 1744 - DNA, 2390 bp, Zea mays
ctcacacttgacatccgttatgggtcgcagcccatgcacagcccaggttcgcggtccatctgtcttgtgtttctccttcctcattcctcagctcgagctcctcgacggctcgccagtctgccgccgcgcacggcgcatctgttccttctgctctgcgacggcgagcctctcccctccctccgtgctcgtatcgtagcctattttcgccgccgcagcttgcccagtgctgttatcttgtgttcggcaccgcgtcaaaggctgaccctctccaggcgcctggtagatcgcccagactcaaccgggtaagccttaccgcgcacgccaccatggccgagccctcgccgcctccggtgtcgaacgctggcctccgtatcctcctgtcgaaggaccggccggctccctcccctccacccaccgccgctgtctccagccacgccgaccgcgaccgcatcatcggagttttcaggagcgcgttgtctaggaacgaacccccggaaacattttcccttcagacggttcaggaagcaattaaacctcagaaggaaaccgtgttggttctagaggagaatcagtccttggaaaatgctcttcgaactttgctgcaggagcttgtgtcatctgcggtccaatcggataaaaagattatgcagtacgggaattctttggatagcggagaaagtaactgcctgataactcgccttcttgatattgtgctttacctttgcgaaagagggcatgttgaaggtggtatggtattccagctgttagaagacctaactgaaatgtcaacaatcaaagactgcaaagatatctttgggtatattgagagccagcaagatgtattggggaagcaagaactttttggacgtggcaaactagttatgctaaggacttgcaaccaacttcttcgcagactatcgaaggcaaatgatgtggtgttctgtgggcgcattattatgtttcttgcacattttttcccattatcggagcgttcagctctcaacattaaaggggttttcaatacatcaaatgtaacaaagtacgaaaaggatgctatggatggaatctctgttgatttcaacttctacaagaccctctggagtctacaggaacatttcagcaacccagctttgacttctacaaatccggcaaaatggcaaaagttctcttctaatctggcggttgtgttgaacacatttgaagctcaacctcttagcgatgatgatggaaaacttaacaatctgaacgaggaggaagatgctgctttcaatattaagtacctgactagcagtaaattaatgggtttggagttgaaggacccaagttttcgacgccacatccttgttcagtgtcttatattttttgactatctcaaggcacctgggaaaaatgacaaagaaggtccaacagggagcatgatagaggaaattaaatcttgtgaagagcatgttaagaagcttctggaaattattccccccaaagggaaggaatttctgaaaagcattgaacatattcttgagcgggagaaaaattgggtttggtggaagcgagatgggtgtctcgcatttgaaaagccaccctttgaaaagaaaccaggtcaggctggtgccagaaaacggaagccaaggtggagactgggaagcaaagagctcagccaactttggaaatgggcagaacaaaaccccaatgtcttgactgatcctgaccgtgtccgcatgccatcaattacagaatattggaaaccacttgcagaagatatggatccatctgctggaattgaagaggagtatcaccacaaaagtaatcgggtgtactgttggaaaggactacggttttcggccaggcaggacttggatggattcgcgcggttttcagactacgggatcgaaggggttgtaccttcagaactgctgccacctgaagtaaatgccaagttttcttctaaacccgccgagaaggttaagcggacgagaaaggaagattcaaaaagcgtgtcagctcatcagcccagagagcatcaggttgctgcgacacctgaaaccgacggcggtgtcgacccggaagaaggcgaaggcgcggcgccaatggattccgacaacggcgcggtgggggatagccagaaacggagcccgggggaggtctctggccctgaaagcgggcagtgcgagcctgaggcggacgctgatgataacgtgaggacggaaactaccagtagggatgctcgtgccggagagatgaaatgaaacagtggcatgaagaggaaccagattttgtcgactcactgacattgaaccagattttgaacagctgagatacattctcttgttggtgtgtactgtgtagtagacatcagtagccatccatttgaaggaaatgcttcccgctaggtc

SEQ ID NO: 1745 - DNA, 1198 bp, Zea mays
atctatccgaccacatggcttattactactagtaccggggccgggcgggtggtcacgcaaagaagtcaggcgcatgaagcaaaagtgagaagagcggggaggcgaggcgatgaccatctccactccctctcctccctagtagtgtataaaaagccggcgccggccgtcgtcccctacccacccacccaccccgggcccctcctcccgctccatccatggccgccaacctcccggacgccgacgccgcggggttcaagctgttcggcaaggtcatccagccccccgacgcgcaaaaacgcggggcggacgagggcgacgacccgacgccacagacggcccttcctcctcctcctccccctcccccgcccccgcccccgcagcaggcgcccgcggctgggggtcccggcgccgagccgctgccgtgcccgcggtgcggcagccgggagaccaagttctgctacttcaacaactacaacgtgcggcagccgcgccacctctgccgcgcctgccgccgctactggacggccggcggcgcgctccgccgcgtggcctccgcgtccccgggccgccgcaggccgcgccccaccgcccgatcggcgcccgtcgctgccgccgcgtcgtccgcccccgcagccgccgaggaggattcttttggtggccaaaaggatgctgccggcctgctctgcgaccgcgagagagttcagtttggtaggcagtcaaaaaggccgccactccagcacgccagggtgacagagcagtgcagatgcaggagctctaaaaaaacatgcttcatcaccgcttccaacgagctcgtcagggtcctggccaaccccacaggcgtcctcaacccgtcggcagcgtccctcctcgcgccgcgctgcgctgcgctccgagctggaagctagcggaggcgtcgctgcgggtggccacgcggggctgggtgttagccgctgcacaggcaactaccgtgctggcatcagacgacgccgctgtagcagctgtaagcagatgttcaagagtgttccaagcagaagaacgaagtgcggctgcgtcggcagaggcacgacaatgtccgagttactggaccagagtgggccatgtaagcgtgagttgggctagaccattagagaagtataaaggggaacaactgtaggggcatcaaacaacaaaaagctaaaccgcaattgccttcgtcgca

SEQ ID NO: 1746 - DNA, 8260 bp, Zea mays
atggaggccgccgcgcccgatggggccgcgcaggcgtccccgccccccgcggaggccgaccgcccgcccgagcctcgccccccgccgctgccagccgcggggacgcacgatccgcacttcctgagctcgatcataggggacgcggcgcccccgcccccgccgccgccgctcgggcagaagcggaagcgggggaggccgcccaagaggaaggacggcgcggccgtggccgcggggccggtggtgccggcgccggcgccggcgctcgcccgggccgcccggagaaggcaggacgaggaggaggtcgtctgcttcatctgcttcgacgggggaaacctcgtcgtctgcgataggaggggttgccccaaggtctaccatccggcgtgcatcaagcgtgacgaggcattcttccagtcccggagcaagtggaactgcggctggcacatatgcagcagctgcgaaaaggcagtgcactacatgtgctacacttgtacatactccctctgcaaagtgtgcatcaagcaaggtaaattcttcagtgtcagggggacaaagggcttctgcgacacatgttatgggactatacttttgatagaatgcaaagatgaaagcgcaacaaaggttgattttgatgacatactcagctgggagtacctgttcaagctatattggctagatctgaaagggaagctttcattaacattggaagaactcactactgccaagaatagatggaatgttcctagcacttctgctaggaaagaaaaagaggagtcgtctgatgacctgtatgatgctaataatgatgatgatgctggttctgactgctcctcaggaaaacgaaggcgaactaattcaaggaaaaagggtcaaaaacgccgaaaggtaaatagagattgtagcattcttgaaaaaaaggtcgagcttccacttagaaatactgagagcattccggtggaagtgccaaatgaacgggtgccatatccggtacacacaaaagtaccaaatggacgagtacccatgccagtagacacaaaagtaccaaatgaaccagtgtccttggcagcaaacacaaaatgggcatcaccagagctattggagtttataggacacatgagaaatggcgatcaatctttcatttctcaatttgatgttcagactcttctgcttgattatatcaagaagaataaccttcgtgatcctcaaaggaaaagccagattatttgtgactcgagacttcacttcttgttcaggaaagcacgagttgctcactttgagatgttaaagcttttggaaatgcattttcttacgaatgagacttcaacagtaactaatagtagccaagtgactatcaatctcaattcagctcatgtagataccaatggacacaatgacacggctgcaaaagtttcccctgataagaggaggaggatctatagaaagatggaaagagatacacaagttaatcttgaggattatgcagcaattgacatgcataacataaatttgatttacatgaggcgcagcctaatggaggatttagttgatgatgtcaaattctcagataaaattcacggtggttttgtgaggataaaaatttctgatgtttgtcaaaaacaagacatataccgtctcgtaaaagttattggaacacataaggttccagaaaagtatagtattggaaagaagatgacaaatgttgcacttgagatattgaatttaaacaaaaaggagattattacaatggatacaatatctaatcatgattttacagaggaggagtgcaaacgtttaaggcagagcatgaagtgtgatttaattagcagactaaaagtgggtgatatcctagagaaagccaagatattgcaatatgtaagagtgaatgattggtttgaaaatgaaaagcagaggcttgggcatcttcgtgaccgtgcaagtgaaactgggcgcagaaaggaacttagagaatatgtagaaaagctgcagcttctcaacgattctgaggaaagaactcgcaggattattgaaattctggaattgcatgttgactcacatatggatcctaattatgagtctgctgaagaaacagatgagaaaggaactgttggaaagtcggtaaatcagacaagaccagatacaaccatatcacgaaggatatcgagatatcttagcactgtgcaaaaccatcctaaaaaagtttctgattctagccaccttccaaaaagcttgtccacagaaagtgcaatatgtggatcaggagcaagaagtttggagaacagcacagcaaacagaactatgtatggagctggaccactttcatcttctgtagtaacaatgacaaacgacacagagccagagaaagtctggcactacaaggatccttctgggaatgttcagggtccatttactcttttgcaactttcaaattggacaagttacttcccacgtgatctgagagtatggcttacatttgagagtgaagagagatcattgctgttgactgaagtgctttcaaaacagcagaaagattttactcaggctgcatcacatacaagtagcaaggcaacactggttggcactggacatacaaggaacaaccctagtgtggatcagaccaatgctttctcccctgttggtcatagcgtggttagttcttctggaatacctgttcagtataataagtattctgttccagaaagggaaagtgtgtactctccagatgatagcttgtcgctgtcaactagttcggttccaccaaaggatgcttatactgtgaatagccaagcacactgccagaataagcattctgttttcattcaatctcctgggagttcatatgggcacacagacttgaaccatgatggaatacagggaggatgctctggtgaatcaaaccaccatcacagcagtagagccctatggagtcctacagtggcacatgtgagttgtggacgtggtaacgtggaatctcatcagaatcagcatgtttcctggtcagaaagtcaacatgaatctaaaaatggttcacaaggaggatttgttaaagatctgaattcaaggcaggatctatcgaaaaacctacctgctcaacgtattgggaaagatgtttccagtcctttgtttgcttggagtccggccgagtcgaggacagcttcaagtcaacaggaagggtcttgcttaagttcaacaactaacccaagctttctcgatgaacttcattcttctattgcttctgcaaagcctaagagctgcgctccagcaacccccattgaagacagaggttctagttcaccatcagatatgctaagtcatgaagaaagagttccaatctgcagtccacaatcagcccctttagcatctgcttctgatatgtgcaagatggaggagatcatgaatcagcaaagaacacttgtggtggatacatcgaatgcttcagttaaccagtctcctgaatcaagggcttttcctgtatcctctcctgataaccaagatattgaccgcgagtttcctagtccagttccaagatctgagaataaggacattgctgtggacagctcagaattagcaccagcgtcacctgaaaatattactacgaatttgcctgtttcagatacatgcaagatggaggaggtagtgagtcaacaacaagtaattggggctgttgtatcgaattcttcagataaccattctcctcaatctaaagtttcccctgtatcttctaataatgaagatacgaaacataaataccccagttcaaccccaaggcccgagaataagaatcctgcggtggatagtttactttcaacgtcagctgctcctgaaaatctaacgacaacttcaacccatgattctgatacatgcaaaatggaggtagtgaatcagccaaaaacatttgaagcggatgcatcaaatgctccacttcatcaacttcctcattctcacagtttcctggtaccttctgacaatcaagatattgagtgtgaatgtccaggtccaactccaagatctgacagtgaggaagctcttatgaacaactcagcgacaactgcatcagcctctgatacaagcaaaatggaggagtttgtgaatcagcaaaaaacccttgaagcagattcatcaaatgctccacttaatcaatctcctcattctcacattttctcagtaccttctgacaagcaagatattgagcgtgaatgtccaggcccaactcaaagatctgacactaaggaacctcttatgaacaactccgtgttaacatcaggaccatctgaaattcagacgacagcctctgcagcctctgatacatgcaaaatggaggagtcagtggatcagccaaaagcgcttgaagcagatgcatcaaatgctccacttaatcatcatcctcattctcacattttccgtgtatcttctgataatcaagacaatcagtgtgaacatcctagcccaaatccaaaatctgacagtaaggaacctcttgtggacaactcagtattaacatcagtggtgcctggaatgctagcgacaacttctgcctctgataaatgcaaaatggaggagtttgcgaatcagcaaaaagcacttgaagtggatgcatcgaatgcttcatttaatcagcctcacattttcgctgtatcttccgataatcaagatatggagcgtgaacgtcctagcccaactccaaggtctgaatgcaaggaatcacttacggagaactcagtattaacatccttggcgcctgaaattctagcaagatcttctgcctctgcttctgataaatgcaaaacggaggagtttgtgaatcagcaaaaaccaattgaagcggatgcatcaaatgcttcacttaatcagcctcatgtttttgctgtaccttccgataatcaagatatagagcgtgagtgtcctagtccaactccaaggtctgaatgcaaggaatcttttatggagaactcagtattaacatcagcggtgcctgaaattgcaagatcttctgtatccgcttctgatacatgcaaaatggagtttgtgaatcagcaaagaccaattgaagcagatgcatcgaatgcttcacttaaccagcctcgcattttcgctatatcttctgataataaagatatagagcgtgaatgtcctaacccaactccaaggtctgaatgcaaggaatctattatggagaactcagtattaacatcagcggcgcctgaaattcttgcaatatcttctgcatccgcttctgatacatgcaaaatggagtttgtgaatcagcaaagaccaattgaagcagatgcatcgaatgcttcacttaaccagcctcacattttcgctatatcttctgataataaagatatagagcgcgaatgtcctagcccaactccaaggtctgaatgcaaggaatctcttatggagaactcagtattaacaccagcgacgcctgaaattcttgcaagatcttctgcatccgcttctgatacatgcaaaatggaggagtttgtgaagcagcaaagaccaaatgaagcggacgcatcgaatgcttcacttaaccagcctcacattttcactgtatcttctgataataaagatatagagcgtgaatgtcctagcccaactccaaggtctgaatgcaaggaatcccttatggagaactcagtattaacatcagcggcacctgaaagatcttctgcatccgcttctgatacatgcaaaatggagtttgtgaatcagcaaagaccaattgaagcagatgcaccaaatgcttcacttaatcagtgtcgcactttcgctgtatcttctgatactaaagatatagagcgtgaatgtcctagcccaactccaaggtctgaatgcaaggaatcccttatggagaattcagtattaacatcagcggcgcctgaaattcttgcaagatcttctgcatctgcttctgatacatgcaaaatggaggagtttgtgaatcagcaaagactaattgaagcggatgcatcaaatgcttcacttaatcagcctcacattttcgctgtatcttctgataataaagatatagagcgtgaatgtcctagcccaactccaaggtctgaatgcaaggaatctcttatggagaactcagtattaacatcagcggcgcctgaaattcttgtaagatcttctgcatccgcttctgatacatgcaaaatggaggagtttgtgaatcagcaaagaccaattgaagtggatgcatcgaatgcttcacttaatcagcctcctcgttgtcacattttcactgcttcttccaataatcaagatattgagcgtgaatgtcctagctcaactccaaggtctgacagtaaggaaccttttgtggacaacttagtgttaacatcagcagtgcctggaaatctactgacaagttctgcagttgcctctgatacatgcaagatggagatcttgaataagaaaataacacttgaagcagatgcatcaaatgctccacttaatcagcctcctctctctagcgttttcgcttcatcttctggtgatgaccaagataatgtgtgtggacgtcctagtccaaatccaagacctgagggtgagcagcctctcatgggtaactcagggttaatatcaacagtgcctcgaaatctaacttctacttctgcatctgcttccgacatatgcaaaatggagatcttgaatgagaaaagaacacttgaagcaaacccatcaaatggtttgattactcaatctcctcaacccaaggttttccttgtaccatctcctgatatcctagagtgtgaattttctagtgaaacacctaggcatgagtttaaggaacctgttgcggacagctctgggttaacttcagcagcacatgaaaatttagggactaagccacatgtccactcaccagatgcctttgtaccaccaaagtctggtgctctaactggggaattaggtgacacgaaatcagattttaaaggtgaagaaactattcaaaaagagcaatattttggaagtgaatctattgccgctacaagagagaatttgttaattgatccttcctctggtgttgagtcgatagatgtgtcagatgtactggattctttaatggaagaaaggagtggaacttcgtacatgccaggatcaatagaggacttcctagccgaagaagaaccacaatactctagccctatcgcattatctccttggggtgaacctagttactaccaaggtgatgctgttgattctgcgctatggggtactcaagatttgatcaatgatatgtggtcattgctttcaccaagacctatgctccaaccttcatctggtattggaactgaggggaaggaaacttttgatatcaacgaggtggctgtgacccatgttagtagtgattattttcaaaaaggatcaatgtttggggaggaaaatgtgaaccaggcaaacttgagtgctgctgcagactggatgctgcctgagcaggtcccatcaataccaaatggtatgtcaacatcgtcagtagatgagagcaccatagttttaggttctcagccatcaaccaatcagagcttagactggggtggtactacatggagtattggccagaatgccagcgtgtatagcaatgaaaaagcagagccctcgagtaaaagctattgggaagaaccaaggaagcaggaaaccgccaaatccagtgtttctatttcaggacaggccattggaaacaacaagggcttggaccctcgtgataatgctgctaatcggggcagccggctgagtcatcatcaccgtggcaggtactcccaaatcagtgaatcttggctacttagttcaagtcactctaggagtaggtctgatagatttggcagcggtgggtcatcaagatcaacttcaaaggggcaatctaggggctaatgtaaattgtcaagtgcaggagagaaatgatgcatcttgtagctaacctgcatccttgatctctgcagcaggaatagttttctttttaaaattctttgtcatatctttgcagtttgtataggctaattacagtttagtccactcagactgtagcaaggagcatatatgtttagcatagaggtatttgactgcccattgcccaaggagtagattcagctcttgggcatggtctgtatcatcctgacattctgttggatggagctccaattgtaccaccggcatctctgttgacaccgaaacgcctgatgcgttggaaacaattatatctgattgattggtttaacttcgtggaatccctattttcgaagatcacgaaacg

SEQ ID NO: 1747 - DNA, 1933 bp, Zea mays
ggccatcataatctctagtggattcggcccatcgacgatccgacggcggacgccttaaacccttctccttcctttggtccgcctcctccccgcccctccgcagtcgcagtgccgcagcatcgtcgccatggctctcctcaagaactccctcatgctcccggggcggttgcgccatgcggcggcggcgctcactgcgcggcgccacgcggcgacgttgacggaagagtacgcgcgccggaactacgccgataacaactccgagtacaacacggtcatcggatcgctcgtcgctcagcgcaggccctaccttctgcgtgatgcttacgacgacatgatgcttgatggcgtgaagcctgagcgggaaacgttccacacactcatagtcggtaccatgaaaggcagccggctacaagatgcgctttacttccgtgatcagatgaaagaaatgggtttgaagcctgatgttaacctttacaacttcttgatctccacttgtggaaaatgcaagaactcagatgcagcaatcatgcttttagaagaaatgaaggcacatgatgttaagttgaaaggagaaacctacatttgtctactgaatgcacttgcatcaacagggcaaactgatcaagtttatgccatagttagtgatatgagtgctgctggacttggattaaacaagttttgttatgctggattgataactgcattcaagaacaagacaccaaccgctgaggaaactatggcgaagattcttgacttcgtcgggcagtcgaaaggttggcaatatgttgaaagagtatcaaaggacattgctgagaatataatgatgaatgtgtcagaggaagaactgtacaacctcccaacagcagaatatgtaaataggcgaggaggatttgtctttaaacaacatacagtttatcatgttgctctccaagcttgtgcagaattgcgaagcaaagagacacttgaagcacttctggaaatgttcaataaggataatagagatggatctacttatgatgcctacatggtgatgcaagctatgaggtgttacctacgatgtggagatattgattctgctgttaagatgtttgaagagtattcaagctcgaggtccccacccgctgagttgtatgcgacacttgctgagggagctatgattgggtacactccaagaggaatgcaacttgctcaagaaactatagagaagatgacttcaagaaattttttcttgaatgccaagatgggaactgatctcctacttgcagctgccggtgaaacggctggtggatatacgactgcaaattatgtctgggatctcctgcaaagccgtaaaatcactccaacacttcctgctgttgaggcataccacaagggtctgacggcgcgagagattccttctgacgatccacgacttctcaatgttacccgtgttttggacaacctgaagctccgatttggaccaagaagaaacactcagtaacttagaaacaatattgtccctgatacgatgcaatcagtaatttgtctttgttaggtttctggatgcgaaggcatgtttacagtccgaaaaaccaaggaagttcatcaggatgacgtaaagcagaaccaccaggcatttgaggggcatggcaggtgtgggaatcaaggtccggaaacggaagccagttgtttccagggttttctcgagaaatcttcacctgccaagcctgaagacctgaactcggatgcactgggttttgatttgaaatttaatgtatcctatgttgcctaccattgtttgacaaccatttatccgaacttttgatctagaagacagcgggaatatagttgtgcgcgagtcaagctgtaggtcgttcgttttgacgcttcctctatgtactatctattagtactagtctaatacccgtgtaatgatattgattagatgactaag

SEQ ID NO: 1748 - DNA, 1130 bp, Zea mays
cggatccaccgcgatctcaccagagagagacctcgtcggccaagcgcaggcggcacacgtcggatccaccagacacggcacgtcggcagcacgatcgatcaggaacggaatgcttcgcgtcgacgacctcatcgccgagctctgcctcctgccggccagagtcctccgcaagaggaagcgcaaggaattccagacggtggagctgctggtgcggatggactgcgagggttgcgagcgcagggtcaagaaggcattggaggacatgaaaggcgtgagcagcgtggaggtggaccagaagcagaacaaggtgtcggtgtccgggcacgtggaggcgccggaggtggtggagcggctgcggcggcgggccgggaaggaggccaagccgtggccctacgtgccgtacgaggtggtgccgcacccctacgccccgggcgcctacgacaagaaggcgccgcccgggtacgtccgcaacgtgctcgacgaccccgacgccgcgccgctcgtcagggccagctccatggaggagaggtacaccaccgcgttcagcgacgacaaccccagctcctgcgccgtcatgtgaaaacaataatatactcgtgctctcatagccgctgtacaattttgtgcaaatgtaaattactactaccttatctcgagcgtggaacctgaatcagtcccaaacatcctctaaataagaagcaaaacaacttatttaaatgtcttccaaaagttcacaatttcagctccaccattttctaaagctccaaccccacaccctatatatatgagtgcaaaagggaaacagaaagacaaattaaatatgcaatggtttgtatcgcccttatgagacccccatcactaatatgttccgttccaacggcctgcacacaaccggatggtttctgatagcagctataaaacacgaccaagaaccactaaaaacacgaggtttcatcacaactcccacggtgaagctgcttaccgctgctatgatatactaaagatatagcctccaaaacaaggaatgcaggttaaatcgccatcacacaaatcagcagggagcagcagcagaattaataataatgtcttgtacttatataacttcatccactcagcagtctccgaatgat

SEQ ID NO: 1749 - DNA, 2701 bp, Zea mays
atggagtcgacaatggagaagccggcggtgatggacgcggcgcgcggcggcggaggggtcgggcgggccaagtcggaccacctggcgccgtcgctgtcgctgagccggacggcgtcggcggagacggtgctgggcacggcggcggacgcggccaagcccgccgggttcgggaggaagcggcgctccgcgtcggtcggcggcggcaacaacaacagccacatccgcaagtcccggagcgcgcagctgaagctggacgtggaggacctcgtcagcagcggcgccgcgctcagccgcgcctccagcgccagcctcggcttctccttcaccttcaccggcttcaccccgccgctccagcacatgtgctccgccgacccgccttcattcagcgacgacgagaacctggacatcgaagccggcacacggcgcaagaaactggtgaccgagccgaccctgccgatatacctcaagtttgcggaggtgaagtacagggtggcggggaagggctcgccgcgggagatactgggagggatatccgggtcggcgtcccccggcgaggtgctggcgctgatgggcccgtccggcagcggcaagacgacgctgctgagcatcctgggcgggagggccgccgccggcggcgccgtcgacggctgcatctcctacaacgacgagcccttcagcaagtccctcaagcgcaggataggatttgtgactcaagatgatgttctctttgcccatcttactgtgaaggagacattgacttacgcggcactactccgtctcccaagaacaatgacacagcaacaaaagaaagagcgagcgatggacatcatacatgagcttggccttgaaaggtgccaggacacaatgattggaggatcgtttgtacgtggggtttcagggggtgaaaggaaaagagtttgcattggaaatgagattttaatcaatccatctttactgtttctggatgagccaacatctgggctggattcaactacagctctaaggatcgttcagcttctccatgacatagctgaggatgggaagacggtaatcaccacaattcaccaaccatctagcaggctgtttcataagtttgacaagcttattctcctgggcaaaggaagtttgctatactttgggaaggcatctgaagccatgccatacttccagtccattggatgcgccccacttattgcaatgaaccctgcagagtttctactggatctcgccaatggcaacactaccgatgtctcagtcccttcagaattagatgacaaggtgcatatggaaaatcacaatttggagaacaataattccaagattgactacaggccatcagcacaagatgttcatgagtatttggtagatgcctatgagactcgagtggcttttaaggagaagaagaagcttctagcaccactgcctatcagtgatgatctgaaggcaactataacatcatcgaagcgagagtggggcacatcctggtggcagcaatattccatcctcttttgtagagggatcaaggaacgacgacatgattacctgagttggatgagaatcacccaggtcatagctacatcggttatcttaggtttactgtggtggcactctgatcccagcacactaaaaggtctagaggatcaggctggcctgctgtttttcatcgctgtgttttggggcttctttccagtgtttactgcaatctttacattccctcaagagagggcaatgctgaacaaagagcgcgcagtcgacatgtacaagctcagtgcatacttcttggccaggacgacgagtgatctaccacttgaccttttcctcccaatcatattcatggtgatcgtgtacttcatggcaggcctcaaagcaactgccacacatttctttctcagcatgttgaccgtctttctcagcataattgctgctcagggactcggattggcaattggagctactctgttggacatcaagaaggcgacaactctagcttcagttacagtcatgacattcatgctagcaggaggcttctttgtaaagagcgttccaccattcatctcctggctgcgctacctgtccttcaactaccacacgtacaggctcctgctgaaggtgcagtacgaccccgtgccggacatcctgaccaccacgaggcacatggacagcggtggcaccgaggtggcagctctcgtcgccatggtcatcgggtaccgggtgctggcctacctgtccctgagaagggcgaaggccctgggcagctagcgcatcccttcaccgcagtgactgaagcctgagctcgtggagcgggttgggtcattgggtgtgtagggaagtttgtgctatattgcgctgtgaaaagatggaagtctttttttttaacttttctgtctttttcaactaagttctgagcaagtaccaacactgaagaacaaggatctgtagcgagtgtaccagagacaagctgtgctgtaatttttccttcacaacgattgcgtggttaaagtgattgagtataagcgtgagtttagattgccggcatattcttaggatgggtagctctaggacaaattctgttcatactcccaagaacgcgtacatttcatcaatgacattatacgagttcttcgcgatggacagaagcacaggatgaaggcctgatgtcccataggtcagagggaaggtatgatcagtgtttgattcatct

SEQ ID NO: 1750 - DNA, 3109 bp, Zea mays
tccccactggccgcgggccgcacccggggctcgggcgttcggcatccctccccgtcgtaactcagcagcgccgccgtcgccgtgcacgcaccagcgccacgactcggcgcttacccatcaaacattcaaaccccacgacgccgccggccacggccaccgctagggttttagcctcctccgatgccgccgcctcgccgcgcgcttgtcacatccctcctccgcctccgctccttctcctccattgcctatcctcatccctacccacccgcgcccctgcgacgccaccagttcgtcgccgaccccaccacctccacaaaccgtggtgtcgtcgggggcatcggcggcgtcggttccgggaacgggaacatcttggacccgacgcagctcctccgcgacgacccggtggcaatcaccgcttccctttgggtatcctccttccgcgccgccgcctccacctccggctcttgtacccccgcaccgccgcagccactcacccccttcctctcgcgcctggagctgtgggtgctcgcctaccagaaggcgtacgctgacgagaccggttcctatctgccgcgctcctccatcccggcctccacgctcgcctccctcctcacgctccgcaacgccgtactcgacggccgcttccgcttcggcaaccgcctcacccccatcctccagtccccgcgcgccgccaacgcgccggaccctgccaccctctccaagcgcaagctccgcgccctccttacaacccccggcccatcgcccttccaggaccgcgtcgtgcaggagctgctcctactcctgctcgagcccgtctacgaagccaggttctcgccaaagtccttcgccttccgcccaggtcgatccccgcatgccgcgattcgcaccatccgccgcagctttgctccgtacctctggtatatcaagggcgacctctccccactcctgcactcgcctgatcatgctctcgtggtcggtgcgcttatccgtgatgtgcgtgataaaaaagtggttgatttgatccgttcggccctgctcaccccggtggtgaccgcaagcgatgatgctgcagtgaagaagaagaagaccaagaggaaataccagaagaagaaggtgctgccagagggggagccgaagcctgatccttactggttgcagacgttttttgggtttgcaccagaggaagcacagacacagcctgattggggccattgtggggtgctgagcccgttgcttgccaatgtgtgcctggatgagtttgataagtggatggaagagaggattaaggagttttacaagccatccaagtccgatgttgtgggaggggatgatggtattgagcagggcaatacatcatggccagagtttgtccccacgactggccctgacaagacaaggaaggtggactacattcgatacggcgggcatttcttgattggtgtgagggggccaagagcggatgcggcggtgctccggaagcagctagttgagttttgtgatcagcgattcaggatcaaacttgataacgagagcctccctattgagcacatcacaaaaggagtcatgttccttgaccatgtgctgtgccgtcgagttgtgtacccaacactgcgttacactgctacaggaggcaagatcattagtgagaagggagttggtacactgctctcagtgacagctagtctgaagcagtgcatcaaacaattccggaagcttgagtttttgaaaggagaccgcgaacccgatccacaaccatgcttccgtatgttccacgccacacaatctcacacaaattcgcagatgaataagcttttactgacgatggcagagtggtatcgctacgctgataaccgcaagaaggttgtcaacttctgctcttacattataagggggtcactggcaaagttatatgctgccaagtacaagttgcggtcaagggcaaaggtctataagatcgcgtcaagaaatcttagtcggccattgaaggataagaaaggccagtcgccagagtatcacaatttgctgagaatgggcctagttgattcaattgatggtcttcagtatacaaggatgtcgatggttcctgatcctgattacacgccgttaccatttggatggcggccagatcatgagaagattttgctggagtacataaagctcacagatcaacagacattggaagagcagagaaactgcatcagggaggacgggcttataacaccacaggacaatatttcgatgcttgtatggggctacaagaaaaatgctgttttacttccttcaaaagtgagtgatgcccaaggatccacagaggaccttggttcagataccgatgaattggatgaaaaagagctaggaaatgagggtaaccaaagtttccaaaagcttgctgaaatgtcatgagttttggcaaactctgtagtgttcccaaggggtatttgactcgttgactggatggttggtttgtgactttgaaaacacaaaaccatctgctagttctttgctgactgctttgtgctggaacagtagttgcaaaatcaagggatgattctgagcctcctttgcttattacttgcgaaggacttgaatatgcagctataagcaggcctctaccaattatacgtgggcgagcactatttaaactgaagatatctcagttaccacgatcgtcctcctcgtcaccatcgcccctgccatccacgtcggcgccgccggaccagatgtcctcctcgtcgctaccccagccgtctgcctcgtcgtcgccgccccagccatctgcctcggctccactgcaatagccatatgccttggcgccactgccccagccgtcttcctcggcggcctgctcctcactgccttgtcgtgatcaagatgccccctagaaggatggttgggccgaggacgctcacggatcttggtggtaagtgacttatgttcttcactcatttactgatttgctgcctagaattatatctgctttgggacttgtacaaccagaacaaattcagagccgccactgctgttcatctctgtgctttctgtttcttcaattaatgttcataggaacctattgttaactattgaattgaaattgtatgtcttgtccctg

SEQ ID NO: 1751 - DNA, 4376 bp, Zea mays
atggcagcaacaccggcctgggactgggaggaatcgcttgtattcttcctgcagccgttcttcctccacggcgtgagcgccgcggcccaccttatcctggcgctcgccgtcgcgggacgcttgctctttcgccgcctctccgccagccggaccaaggacggggaggtgggcggaggagatgctagccgcggcgttggccggtttcggtactggtacggggtctctgtctgcaccacgtgggctatgggtgcgttcgaggtcctcctcgccgtctactcatggtacgcgaacggcggcgccgggtggtcgcgcgacgcggtcgttgaacaggtggacgcggccgcgcgcgcggtgtcgtggctgctgctcgccgcgtacctgcagttcgatttctggtggcgtcggcagcgccaggagcggttccccgtggcgctcaggctttggttggcgctcttcatgctgctctccgtagtcaccgtcggcgttcacgcggcgatgatcctcgacgggtcccttgtgcccggtcgatcgtgggcgctcgacgcagtctctgttactgcagcagcggttctactctcagtctcagctgggttcttcggaaggaaggagggagagggaggcggccatgcttccgaggcgcatgaacctctgctgaacggcgcgcacgaggggtccggtgacgacgacgagaacagcagcagcgccgccgacgcatccttgttcactggcgccggctttcttagcgtgctcaccttctcttggatgacgcccctgctcggcgtgggtcacaggaagaccctcgtcccggaggatgtcccgggcctcgaaccaggcgacagcgttgctggcgtcctcccgcccttcaaggccaaccttgaggcgctcaccggcgacggcggcaggtcgagccggaaggccgtcactgcgttcaagctcaccaaggccctgttgcgcaccctacggtggcacgtcgcggtgaccgcgttctacacgctggtctactgcgtcgccgtctacgtcgggccgtacctcatagactccctggtccagtacctgtacctcaacggcgacgagaggtacgcgagcaaggggcagctcctcgtactcgccttcgtcgtggccaaggtgctcgagtgcctgtcgcagcggcacttgttcttccggttgcagcaagcggggatacgagcgcggtcggcgctcgtcgcagtcctgtaccagaagagcctcgcgctttccagccagtcgaggcggagccacacgagcggagagatgatcaacatcgtcagcgtcgacgccgaccgcgtcggcattttctcatggtacctgcacgaggtctggcaggtaccgctgcaagtagtcatggcgatgttcatcctgtactccaccctcggggtggcctcgctcgccgcgctcggtgccaccgtggccaccggcctcgccaccgtgcccctgggaagaatgcaggagcggttccaggagaagctgatggacagcaaggacgggaggatgaaggcgacgtcggagatcctgcacagcatgaggatcctgaagctgcaggggtgggagatgaggttcctgtccaagatcatcgagctgaggaagacagaggcgaactggctaaagagatacctctacacgtcggccaccatgaccttcatcttctggggcaccccaaccttcgtcgccgtggtgaccttcggagcctgcatgctcatggggatccccttggagacggggaagatgctgtcagcactggccacgttccgcgtgctggaggaacccatatacgaacttccgggcactatcgcgatggtgatcaagaccaaggtgtctcttgacaggatagcatcgttcctgtgcctcgacgagctacccagtgacgccgtgcagaggcttccacgtggaagctctgccgacttcgcagtcagcgtcggcaacgggtgcttctcatgggaagcctcgcctgatgctccaacactgaaggacctcaacttccaagctaggccaggcatgcgcgtcgcggtctgtgggacagttggctccggcaagtccagcctgctatcctgcattctcggcgagattccgaagttgtcgggagaggtccggacctgtgggacgacagcgtacgtcagccagtcggcgtggatacagagcggcaaaattcaggagaacatactgttcggtatggagatggacagagacaagtacgacagggtgctcgagtcgtgcgcgctcaagaaagacttggagaacctgccgtttggcgaccagacagtcatcggcgagcgaggcatcaacctcagtggaggccagaagcagaggatccagatagcacgcgctctgtatcaggacgccgacgtctatctgttcgacgatccgttcagcgcagtcgatgcgcatacaggatcccacattttcaaggaatgcttgcttgcggatttggcttcaaaaacagtggtttatgttactcatcagattgaattcctacctgccgccgatctcatccttgtcatgaaagatgggaggatagcacaggcaggaagatacgacgaaatactgggttcaggcgaagagttcatggagctggtgggtgcccacgaggagtctctaacagcactggatgtggtcgatgccatgaacgagaacgaagccaacgtgtcatcctctcccagcagcaggatagagacgccgaacctgtccagatccctgtcgttagctgagaagaaacatggcgccaccaacgaggctgaaggggacgacgacgatgctcggagcgggcagctggtgcaggaggaagaaagggagaaaggcagggtggggttctgggtctactgggagtacctcacgcaagcctacaagggcgccctcgtgccgttggtgttgctggcgcagacgctctttcagatcatgcagattgccagtaactactggatggcttgggctactccggcgtcgaaggatgccgagcctccggtgagcgcgcccacgctgctcttcgtctacgtcgtgctggctctcggaagctcgctgtgcatcctcgtaagatcgctgctccttgcgacggctgcgtacaagacagcgactctgctgttcaacaagatgcacctgtccatattcagagctcccatgtctttcttcgattccactcccagcgggcgcatcttgaacagggcttcaactgatcaaagcgaggtggacaccaacatcgctgaccagatgggcaccgttgcattctccatcatccagctcgtcggaattactgcggtgatgtctcaggtcgcatggcaggtctttgtggttttcgtccctgtatttgctgcatgtgtctggtaccagcggtactacattgacacggcaagggagctgcaaaggctagtaggagtgtgcagagctccaatcatacagcacttcgcagagtcgatagcggggtcgagcaccatcagaagtttcggcaaggaagaccagttcgtgtcgactaacagccgtctaacagatgcctactcccggcccaagttctacaacgccggagcgagggagtggctttgctttcgcttggacgtgctgtcctctcttgcgttcgccttctccctgatctttctgatcaacctaccggccggtctcatcgatccaggcattgctggccttgcgatcacgtacgggcttactctgaacacgctgcaagcacaggttgtctggagcatgtgcactttggagaacaagatcatatcagtagagagaatcctacagtacatgggcgttcctgcagagcccccgcttgtcatgccagaaaacaagttggctcagagctggccatcgaatggagaaatccagcttcagaatctccatgtgaaatatgcgccgcagctgccgttcgttctgaagggccttacggtcgcttttccgggcggcgtgaagactggcattgtcggaagaacagggagcgggaaatcaaccctaatccagtccctcttccgcatcgtcgaccctgctgtcggccagatagtgatagacggcatcgacatccgcacggttgggctgcatgatctgaggtccaggctgaacatcattccacaggagccgacgatgttcgaaggaactgtcaggagcaaccttgaccctcttggggagtactccgacgatcagatctgggaggctttggattgctgtcagctaggggacgaagtcaggaagcaggagctgaagctcgactcaccaggtctgaatctgatacagtaacagtatatccttataaacgagccatgactcatgcagttcagagtctcttttgtgctttctttttgcttccaccttgcatctttcaccgaattttttgtttttgagtcctttttgtgttaaaaatttccaattagaccccc

SEQ ID NO: 1752 - DNA, 1772 bp, Zea mays
gtgggcttgagcgcgtgctgttgctgaaaggcccaagcgaacaagcaaaagggagggacagcccacgcggatcggtgtgcgtggctccgcgctcccttccgccgccagtccgccggctcaactccagccgccgcgtgcccctcctctccccacccgatgcgggccctcgcgcgcgccgcgtcgctgctccgccgcgccgcggggtccgcgcctactacggcgtcgctgtaccatccgccgcggaacgtaggcccttgcctcgtgaagaatctgccaggtttctttttcaatgggtattctactcttttggctccaccaaatgaagtgttgattccaccagaactcctttctagcaggactgtgtggacaccagatcgggagcttgggcagtatgaagacctggtagctagggtcacaaacttccataatgaggacaagggcttcatggttttggatggcgatgtttttgatgttccaattaggaaggacattgttcaccgagtagtaaggtggcagcttgctaaaagacagcaggggacacactcaactaaaactatcagtgaagttagtggcactggaagaaagccttacccgcaaaaaggaaccggaaaagcacgacatggaacactgcgcggtgcccagtttcgtggtggtgcaaccatgcatgggcctaaacctcgaagccatgcaatcaagctgcagaagaaagtacggcggctggggcttaagattgccttgtctgctcgaactgctgaggggaagctcttgatctttgaggacttggaagttcctagccacaagacgaaaaacattgtgcaatacattagacagatggatgactcaaagaaggttctgttggtggatggaggcgacattgataagaagctaaagctggccactcaaaaccttcactacgttaacgtacttccttccattggcctcaacgtctacagtatcctccagcatgacacccttgtaatgactcgggccgctatcaacagaatcgtcgagcggatgcatacccccatcaaccgctagcaaggagggtttctgagtcgcaccactgcttcttacagccagcaacctgtgctttttcgttccctgttaaagctcgaaggtttcctgttatcttggtgctaacatggagctgcaacgtgagctgtttattttctgtcagactggaggtaccgaccgaggtaggagggaaatgttgtggccttttgtaagcaggtcattggatgtttattttagattattttttggcgttttacccacactacccttgaaacttagtgagttcttatccagcaaataagattatgtaatcctggattatataggtccaaagcttgggacagcaatttgtttagagtcctgtataatctagctgtcacgtcgcaggactcacgtggagaaagatgaagggatttgcatcgtttagggtttagtaagtggcagcggattctgtatttacttggatttggtccattttcatagaagttggctgaaaacgaaaggtttggttggcagaagccaattctaagagacataagctaaaacaaataggcccatcatccatattaaataagctagattgtatatttttagaagcaaacaaataggccctattttaatctaaaattttactgtctacgctgtaaatctcgccgcaccttgatttcggtccgtccgtcgcagccgaagtatgaatttgatgttttttaaggtccaaacaagcacaacaactctattttgtcacgccaacaaaaaaa

SEQ ID NO: 1753 - DNA, 2768 bp, Zea mays
gatacacgcacgcaccgaacccaacccaacccaaccccaaagcagttggaattggaatcccaggcggatccaattctgccaattgcaagcaccgtcggccctggcgtcatcgcccaattacctctccctctcctccccacgccggccggagaaaccccccacccagcaccagttcccaactcctccccccacacactctatcctcctcgccgcctggggcacagtcacagagtatttcccccccattctccatgcatcgcacgagtgtctcctataaaaccccgcgcaacccccccgctccgacggcacgcacggacgacgcaccgcacactacccggcggtggaactcctcgcccgcgtcgctgctccggtctccgcgctgctagccgccgactgtaataactataacatttcaggtgtgcttctgaagggagatttcgttgaacaggatgaatgcattggcagcaaccagcaggaacttcaagcaggcagctaagctgctgggcctcgactccaagctggagaagagcttgctcattccattcagggagatcaaggttgaatgcacaatcccaaaagatgatggaactttggcatcctatgttggatttagggttcaacatgataatgctaggggacctatgaagggtggaatcagataccaccatgaggttgatcctgatgaagttaatgccttggcacaattgatgacttggaaaacagcagtagctaacataccatatggaggagccaaaggtggaattggatgtagccctggagacctgagcatctctgagcttgagaggcttacccgagtttttactcagaaaatccatgacttgattggcatccatactgacgttccagctccagatatgggcaccaactcacagacaatggcatggatacttgacgaatactcaaagttccatggttactcacctgctgttgtgacaggaaagcctgtggacctcggaggatcattgggaagagacgccgctactggaaggggagttctgtttgctactgaagctttgcttgcagagcatggcaaaggcattgcaggccagcgtttcgtcatacagggattcggtaacgttggttcctgggcagctcagctgataagtgaagccggtggcaaggtgattgctatcagtgacgtcacaggcgccgtcaaaaacgtcgatggcctcgacatcgtgcagctagtgaagcactcggcggagaacaaggggatcaagggcttcaaggggggagacgccatcgctccagactcgttgctcactgaagagtgcgacgtcctcatcccagcagcgcttgggggagtcataaacaaggataatgctaacgacataaaggcaaagtacatcatcgaggctgccaatcaccccacagatccagaggcagacgagatcctgtcaaagaaaggcgtcctcatcctccccgacatactggccaactctggtggcgtcacagtgagctacttcgagtgggtacaaaacatccaggggttcatgtgggacgaagagaaggtaaacgcggagctgcggacgtacatgacgcgcgccttcggggacgtgaagcagatgtgccggagccacagctgcgacctccgcatgggcgccttcacgcttggcgtcaaccgcgtcgcgcgcgccaccgtcctcaggggatgggaagcatgacctccctccgtgtcgtccgtgtgcccctccctgttgtatcctcttggtcttgggcccttgtttttctttggttaattattgtcgagatcaacggagatccgagaaaaacgggctcagttaataattccaagaagtgcgtcttcttggagataaaatagcggaaggagagttataataagtctgtaactgtaacccatagctgagatgctgtctgcaagcagcaatgccaatgccaatgccatctggttttcgtgcacgactttgggtcattttcgaatcctgatcactcaacgacagggtcggtagagatgaagctgtagacagccacgtccctgagcctccccttcaccacgcggtagctccgcagcacggcctcgcgctggaacccggccttctcgagcacccgccgcgccgccgcgttgtggtcgacgtccacgagcgcctcgacgcgctccacgcccgggaggtcgccgaacgccgcggagaccgcgcgcctcgccgccgctgtggccacacccttcccccggtgcgcgcgcgccagcacgacgcggagctcggcgcggcaggcgtcgtcggtgggcgtcacggacaccgcgcccacggggcggcagtgtccgccgccgccgaggcagacggcgcggaaccacgggtgcggcagcaccgcgtcgcgcaggaacgccaggagggcgtcccgggacgtgcaggcgtcccacgccatgaacgccgtcacctcggggtccgacgcccactccagcatcgcgtcgacgtcgccgagctcgaaacgacggagcgtgaccgcgggaacggaccccggtcgggcaggcgcttcttgctccatctctgagcctccctcccatccgacgcgttgcttttgccttttcttttgcttggtggtgtcgtggtggtgcgcagtcaccagtggaagctttgcgtcctgtccctgctttgacgctgtcagccacactaatcaaattaaagtggcagtggggcacacaatcacgcaacgcaagtgtgtaataagacccacaccagcactacacaccgtccaccagactaatttgataggtgaatatagaacatagt

SEQ ID NO: 1754 - DNA, 2345 bp, Zea mays
ttccatcggtatgtcctccgtcttcccgaaagccttcattcggctcgctgtcttctttctatcgctcacaaccaacaaccatagcccacaggccgccggcggccgccagccgacgtcctcccatttcgctccccctcctccgctgcggtcgagcaaaagttccggccatccggcaatcccccggcacccggcggttcaaatcgtatctttctgacctgacgcggctacgacgtcgctcctccggtcccttcgatccggtggggtccgtttctttcaagcgcggcctcgctggccgcctcgtggcagtgaccgtcgaaccctctataaatcccgtgccccgagcacccttcctcgatcacacaacccaaagcagccacagcagcctccttcctcctctcactctcgctcgtgctgcgctcgctacctcgcttcgcattccattcgaggagagcggtgagaggggaggaaaggcaagatgttcatcgagagcttccgcgtcgagagcccccacgtgcggtacggcccgacggagatcgagtcggagtaccggtacgacacgacggagctggtacacgagggcaaggacggcgcctcacgctgggtcgtccgccccaagtccgtcaagtacaacttccggaccagaaccgccgtccccaagctcggggtgatgcttgtggggtggggaggcaacaacgggtccacgctgacggctggggtcattgccaacagggaggggatctcatgggcgaccaaggacaaggtgcagcaagccaactactacggctccctcacccaggcctccaccatcagagtcggcagctacaacggggaggagatctatgcgccgttcaagagcctccttcccatggtgaacccagacgacattgtgttcggaggctgggacattagcaacatgaacctggccgactccatgaccagggccaaggtgctggatattgacctgcagaagcagctcaggccctacatggagtccatggtgccacttcccggtatctatgatccggacttcatcgcggctaaccagggctctcgcgccaacagtgtcatcaagggcaccaagaaagaacaggtggagcagatcatcaaggatatcagggagtttaaggagaagaacaaagtggacaagatagttgtgttgtggactgcaaacactgaaaggtatagcaatgtgtgcgctggtctcaacgacacgatggagaatctactggcatctgtggacaagaacgaggcggaggtatcaccatcaacactatatgccattgcctgtgtcatggagggggtgccgttcatcaatgggagcccccagaacacctttgtgcctgggctgattgatcttgctataaaaaacaactgcttgattggtggtgacgacttcaagagtggacagaccaagatgaaatctgtcttggtcgatttccttgttggtgctggaataaagcccacctcaatcgtgagctacaaccacttgggaaacaacgatggcatgaacctgtctgcccctcaaacattcaggtccaaggagatctccaagagcaacgtggtggatgacatggtctcgagcaatgccatcctctatgagcccggcgagcatcccgatcatgtcgttgtcatcaagtatgtgccgtacgtgggagacagcaagagggctatggacgagtacacctcagagatcttcatgggcggcaagaacaccatcgtgctgcacaacacctgtgaggactcgctcctcgccgcacctatcatccttgatctggtgctcttggctgagctcagcaccaggatccagctgaaagctgagggagaggacaaattccactccttccacccggtggccaccatcctgagctacctcaccaaggcacccctggttccccctggcacaccggtggtgaacgctctggccaagcagagggcgatgctggagaacatcatgagggcctgcgttgggctggccccagagaacaacatgatcctggagtacaagtgagccaagtggcgtgccctgcagcgcgaggttagctgctggaagggaactagaaaggcgagattagctgtgggattgtgttgggcttgtcgtgttttcttttgcgttctttcctagtcattgctgttgcgcttttgtatttgtcggacccgtaactaccagggctctgctattagcggcacggagcctgtaattgtattgtatgataatgtgatcgagggtgctacttcccctcggcattcctagtgttggttaaaagtcgttcgacagcaacttatcgacccaccactgacttcaccctatccgccggcaacttgtcgaccccattatctgcttaggg

SEQ ID NO: 1755 - DNA, 2400 bp, Zea mays
acgttatcacttcggcgagttcactccacgataacggaccggatcgcacttgacgatcaaatcgaatcgcacctattcctctctttggcggtagccgcgtagcgcccgctcagtcgccgccgaccacggcggagaaattgcggcttcacctcgcctgtgtgtcctgattacgcgaggactcgagcggctaagcttagcagcgatctcggtctcagcgaggtcggtgggtgccggaagagaaatgggtggcttccacttccaccacacctggttcaaggcacgcaaggtgtttgtaagaatgcttagcaatggaggcggtgccagcatggcctgtgatatctcggtggacgcctcggacctctccaagcgcctctgcaagctcatcatctcctgccggaaggcatccgccctcgagcacgagctcgaccatagcggcgtccgcgttacgccggagatcgcggagagcgtcctcaagcacctcgacaacgctggtatgctcgcgtaccgcttcttcgagtgggcgcgcaagcagaagcgtggggtgtgtgctcataccgtgcgttcctaccacacggtggttacgtccctagccaagatcaggcagtaccaactcatgtgggacgtcgtggccatcatgcgcaaggagggtgtggccaatgttgagacgttcgggatcatcatgcgcaaatatgccagggcacagaagttggatgaggcagtttacacgttcaacgtcatggagaaatatggtgttgcccacaacctcgctgccttcaacagcttgctcagtgcactatgcaaatctaagaacgtgcgcaaggcgcaggagatctttgataagatgaataatcggttcagtcctgatgccaagacctatagtatcttgcttgagggttgggggagagcgcccagcctcccaaagatgcgagaggtttacagtgatatgcttgccgctggttgccagcctgacattgtcacatatggtatcatggtcgatgcactctgcaagacaggccgagttgaagaggctgtctgtgtcgtgcaggacatgagctctaggggatgccaaccgacaaccttcatatacagcatcttagtgcatacttatggagttgatatgaggattgaggatgctgttgcagcatttttggatatggagaaggatgggattatgcctgatgttgttgtgtacaatgcgctcatcactgccttctgcaaagtgaagaagtttgagaatgccttcagagtcatggatgacatgcaaggccatggaatctccccaaattcaaggacctggaacatcatcctaaatactctgattagccttggaaaggatgatgaggcatatagggtcttccgcagcatgattaagcgctgcaaaccagactctgatacttacaccatgatgataaagatgttctgtgagaatgataagatagagatggcactgaaggtatggaagtatatgcgattgaagcagttcttgccgagcatgcacacattctctgtgctgatcaatggtctctgtgacaagggtgaagttagccaagcttgtgtcctgcttgaagatatgatcgagaagggcattagacctcctggttcaacttttggcaagctgaggcagctacttttaaaagaagggaggaaggatgtgcttgactttcttgtcgagaaaatgaagatcctcgctcaagaacctttgtttgattgacccttcacttctccattgctgctgagaatatcagttatcatttaggctttatgaataaatgttcccagttaaggattgctttggtgacccaggatcatagaaggattggaggggattgaggagaaaattagtcatttccccctcaatcccctctaatccctccgtgatccccttgtcgccaaatcgaccctaaaggatgaatggatgcctaaccaaaccatggctgtgtttttgtcgtcccactcgaccattacgactatcaattgtcaaacacctgatggccaaaatgctgaactgctgatattttatctcaccgggaaactttttgtattttaagactcgaacttgagtcctccaaaagcaatgaactacatatggtccatgtatcaagagtttcagcatttattttaagactcgtatttcagcaatgaactacatgtgtattttaagactcgaacttcagcacaagaatccttcaaggaccggtgtagtcacaagtgtccatgttctgaacttgaggacttcgtgccatactgccaacttgttcaggcacaagtcactactacaatactactacatgaaaagggtcaaactgccaaccagtatattgaaacttgtactgccctgagcacttgatctatgaaaagggacaccacattccttgagcatttaaaacgatggttggaatt

SEQ ID NO: 1756 - DNA, 2343 bp, Zea mays
acccacacccacaccacacctcacgtctcctcactacccgcgctctcaggcagcgcacctcgctcctcctcccccacagcgctttccattttcgtctatctcccgagaaccctcctgcgcctcccaaagctctcttgttcgttgctccccccccccccccccgtgctggttaatcatccccttcgatttcgatcacatacatataatctctctcagctatcgcggccgcgcgcctgatcgacgtacgaccggtctggtacgtacgtgtgctcgcccgccatggctcgcggcgacggcgagctggagctgtccgtgggggtccgcggcaccggcggcgcggcggcggcggcggcggaccacgtggcgccgatcagcctcggcaggctcatcctcgccggcatggtcgccggcggcgtgcagtacggctgggcgctgcagctctccctcctcacgccctacgtgcagactctggggctctcacatgccctcacttcattcatgtggctatgcggtcctattgctggcttagtggtccaaccgctggttggcctgtacagcgataggtgcacagcaagatggggaagacgcaggccatttatcctgataggatgcatgctcatctgccttgccgtcattgttgttggcttctcgtccgacatcggagctgctctaggggacacaaaggaacactgcagcctctaccacggccctcgttggcatgctgcgatcgtgtacgttctggggttttggctccttgacttctccaacaatactgtgcaaggtccagcgcgtgctatgatggctgatctgtgcggtcatcatgggcctagtgcagccaactcaatcttctgttcttggatggcgctgggaaacatcctaggctattcctctggctccacaaacaactggcacaagtggtttccgttccttatgacaaacgcgtgctgtgaagcctgcgcaaacctgaaaggcgcgtttctggtggctgtgacacgtttttatgtcttccaacaggtgttcctagtcatgtgcttgactataaccctgttcttcgccaaggaagtgccctacagaggaaaccagaacctccccacaaaggcaaacggcgaggtcgagactgaaccttccggcccactcgctgtgctcaagggcttcaagaacttgcccacggggatgccgtccgtgctcctcgtaactggactcacctggctctcttggttcccgttcatcctctacgacaccgactggatgggccgtgagatctaccacggcgaccccaagggtagcaacgctcagatctcggcgttcgacgaaggcgtcagagttggctcgttcgggctgctgctcaactcgatcgttctaggattcagctcgttcctgatcgagcccatgtgccggaaggtcgggccgagggtggtgtgggtgacgagcaacttcatggtctgcgtcgccatggcggccaccgcgctgatcagcttctggtcgctcaaggactaccacggatacgtgcaggacgccatcaccgccagcacgagcatcaaggccgtctgcctcgtcctcttcgcgttcctgggtgtccctctcgccatcctgtacagcgtcccgttcgcggtgacggcgcagctggcggccacgaagggcggcgggcaggggctgtgcaccggcgtgctcaacatctccatcgtcatccctcaggtgatcatcgcgctgggcgcgggcccgtgggacgcgctgttcggcaagggcaacatcccggcgttcggcgtggcgtcggggttcgccctcatcggcggcgtcgtgggcgtgttcctgctgcccaagatctccaagcgccagttccgcgccgtcagcgcgggcggccactgatcgcggccgccgcgccggagcacggcacggcggcacagcccagccgtgctagagctgtatgttttgaaagttgaaacagaataagaagcgggcgaaacgagaaaaccatgcatgtcatgtgtgtgcttttgttgtgtgtggggtggggcaagcgaggcgaggtgtgtggaggtgaagtgaaggtgagcatatccagcaccagctggtaccaaggtcgggtctctgtgctagtgctattagctagtgtaaggagcgagtaggtcagttaaggctggtgcgtcgtgagggctgtcttgtgtgtagctacagcagacggttcatcagaaggattattcgtgcagtatatacagtacaactagacaatgatgttgatgattggtctagagctagaggcctatagccctatactactgtgtattgtccgccgttttagttttttggtcccatcccatcaatgcaaccgccttgttttgctcc

SEQ ID NO: 1757 - DNA, 2117 bp, Zea mays
atggctcgcgaagcgacgaacgcgtggcctcggccgtcaccgtcagcgcggaaacgaagcaagggcaaacgagccgttctctcccccgcgccgccgacgcaagcagccgccacggagatggaggccgaggcgtccgtccccgccacggactacgtctacgacgcgctcccgggcctgcacctggccttctcaccggaggagacgctcgatgacgccgccgcggggcaggacgaggacgatgcgaccgcgacatacgccgtcttccgcaacgagataacggaggctggagatgtgctcgcggacatccctgctgcggacttcttctcactcgacgtctccacctctgcctccgtcgagcccgagcccgagcccgagccgccatccccggcgcccacagctgccgcggcaacgccctctatctcccgtgctttggaggaccagccgccgcagggctcggagcgcgcgtggttcaggggagggaggcggttcaggagccccatgcttcagctacacaaggagatcctggacttctgtgattttatctcaccttctactgaagagcaatcttcacgagcagctgctgtgcaagatgtctctgatgttgtcaaacatatatggccacagtgcaaggtggaagtttttggatctttcaggacaggtctctatctaccaacaagtgatatagatgttgtgatatttgaatccagagttaagactcctcaagttggtctatatgctcttgcaaaagcattatcccagaaaggtgttgctaaaaaaatacaggtaatagcaaaggcacgtgtgccaattgtgaagtttgtggaaagaaagagtggaatagcttttgacatcagctttgatatagatggtggcccacaggcagcagatttcatcaaggatgctgtgaagaagttgcctgctttaagacctttatgtatgattctgaaagtttttctgcatcagagagagctcaacgaggtctataccggtggaattggatcatatgctcttcttacgatgttgattacacatttacagttggtctggggaggaaaagatattctcgggtatcatcggtccaaggagcacaatctgggaattcttttggtcaggttttttgatttttatggacgcaagttgaacaactgggatgtcggagtatcatgcaattcttcaaggacctttttcttgaagagtgataaagactttatgaatcatgaccggccacatcttttagcgattcaggatcctatggcaccagataatgatatcggaaagaattcctttaactactttaaggtgaaatcagcattttccaaggcgtactctgtgttaactgatgcaaacttgtttattagtttgggacataataggagcattctgggtaccattgtgagaccagattcagttctccttgaccggaaaggctggaacaatgaagatatgttagcggaaccctgggagccgatcacccaacagtttgacaccgagaatgatgcagtatacaattggcatgtgatagacgaggatgaaccattgcccagaaatagtcaatccacatccgaggacactagttcgtcaccatctaaaaaacggaagtccccaaaatcaagacggaaatcgcgaaagaagtcgaaggctactgcctcaggcagtagtgatgttgcaaatgggttcagaaaggatagatcatccaagcgggaagcgggaagcagcaaacggaggaaagggccaaaggagtacgacagattcacgaatacactcccaaagtacacacatgttagcaagtggtaacttatagcatttatagtctggtcgcaaaggtccagcaatttgacagtgagaagagtatcatgtcacattatggcatgcgatgtgaatgacggaagtcatcagcagcaccagaagcgccatcgcatggtttgcttgttggtctgtttaattgctgtactttacgtaacagagatcacactagattaaatgatgttttggttattttatttatgctgcagcagttttggcgactagcttgtattctttttgtaacggtatgggttggtgacgatgagattatgtacgttcaaacatatttaattgatggtctgatggccttaatc

SEQ ID NO: 1758 - DNA, 2541 bp, Zea mays
ttaccgaatgtgattgtgactacaccgccactgctctgctcaacacggttcaccggtaatgatccccggttcctccgactgcaaccgggcgccacgtccgcacctccatctcgctttcagccgttcgtacctaggctacactacatgaaaggtcgctcttcagctgaaactgaagtctgaaaccaccgcccagcgctcgcctgtttctgcggccgtcgatggagctccacctcgccaccatcgcccaccgcccgcctttgccggtaccggcgcggggccaccacctccgccgccgcctccaccacctcccggctcctctctccttccaaaacacctactccccctccctttcctccccgcatcatcatcgcctttctcccacccttcgccgccacctccgcctgcctcttctcgcctcccaagcgcccaattctaacccggagcctgaacctgagcccgagcccactggtgcgaagctactgccgctcgtcatctccatcgccatcggcctcgccgtgcggttcctcgcgccgcggcccgtcgaggttagcccgcaggcgtggcagctcctctccatcttcctctccacaatcgcggggctggtgcttggccctctccctgtcggcgcatgggccttcctcgggctcacagccgccgtcgccactcgcacgctccccttcaccgccgccttctccgccttcaccaacgaggtcatctggctcatcgtcatttccttcttcttcgcgcgcgggttcgtcaagacaggcctcggcgaccgaatcgccacctacttcgtcaagtggctcgggagcagcacgctgggcctttcctacgggcttaccctcagcgaggcctgcatcgcgccagccatgcccagcaccacggcgagggccggaggcgtgttcctacctatcatcaagtcgctctcgctgtcggctgagagcaagcccaaccatccatcgtcgcggaagcttgggtcctatcttgtgatgacgcaattccaggcatctggtaactcgagtgctttattcctcactgctgcagcacaaaacctgttgtgcttgaagctagcagaggagcttggtgtaatcattgcaaatccatgggtatcatggttcaaagctgctagtttgccagctcttgtttctctgctagcaacaccatatttgctgtacaaaatcttcccacctgaaacaaaggacacccctgatgccccagcactggctgaaaagaaactgaagctcatgggccctgtgactaaaaacgaatcggttatgattggcacaatgattcttgcagtctccttatgggtttttggggatgctattggtgtgtctagtgttgtggctgcaatgcttgggctctccattcttctcgttctcggtgtgctagactgggacgattgcttgaatgagaaatcagcatgggatacattggcttggtttgcagttctggttggaatggcaggacaactcactaacctgggaattgtttcttggatgtcaaactgtgttgccaagctgcttcagtcgttctcattgagttggccagtggcattttgtgttctggaggcctcctactttctgatccactacctatttgcaagccagactggacatgttggagccttatactctgcatttctggctatgcatatagcggccggtgttcctagtgtgctgtcagcacttgctttggcattcaacacaaatctgttcggtgcaatcactcattatagtagtgggcaggctgcagtatacttcggagccgggtatatggagcttccagatgttttcaggctgggttttataacagccttggctaacacgttaatctggggagttgttggaaccatctggtggaaatttttgggtctgtactgacagtggcagacatgtggttgaccaaaattttcatttggcactggtcgaattgctcttgctcattgttaggaagggcagaatatctagttaactaccgttgctccctccggtcagctatcgctgaggtgatcagcagttagcaattacgcctgtgtcgtgcagttccttgttttctctttggttccgtagaagtccttgggcaatttttctgcggtatgttcctctctgatgcttatatacagtccgctctgtaaaagttgcgcggctgcactgaaagcagtgtacagcgttgcggccctcaaaaatgtgttcgctccattctacagctcccagctaactatgattctcaacttacagcttggaaccaacgaattctcacaaaacatcagcgagctcgtcggcttgatggtcgtagaggctttgcgtcgcaatctggataatcacatttatttattttggcacgaatcctggatggccgcagcatctgtgtcagttgtcacctctgtttctttcactcctacagctacagatgaaggaacaacgatcctgctactgcactcagaagtcaaaaaaattgattcatgaatggatgtagccaaacaatacagaccacagtaggaacttgggctacgaacagtaagacaaggcagtttgtggt

SEQ ID NO: 1759 - DNA, 2530 bp, Zea mays
atcacgcgcacgcccgttcccctccctacgcgcgcgaatcacgcgcccgccgcacaggcccgccgccatcgccgattcccctaccccgcggatcacgcgcacgcccccacccccccaaccgcaattcccctccctacgtgcgcggatcacgcgcccgtcgccttgcccctacgaatcctgccgcaaaacccacctaccggcgccactacagcacacccgccgccatgccgctccctacgcccgcaacgatcgcctccctacgcgcgggtgaccggcagcacctcgtctctctcgatgtgccaatggcgccgcctccatcctacccagtctccacctctgtcaccgcgttcgtcaaggaggaggacgccccaacccctttggtggcctccccgatggcgccgcctctgtcctacccgacctcgagttcattgagatccagaaggagcaggcgcaaacttctccatgcacgggaggtcaagcggagtatgcgcgaacttctttgtgttgtcgcccgaggctgactccagcatctccttcctggccagatccatggaggcatcgcaagcccagatcccgctgtcgttaggagctaatggttggtgctcgtgtggcacggcaacgcgacgacggagcaaatcggagagcctcggtacaaggttttcataaatccgagcattagtgatgtcctgtgcacaacaacaatagaggctctttcaatggggaaattcatgatctgcgcaagacatccatgaaatgagtttttcatgtcattttccgaactgtttgacatacaagacttcagaggagtttgttgcgagagtgaaagaggcaatggatagagaaccccaacagctaacccctgagcaaagatacaacctttcatgggaggcagcgactgagagattcatggagtactcagaccttgacaaggttctgaacaatgaggctgctcagcctaaacaaggtaggaaaagaaagaataaaagaacctcacagcctaatttgttcgacatcatggatggcggtctagcgttggcccatcgatgcttaaccggcaatgaggttctcaggctggcaaccgaagccattcctggtacccgggactacgataagagcaatgtgtggatatgggtctcttgcctcctcaagtacaacaccctgtatatggctggtgatgactgatgagcacccaaagctaatcgtaggtatatatgtacataataatacaccatgttgctcttatgtcgactaatgtttggagtattgtaattgtagcacgcatgacgacctttggccattgttttgtacttgctaataaggttctttctccttaaatttggagttttattgcagaaatgtgtagtacatggacatcaaaagttcatgactccagaagactgtcagcacaatattgtctgcttttgccattgaattagagaaacatagtcttaaaaatttaagagcatctctggccgcagagggcgcgcctgtgccaacgacggaagcaaagaagctggcgtcctccatcgcgaggtccaagcaggagatcacagaggacttctcgtcgattggcaggacatggcccccgcggcggtctaagaagagaccaggtgcaacgacaactcaatgtaagaattgctggattttgtctcccctccaaattcagtgtttcatgagattttttcccttttcctttaattttcctatatcacaaagaagaaccgaaaggcgagaggatttcatttcacaggtcgacttgcttctaccatctggttgtttgtggacagtattttggtgctgatttcgttatcatgtgttatgtttgttttattttaacatcactccagatttgatgaatcatagctcggcttctacacgatgctaaccccaggctcgtcgggttttttcaagaaggaagcccgaattcctatgctagatccaccatgccatttaatgttgcaggtcatgacgaatcttgtgattggtctgtgtcaaagcaatggatacacatatgttcgcattgcatcatttctatggtttgttgtctcatttgatcgattgacgacaatgattatacattaccagcgcttttgatgtatcctatgaaagaaagggaaaaatcaatgattgaatttcctaatatgagcaggaggtgaaggatgaggtcccatgggccatggtccatccactcagcgttcttcagatggaggtcgcctctatgtgcaggaaagaaagcgacgtcctctgcagatagagttcgatcttatccacgccggacgccgccccacaccatccccccccccccccccccccccccccccaaaaaaaaagatccatctctttgtgcattccgcttccaccttgttttcacatagaggcgacctccagatgttgttgagactttgaccacaacaattgaataaacatgtgcttatcatgaactattacatgtggtacaatttccttttgtgcttttctaattactagcgggaatgtttagcctctacaaaaacaataggaatgagtttct

SEQ ID NO: 1760 - DNA, 1325 bp, Zea mays
tttggtttccttcgaacgaatataatttgtatgagccggaacgtttcctatgctggttgcagagcgacgagcgacgagctaaaccccgaccgagtcgctgcttgggtgcccaagatagccctaccgcctcgcctctctcgttccccctcatcgccacgccagtcgcctccactcccagtcatctcccatcaccgacgacgtgtcgaggcgagagaagagggcgagtccaagtctagggttcccgccgcatcgacacgggcatcgcaccgcaccgcgaggggcgggcacggaggaagatggcaccgcgcgggcgcgtggagctgcggcggatcgaggacaaggcgagccggcaggtgcgcttctccaagcgccgcgcggggctgttcaagaaggccttcgagctggccctgctctgcgacgccgaggtcgcgctcctcgtcttttcccccggcggcaagctctatgagtactcctcctccagcatagaagatacatatgaccgctatcatcaatttgcgggagcaggaagaaaagtgaacggacataacaacgataaccgggatgtagctgcttcagatttacagtcgagacttaaggagatcgcaacatggtctaaacaaaacaacgctgaggagtcggatgccaatgaacttgagaaacttgaggaactcctgacaaatgctttgaggaatacgaaagccaaaaagatgttggcaaaagaaaacaatggtggtgccggtgcaagtacaagcagccagatgttgctttactcggcagagcgtgcaaccgacaaatgaaacggggcgtgcatctgttgctaacggggcggtgccggtgccgcatactattgttgtgtagctgaggtttgtcaaggtggctgctggcaaggttagccgaggaagtggagttcaataacaggatgcggaaactgtgccgctccttgccgaacttaagccccgttacgttgtcgcacaaagtttatttcctagcactgtgcttgctgcttatgtttgtttggatgtgccaacctgcagtgaccctcgtggagcctgggtctcacgctcctcttacctagtgtgatgtgcagaaaaagtgtgatgctgtaaaattatgtgattgcctagcagatgtcaaattttcaatcagtagctaactccttttaatggtacaggcttgcatgatttcatctgcaaaaaagagagggcgggttgggtgtcaaatctagccggatgttttcgcaagtttgtgataaaaattgtgctgtacacttgtgtttatgcagttgccctaggcgtcagtgggctgaaaggtaatatctgtgaatt

SEQ ID NO: 1761 - DNA, 5184 bp, Zea mays
ctgccccggcacacgtcgtctctgccactcaccgcgagtccgcaaccaaacaataagaagcagccttccttgctctgcgtcagtgcatctccttcccctcccctccttcccctcccctcctctcgtctggggactgggcgtctggctggcacgcagccaagccacacactccctcgtcagcctctgcatgccacgccgcccctgatcaccagaacccgcccggccgccgcatggccctcgcgtcgcagccgccttggtggctcaccacggaggcttgcgacctcccatccgcgcccgccgcggggctcggggaatgggtcgccttcctcttcctctccacgtgctcgcagcagatgctcctctccgccgcgtccgccgtcttcctcgtcgcgctgctctgcctcggcgccgccaagctcatctccacacggcgacgacgccatggcggcggcgccctcaacggcgacaagcagccgctgctggacagggccggggggcgggccggggttcgggtcggcgccgggttcgtcgtcgcgctggcggcgtccggtgtcctcgccgcgttctacgcctcgctgctcgtcctttccctggtcaacagaggcggcggagagggcgaggccctggaggcggtgttcctggcgctgcagtgcgcggcgcacctggccgccgcggccgtcgtcgcgcacgagaagcggttccgcgcggcggcgcacccgctggccctgcgcctgtactggctggcggcgcccgcgctgacggcgctcctcgccggcacctccgtcgcgcgcctcgtggtggccgccgctaggctcccggacgacgcgctcgcgatcgcggcgctggtcctgtcccttcccctcccggtcctctccatcctcgggtcgacgggcatatccgtggcggtggtcaacgacgccaccggggcggcggaggaggagacggcaagcaacaaggcgacggagaaaaacgtgaccccctacgcgacggcgtcgtgggcttcgcgcgcgacgtgggcttggatgaacccgctggtgcagcgcgggcaccgcgcggcgctggagctgtcggacgtgccgacgctggcaccgtcccaccgcccagagcgcatgcacgagctcttcaccctgcactggccgtcggcgtgggcgtccaaggacaacaacccggtccggcacacgctgttccggaccttctgggcgcagttcctgctgaacgcgttgctggcgctgctccggctgaccgtcatgtacgtcggcccgacgctcatccagagcttcgtggacttcacgtccgccggcgggcagcggccgttcggggagggcgcgcggctggtggcgacgctgctggcggccaagtgcgcggaggcgctgtgcagccaccagtacaacttccactgccagaagctggggatgcagatccggggcgccctcatcgtggcgctgtaccgcaagggcctccggctctcgtgctcagcgcgccagaagcacgggctcggcatgatcgtcaactacatggccgtcgacgcgcagcagctctccgacatgatgctgcagatccactacctctggctcatgccgctccaggttggcgttgctctgggcctgctgtacacgtaccttggccccccggtgacgtcggctctgatcggcgttgccggcgtgatggtgttcgtgctcctgggcacccggcgcaacaaccggtaccagttctcgctgatgaaggagcgcgaccagcggatgaaggcgacgaacgagatgctcaactacatgcgcgtcatcaagttccaggcgtgggaggagcacttcaacgcgcgcatcggccgcttccgccgcctcgagttcggctggctctcccgcttcatgtactccatctccggcaacatcatcgcgctctggagcgcccccgtcgtcgtctccgcgctcgtcttcgccacctgcgtgctcgccggggtgcgcctcgacgccggcctcgtcttcaccgccacgtccttcttcaagatcctacaggagcccatgcggaacttcccgcaggcgatgatccaggcgtcgcaggcgatgatctcgctgcagcgcctcgactcgtacatgactagcgcggagcttgacgagggctccgtggagagggaccccgccgcggcgtcgggcggcatggccgtgcaggtcaaggacggcgtgttcgcgtgggacgacgaggtggacgccggccaggaggtgctgcgcgggatcgacctggacatccgtacgggtgcgctggcggcagtggtgggcatggttggctccggcaagtcgtcgctgctgggctgcatcctcggcgagatgcgcaagttctccggcaaggtaaaggtttgcggcagcacggcatacgtggcgcagacggcatggatccagaacggcaccattgaggaaaacatcctgttcgggaagcccatgcaccgggagaggtacaaggaggtgatcagggtgtgctgcctggagaaggacctggagatgatggaattcggggaccaaacggagatcggggagcgcggcatcaaccttagtggcgggcagaagcagcgcatccagctcgcccgcgccgtctaccaggacttcaacatctacctcctcgacgatgtattcagcgcggtcgatgcgcatacgggcactgagatcttcaaggaatgtgttagaggtgcactcaagaacaagaccatagtactcgtgacacatcaagttgatttcttgcacaatgctgatatcatatatgtgatgaaggacggaatgatcgtgcaatccggcaagtacgatgagctcctccaggcaggcaccgacttcgcggcactggtcgcagcgcacgacagctcaatggagctcgtggagagcgcggcgccggcgagcgagcgcgagctgcccctctcccggcagccgtcaagcaagaacgcggcgtccaacggcgactcgtcctcgtcctccatcgtggcgcccaaggccgagaaggcgtcggcgcggctgatcaaggacgaagagcgcgcgagcgggcacgtcagcttcaccgtgtacaagcagtacatgacggaggcctgggggtggtgggggccgcttgtggtggtggctgtctccgtggtgtggcagtgctctctcatggccagcgactactggcttgccgaccagacctccgacgggaacgaaacctcgttccagccgtcgctgttcatcaacgtgtacgccatcatcgctgccgtctcggtggtgctcgtcgcggctcgctctttcattgtggcgttcattggcctccagacggcggaccggttcttcaagcagatcctcaacagcatcctgcacgcgcccatgtccttcttcgacaccacgccgtccggcaggatcctcagcagggcgtcgtcagatcagacgaacgtcgatctcttcctgccgttcttcgtctggatgagcgtatccatgtacatcaccgtgatcagtgtgctgatcgtcacgtgtcaggtggcgtggccgtccgtcattgccataatccctctggtgatactgaacatctggtaccggggctattacttgtcgacatcgagggagctgactcgcctcgagtcgattaccaaggctccagtgatccaccacttctccgagacggttcaaggtgtcatgaccatcaggtgcttcaggaaggaggaaaacttcttgcaggagaacctgaaccgggtgaactcaagcctgaggatggacttccacaacaatggtgccaacgagtggctcggtttccggctcgagctgattggaagctttgttctctgcttcacagccgtgctcatggtcacattgccgagcaacttcgtgaagccagagtatgttggtctgtcactatcatatggtctatctctcaaccaggtgttgttctgggccatctggatcagttgcttcattgaaaataaaatggtctcagttgagaggataaaacaattcacaaatattccttcagaggccacatggaggatcaaggactgcctaccagattctaattggccaacaaaaggcgacatcaatgtcattgatcttaagtttaggtataggcacaacactcctctagtgttgaagggcatcacaataagcatacatggaggagagaagattggagttgtcggcagaactggtagtgggaaatcaacactgatccaggcactgttcagaatagtggagccttctgaggggagaataatcatcgacggtgttgacatctgcactttaggactccatgaccttaggtcacggtttggtatcatacctcaggaacctgttctctttgaagggaccattaggagcaacattgatccgcttgagcagtattccgatgatgaaatctggcaggcattgggccgctgtcagttgaaagaagccgtagcttcaaaacccgaaaagcttgatgcttcagtcgtcgacaatggtgagaactggagtgttggacaacgtcaactgctatgcctgggccgggtgatgctaaagcacagcagaatactgttcatggacgaggccactgcttccgttgattcccagaccgatgctgtgattcagaagatcatccgggaagactttgcagcttgtaccattatcagcattgcgcacagaatacctacggtgatggactgcgacagggtcctggttatagatgcaggactagcaaaggagtttgaccggcctgcaaatctgatcgagaggccatctctgtttggagcattggttcaagagtacgcgaaccgttcgtccgacgtttagcatttcagggtggcataattttttgactcgagatttgggaggaaacaatgattggaaatttctcggtgtggtgaacgagcaatgctgcattcatgctccaaataaaactgcgagccctcaaaatttcgcgaaacgtaattgggtcatgtggaaggccagaggagaagccacgatcggatgaaggagacatcgagatgactaggatagtaagtagttatcgagatgtatttgagcggtttaagctgaaattttaagactgagctgaagacgatgtatgaatctatgtattgttcaactagaatattactgcgcatgcaaattttctgccgactgtatctgctattctgctgtatcaaagtgaaaatcatggaaattgccgcaaatatttgctccttaaggattggtttggcagcaatagggaaaa

SEQ ID NO: 1762 - DNA, 2862 bp, Zea mays
ccccaccccaccccacccgcgccgagacggattggaggaggaaccctaccatatcaatctcgcttctcgcctcgtttcgtctcagctgcattccaattccacctgtaagcggagagccttcgtggtccctgctcggttcatcagaatacaggaggctccggaggtagtccaccaaaacaaaacaccactccatctctcctcttcccagcgatttcctcttcccctcctcgcccgccgaggccgcccgtcctccgtccgccgtcccagcgagagggtgttgcgggtacgagagctttcgggattaaggtgccatgtccctcttcggggaacctcatgtggttggggaattccctcccgcgttccatctgatgctttaagattgtgcagacacataatttggatgctcctgcctatgcaagatgtcaaccaccagagatattgtttagtgctgggaaagttatgcagttttggatcataaattctaaatagacaagataattatggaccgtgcagacacatcagggtttgtcagtggtggttgctttggtactacactcctgctgatattctttcatttcgtctattctacagtccgtgtctgaaaaatcgtcagtaacgctgcagctgcctgggcagaaatatcatcagccccccccccccccccccccccccctgttctttgagatctctggtttttatctcattttcttttccaccatcgttatattgtcttaactgtgatggataacggcttcatggacatcccccatccgcccctgatgaatgacccctttgtgttagtgggatgctcagcgccaagctctacggtggagaacatgggccaaagcacactctgtatggatggcctgaacccagcaattgttagttgcagccatgttaatggaaatacacagataatgaatgacataacagcgagagatgatggcagcaggttagtccttggtttgggtccaacaccgaatttttattctgcagtgtccactggctcaaaacaagctcagagattgtcaggccagagttcaactttcactgattcagggatgctgaggcttggccttcacaccgatggtgggggagcaattcaatgtctgcaaggaccgaatggagcactccattctttaggtattgtcgacgaggcttcgacatctactactgtaaggagcatgggtggttacatgccatccctactctttgctccccgctccaatcctactgtcaacgagacacaagtagaaatcccagattctctaaacctcacgcacagcaccagcaacagtcagcatattcaacgtcacctccagtttagccctgaaccctctgcaatgaccgagtcttcatttggtgtgagttctgatgttgtcaccgcaacaactacatcagaacgtagccattctcgacatcctaagaaatgcaggttcaagggatgttccaaaggtgcaagaggcgcatcaggattgtgtattgctcatggaggtgggcagagatgtcataaacctggatgccataaaggagccgagagcagctctgcatactgcaaagcccacggtggcggtcgtcggtgtgaggaacttggttgtaccaaaagcgcagaaggaaaaacagattattgcattgctcatggtggaggccgccgctgcgaacatcctggctgtcctaaagctgcccggggtaagtctgggcggtgcatcaagcatggtggtgggaagaggtgtttggttaaaggttgcattcggagtgcggaggggaaggctggattgtgcatttctcatggcggtggtcgacggtgccagtatccagattgtggcaagggggcacagggcagcacattgtactgcaagggacatggtggtggcaagaggtgcgtcttcgatggttgcagcaaaggcgcagagggtagcacacctctgtgcaaagcacatggtggcgggaagcggtgcatgtttgaaggaggtggtgtctgtgcaaaaagtgtgcacggggctactgaatattgcgtggcgcatggaggaggaaagcgctgttccgtgcccggctgcaccaagagtgctcgtggccgcactgactgctgtgtgaagcacggtggcggcaagcggtgcaaggttgagaactgtggcaagagcgcccaggggagcacggacttctgcaaagcccatggcggaggaaagcggtgcacatggggcacaggctgtgaaaaattctcccgtggcaagagtggcttctgtgcggcacatggtaccttgatggccaggcagcgagaacaagaggcggcgaagaatgtaggaagcatgattggaccaggtctcttcagcggcattgttgtgtcatctgccaccgcagcaagcagcatgacgaacgagcactcgtcctctggtgtcagcaccgcttccgactgcgacggcactgtgaggagccaatcaatgattcctccacaggtgctggttcctcgctctatgatgccttcttggtcgactgagcctgtagatggaggcagagagggaggtcatgttgttcccgaggggagggtccatggtggtggcctcctgtcactcatcggtggcagcttcaggaacgccgatttggagaagcttcaaagctagtgcttttccatcagcagattcggtcagtttgtttgtacataaacaggccgcgtttcggcctattgtattcttattgtaccttttcttgtctagataaacatttcaaccttcatgtactggtttaagtccattgtaaatggtgactgccaattgttgtgaacgcttttggcttgttggttcagctgtagtcagtactgcaataatttcgtgtgttgtttaagctgctcttatttgtttgtgcata

SEQ ID NO: 1763 - DNA, 3239 bp, Zea mays
cgcttccacagccagctctccccaggctcactcttctccccagttgcgttttctttggaagcttccatacacaactcgcatcgttcatcttccactgatgctatataaggagagagagagagagagatagagagagagagagagagagagagagagagagagagatgatctgatgatgcatgctgtaacagctcctgaactgcacaagttgtagtttggctgctggataataagttcatccatccatcaacgctacaaatcaaggctctgctcggacattgcgtaatccaagagaccgtcaaggcaaggcaaagccaacaccagacgagtcgagaacaccgcagcagagcgcggcgtccaatggacatggacggcaactccccgcggcggcctccccgccggcctgagcgggaggggagctacggctacgacatcgagagcatggacggctccggggccgggggcccgccgccgtggagcgcgcaccacaacggctcctccgaggccctgctccgctacgacgacggcggcgccgaccgcgggagcacgcaacagccgctgctgcggaagcgcaccgtgaacacgacctcgcagatcgctatcgtcggtgccaacgtctgccccatcgagagcttggactacgaagtcgtggagaatgaccttttcaagcaggactggcgatcaagaaagaagaagcagatatttcagtacatcgtactcaagtggagcttggtgctccttattggcctattaactggatttgtcggcttcttcaacaatcttgcagttgagaacattgctggattcaaattgctgctcacgagcgatcttatgctcaaggggaggtatattagagcattttttgtgtatggaggttgcaatttagttttggcagcagctgcagcagcaatctgtgcttatattgcacctgctgctgctgggtctggtattcctgaagtcaaagcttatcttaatggggttgatgcctattctatattagctcctagcacactctttgttaagatttttggttcaatacttggagtttcagctggattcgtgctaggaaaggaagggcccatggtacatacaggggcatgcattgccaacttgcttggtcagggtggatcacgcaagtatcatcttacttgtaactggctacgctactttaagaatgacagagacaggagagatttgatcacatgtggatctgcagctggtgtggcggctgccttccgtgcacctgttggcggtgttctgtttgctcttgaagaagcagcatcatggtggcgaagtgctcttttgtggagaacattctttacaactgctgttgttgcggtggtattgagggggctgattgagttctgtcgtagtggaaaatgtggtctctttgggcaaggtggattgatcatgtttgatctcagttcaactgttgcagtctacagtactccagatctaattgcaattatagtccttgggataattggtggaatctttggaggcctcttcaactatctgttggacaagatcctccgagtttatagtattatcaacgagagaggtgctccattcaagatccttctcactataacaatatcaataatcacatcaatgtgttcctatggtcttccttggcttgctgcatgcactccatgccctgttgatgctgtggagcagtgtcccactgttggccgctccggaaattataagaacttccaatgcccaccaggacattacaatggtcttgcatcactcttcttcaacacaaatgatgatgccatccgcaatctcttcagcaacggcacatcgactgagttccaaatgtcatctcttttcatcttcttcactgctatttactgccttggactagtgacttacggtattgctgtcccatctggtctctttatccctgttattcttgctggagccacgtatgggcgcatagtgggaactcttcttggatccatatctgatcttgatcctggcctttttgccctacttggcgcagcatcttttcttggtgggacaatgagaatgactgtgtcagtctgtgtgatccttctagagctcaccaacgatctccccatgctccctttagtcatgcttgttcttctcatatccaagaccatagcagatagctttaacaagggagtttatgatcagatagtggtgatgaaaggcttgccgtacatggaggctcatgctgaaccatacatgaggcacttggttgctggtgatgtggtgtctggcccactaatcaccttttctggggttgagaaggtggggaacattgttcatgcattaaggttaacgggccacaatggtttccctgtgcttgatgagccacccataacggaaaccccggaactggttgggcttgtgactaggtctcatttattagttttgctgaacagcaagaatttcatgaagggacgggttaaaactagtggtagcttcgttctgcgaagatttggtgcatttgactttgcgaaaccaggttcaggtaaaggtttgaaaattgaggacctggatttcactgatgaggagatggacatgtatgtggatctccacccgatcacaaatacatcaccttacacagtggttgagacgatgtcactggcaaaagcagcaatccttttccgggaacttggtttgaggcaccttttggttgtgccaaagacaccagacaggcctcccatagtcgggattctcacaaggcatgacttcatgcctgagcacattcacagtctgttcccaaacctcaatcctcacaagtaccattcagcatcaatggcaggttgacaaggagactctttctgcttctcatctatttggcattattcgggtgctggctgtatgtaaattgcaaaggtgtatgcgtatctggttttcaattggatccatctcatcttctctacatagttttgtttgtgtggattttgtagcatatgctctttttgcaataaaaaaaatgtggcagttgtttggctggtgactgcctattatgagcctgcggcaataaatgttcagcaaattgcggagtaaacattgagagctccagaacatggagagaaagtgtgtattgtatatttgcgttgttcctgtaaagcatgtttagtcaaactcgaatattgtctataacaccgagtaaatctcaggcggaaacatgggcgagctttctaagtacagatttcttgctattgtaagtacttgaattgagattcgtaacatttctgctc

SEQ ID NO: 1764 - DNA, 2127 bp, Zea mays
atgcctccgtccaagcccaagcggcggcgcggcggcgccgcctcccgcggccggaagaagcagaaacgcctcgacgcgatccgcgacgtcccgccgccgccacctccgccggcacccctggccggcggcggcggctccgactccgaagaggagtccatccgccgcagcaagagggtccgccgggcgccggtcgtcctcgacacatcgccgctcccttccccacgcggcaagaggtctcgccgcggcgtccgggtgggttcgagcgggagctcgcggaggggaagccggggcagggcaccgcacgaagtggatgcccgaggggtggaggaaggggagtacgatgaggggagcgtggtgtggcgttcgcggctgagggatagggttaaggggaaggccaaactgggggtgcgggcaaggagcatgtggttcgaagatgaagattacgtggcggagggagatgggcaaggggaggaggaggaggaggaggaggaggaggatgaggatgaggaggaagatgccgggatggtggtggtggacgttcgtgagaggtctgaggacgacgaagtgaacaaggaaagtggatgtttgcagttgcaagggaaggaactaacagatagagagatcaatttaacaatcgatttgaacttagatgcacatgatgcccgggatggtgtcgatgcaatagaaaaggaagagggaggaaaaggagggaatgttgggaaggaagatgtggcggcggagcaagaacaagatgatgaggggcccacagtaggcactagaaatgatctagaggaaggcacgggagaggaaatggtggtggaggaaggtttgcagcaggaggaaataggagggttggaatcacatgtatcgagaggaaacagtagtgatgaactaccttgtggtgagagcaatgagggggttagggccagcaattcagacagaattgagcagcttgacatggaacagaccgcagaagagagcaaccttccagttgagcagcaaacggaaccgcacctatctagtcctagtgagcaagaggaagaggtccaacaggatggacagtcggttcatttcccagatgcggtattggctaaggatggttcaaaagagagcatgcaaaattcctgggttttagatgaaaaccagggagttaaggtggttaaagaagggaggaggtgtgcgctctgtggtggagggaccgatgggagaccacctaagattgcattgcatgattctgttgacagtgaaaatgaagcctatgagggggctttaccttcagaggaacccaactatgatatgtgggatggatttggtgatgatcctggatggttgggaaggctgttgggtccaattcatgaccgctttggcattgcacgtgtctgggttcatcagaactgtgctgtttggagccccgaggtttactttgctggtttgggctgtctaagaaatgtaagagctgcgctttgccgtggaagacttctgaagtgcagtcgatgtggcagacctggagcaactattgggtgtcgtgttgatcgttgcccgaaaacctaccatttgtcggccaagtcgtctttactaatcgtgattcatcgcgatcaatcgcccaagtcggtcaaccagaacgaccaacaagtcaatggcaggaagaaggccggcactgccggtgacgggtgttggcgtgtgcgtcgcgcgtggggaaggccggcgtggtcggcgccggggcgcagggggaagaagcggcctatccgctggccctgcgcgccgcacgagggccgtgacgtagggaagacagggtgccaccgtgagggtatttgccgtgggaggccatgggtggctggcggcggctctggtatggcgtgtgttgcgcaggttgtattggtgggaaattggatgcctaggcgtggtggttcgtcgcctgtgttggggcgaaggcgaacacgccacccttcgctcgacgacatctacctcaacattccgcagaacgaaggccgcgctagcaggccccgtcggtcaggccgcggacgtcgtccatgcgaaggcccaagcgcccctcttcgctccgacaagacgagacgaagacctccaacgactgcaagggttgggaggccgaggccgcgaagaccataa

SEQ ID NO: 1765 - DNA, 1196 bp, Zea mays
ccagcccagcccataccgacttttcttctccccccttccccccccccccccccccccccaccggcgagccgacgaacccaccctcgtggcacgtacggcaccgccgcgatgtcgttgccggcagcgaccgcgccgtcctcttcgggggcgacgcagcccacggagcagcagggaggctcgagggagcggcgggtggagtcgctgggatggctgacggagtcggcggtgatgccgaagaagcacaaggccatcgagggggtcggcgccgcttcgatcctcgacctcaaggcccagctctaccgcacccaggaggaggcccgaaaccccacagcccccggcgccgctgcttccggcggggagttccgccgcgcaaagatacgctccgcacccaccgaccctctcggggccaagaactccggcgttgaatcccgggcccacaaggataagctggagcttaaagccgtgaaagacggttctgcaagctatgctgctctagaaaagaaagcagagttgtatgaaaaattatacagaggcgagctacctgacgaagaagacaaagagaaatactgtgtggatttcttccaaaaaagttccgatcgtatctatgagcctcagatgccagagattagccacagagccactgatgctgcagagccggtaaatgatcatgaagattctatgcctaatgcgaaaccgttggggcttggccgagcaggcactacaatcgacagagatgagcacaagcgctttgtgagggaagttcatgaggaagtaactgaggcaaggcagaaggcctcaacagtaagatctcgacgacaagagcaggatgctgctcgtagagagaaactcaggcaagcttacctgaagaaacggttggaaaagttgattgctgaaaaacaggcctcttcagccagtgatgacctacccagctagctagtatatgtgcttgcatgtccttcccaagtagcagtctagcagctgtaatggtctgttttcatgcattctcatggaacgcttactgtaaagtctcttttgacccagtacagtcatattcaagatatagcgtttgcaagtactgccggtgttgcagaatattgttgtacacaaatctagataatgccacaatgattttacactagaacatcaggcgtcctttggatgccctgcaattgttcgaagaaactaaattgttcaac

SEQ ID NO: 1766 - DNA, 1015 bp, Zea mays
gtgtgtcacacttccggcccacgagaggcggatgctcagcgcctcagcggccagatcgtcttcccttcccccctaccctgtgcgtgtctgctccctctcctctggctgccgctctccacagtcctcgggctccaagccttgcgtaaaccccgacccccacgcgcatagatgaagactaggtcgcagacgtcgccgaagcctctcaagacggtggcgatggctcccaggccgagcagcaccaagcggaagccgaggcccaagccggcggggaagggcgacccccgcgcacccaagaagccacccaccgccttcttctacttcatggaggattttcgcaagatctataagcaagaaaaaccaagtgtaaaatcaatgcaggaaatagggaaggcatgtggcgaaaaatggaatacaatgacatttgaggaaaaggtcaagtattatgatatagctactgagaaacgtgcagaatttgagaaggcgatgattgaatataacaagaaaaaggtgtatattatacttgccccgcctgttggatagcctccctccccagcccctgtttttcttatgggtgaaagcataaccatcttccatattctcatgcaggaaagctgaacatttgtctgttccaaattcccgatggttcactgtaactggatgaatcaatcagctgtatattacagaactgtgatttttagtggaatttataaataccactagttggaaccgtcagctcacgcagatatgtatcttttgtagtcgacttgcacattttgatgacaccgagtcttctacccggtgtttttcatctggagataatttgtgtttcgtgctaactgctcgttaaattgcttattatagagttgtatgtatgattgtgtatataataatgtcctccaacgcaaaaaaatatatatattatcacagctaaaacaaatgatatccctactgtcaagtatagtacttagactgtagatattgataccgaacactcatatatcgaattcatttatcc

SEQ ID NO: 1767 - DNA, 1193 bp, Zea mays
aagaatcccaggagcaaggcaacgtacgagagtacgacaccggcgccggcattgttcgatcgtcttctccttcttggcttcttgctaggcggctcaatcgaggtcgtcggcgcattgttactccgcaccgcgcgaggtccccggcgaattgaaggtcaacctgcagccagttagttgctgtcgttccgctggagatgccgcaggccgccgccccggcgtgcgcgctgccgctgccgacgatgcccagggtggcgcggtcgcacgcgtgggactgggtggcgctgctcctcctggtcgccgtcgacgtgctgctcaacgtcatcgagccgttccaccggttcgtcggcgccggcatgatggcggacctcagataccccatgaaaggcaacaccgtccccgtctgggccgttccgatcatcgctgtcattgggcccgtgactatcttcgccgtcgtctacatcaggaggaggaatgcgtacgatctgcaccatgccatcctaggtatcttgttcgccgtgctgataacgggcgtcctgaccgacgcgatcaaggacgccgtcggccggccgcgccccaacttctactggcgttgcttccccgatggagaagcggtgtacaacaacatcacaacgggagtcgtatgccatggcgatcctagcgtgatcaaggaaggctacaagagcttccccagcggccacacctcctggtcatttgcggggctaggcttcctgtcgtggtacctggccgggaagatgacggcgttcgaccggagagggcacgtcgccaagctctgcgtggtcctcctgcctctgctcgtcgccgcgttggtcgccgtctcgcgggtggacgactactggcaccactggcaagacgtctgcactggcggcgtcctcggattggtggtcgcttcagtctgctacctccagttcttcccagccccgtcagatgagaaaggattctggccgcacgcgcacttgaggttcgtcagcgagatggtggaggaggaggagagccgaacgcagcggtccaccgaaaccgccggggcgcgcacgagccacgaactggacgcgttggaagccggcagcaggagatgttagaacaccgacgagggtggataaaatacacgagcaagtgtttggtgctgtcaagcgacagcttttctggtgtctctctattcattatatagaagatac

SEQ ID NO: 1768 - DNA, 1254 bp, Zea mays
gtgggccgttctttgcggcggcggttgaagaggaaacgcgagcgcgcacgaggagaagaaaccctccacctcaagtgggccgagttttgcagctttccgattttgcccctgcatccaacggcggaaacagcgatacgaatatacttggattgaaggtttatggggaacccgacctgttctggtgttccgctctgccgagtcgatgagaaatagccgccgggttcacagttcacttgcagtcgcagtcgcagtcgcagttgctggttgctttgctccccacatttgtcgacggtcgccgtcgccggttcctcgtgcaacgcaccgcgctaacgatggccgagacggtgggcttcgcgagcggcgacgcggcggcgtggcgcgcagcgctggccgcgtacgaccgccgtctcgcggccctagacaaacccgacctcgtggccgtggactccttttaccgccacgacctgcccgcgctcctgcgctgccgtgacccggatcctttcctcgccaagcccgagctggtgcgcctcctccagtggaagctctctcgcggcaagtggagaccgaggctgatggatttcgtcaagggcttggacgacgccgtggtggagtcggcgtcgcgcaaggcgttcgcggctttgcccgacctcagaagggccatcaccgagcttaccgtgctcaagggagtcggacccgccactgcgtccgccgtgctcgctgcgtatgcacctgatgtcgcaccgttcatgtctgacgaggcgatggtagcagccttgggcaattcaaaggagtacactctgaagcagtaccttgcatttgctgataaattgcaggcaaaagcgaaggaactgagcataggagaagaaagtttcacaccctcagatgtcgagagagcactgtggagctcggcaattgcgtccaagtcaccaccaagcggtaacccaaagagggaatcaaagatgcatggcaagaggaaaagatgatttacaccgcgcttctttattgaggctaaaagggttttagtagctgcgggtcttagattcttagttgaacacttgtttttgtaacctgcggaatggaatcctttggtggagtataatttgaaatccttagttgaccaaaacactttatttcctacatgcctaccagtgaccctcgctacatgagctcggatgcatcgtgcatgtgtatttcaagactaatgcacccgttgttgctattgctgaaaatatgtgccggtctttttgaacacca

SEQ ID NO: 1769 - DNA, 975 bp, Zea mays
ttatttccccccaaaacaaaccataaccggccaattctcacgcactcgccgcctaggagcgttcacgttgactgcgggcgacggctcgcttcctctcctccaccgcacctccaagaatccacccctgcctcactcgcatggttcactgtccgatgtctcgcgtccacacctgtcggctgccacagatctagccctgcctacagtgctagcaccaccatgcgtcccgttcacctcgtcgtccgcccctggcccttgcctcaccgacttgtggccgccgcggctccatgtgggacacggccatgcctgacgcctccaccgccatgattgagctaacgactccactccatgggatggtccacggtgggccatggcagctcgccggctccaacctccccctctagcctacagtgctccaccgtccggtcgctagtgctcctccatggaccacggctgacggttgcacgcaccgcctatcgcctagccatgctctggtgtgaaggacatccgcttctgcccctgcacatcccgcccttagtcgcgcacctcagcctgttccttggaccgacggctattgtcttgaggcgtatggtggccgcccacctcgtacccagtcaccagatctcaagttacacctcgaaatccagatcaagtgcatgtcatgttttatccttggttcaatcagttcttactagattttgttggcagggcttcaagctcttgtttattgtttcattgatggccatgcccaaaatcaagcgatcacatgctgcaagggttgtgggagcaataggtgaaaagaataaagtcatatatgaggatgtcttgtactattgttttcacatacgagatctttctaccaattagttttttttgtctacctcatgtatatataggattttgttattctaggctctaaaatagtgcattctggtgtaatgcagatgttacactgatattctaactgtatattgagct

SEQ ID NO: 1770 - DNA, 529 bp, Zea mays
aaccccgtcaccttcgtcgctaagaacgtagagggagagagagagagttgagagcagggagcggcaggaagggagaaaagcggaggagcgccgtcgacggcttacgtccagggtcgctccgtcctcaatagatggcttgtgagggtcgtagaggtgtcctaatggtgtcttgaccttacccccctggaacttgggcggtcgcatggcaatttctcgccgaagtggaggaaccaccgcaattccgcccttcatcgtggcctggcctgtcgtcatctccaccgccgcgcgaggacacgtgtcatctgaaatgcaagttggtaactggaatctcaagtgccaggtcaagaacaggtaccacaggatgaggcgcttggaggatgctgcgatgtgttcgtgagaggtctaggtcgtcgtctcccagtcaactttggtttgctggaccgttgtctccttataatgtaattatttattttgtacagaactcctattatatagtaaagatgtgacattcgatcctgtgccatgattc

SEQ ID NO: 1771 - DNA, 2196 bp, Zea mays
ccgccaaactcgctgccacgtcggtccgaaccaaatccagcacctctctcccctcccccttcctcccgtcccccgtcgacagtcgcatcgcaccctatcctccccagtccccaccagtccaccaccctctccccgcctcccgctgcgaccaccgcaccggcgaacttggagggccgctcggcgctgcacaccaagccggggatggccgccgcgcttgcgagctcgccgcttgttcacctaactacctcccgcctccgcctccccaggccccaggcctccgcttctagttcgggtccagtctgctcgatcggcgtgtgcttgggatggaggctgaaggtcgggtggagggccctgaggcggcgcgaccggcttcgatgcttctccaccgacgggggcggcggggaggagggggaaaagcgtggcgaggaggagacatcggcaacggcggcggcatccccggcctcggttccagcggagacacaggtgggcgctggggaggagctggcgtccgagcggagtcggtcagggagcttttcttcctcatcctcgtcgtccgggactcctggtgtatcaagcgagccaccgctgttgagttttagtgttgataatatcgatacagttaaactgttggaacttctaggcccagaaaaggttgatccagttgatgtcaaggcaattaaggaaaaactctttggttatacgacattctggttgacaaaagaagaaccttttggtgatcttggtgaaggagttcttttcattgggaacctccgtgggaagagagaggaaatctttgcaaaacttcaacggcaagtacgtgaacttaccggtgataaatacaatctttttatggtggaggaacccaattcagaaggggatgacccacgtgggggaccacgtgttagttttggtttgcttaggaaggaagtttctgagccaggacctactacgctatggcagtatgtcatttctctgttacttttccttctcactatgttctcctgcattgagctaggaattgcatcaaagattagcagtcttccaccagaaattgtttcatatttcactgatccaaatgctaccggaccccctcctgacatgcaacttctgctcccatttgtggagtcggctttgccagtggcttacggtgtcttgtctatccaactatttcatgaaattgggcactttttggcagcatttccaaaaaatgttaaactgggaattcctttctttattccgaacttcacccttggaacttttggtgcaattactcagttcaagtccattcttccggatcgaaagacaatgtttgacatatcaatggctggtcctgtggctggagctgcactttccttttcaatgttctttgttggcttattactctcttcaaatcctgttggggcaagtgatttagtggaagtacctagtcagctgttccagggttcattgttgcttggacttattagtagagcaacgcttggatacagagctatgcatgctgctacagtttcgatccaccctcttgtgattgcaggctggtgcggtttaactactagtgcatttaatatgcttcctgttggttgtcttgatggtggaagagcattacagggtgcttttggcaaggatgctttgtttggatttggcctcacaacatattcgttgcttggactaggagtgcttggagggccactgtctcttccttggggtttgtacgtgctaatatgtcagagaacacccgagaaaccatgcttgaacgacgtgagcgatgttggaagttggaggagggcggccttgatagcttcagtatttcttgttgttttgacgctcattccgttgtgggatgaacttgcggaggaactaggtgtagggcttgtttcttcgttctgagatgcggtgcttaccgatagaattaggccgtgatgtagttcagttttgtgttgaaatgtagcttcccacggtggaattgttgtaaaggtatgtggaatttccggattaggtgagcaatgatatcgcttatgcgagtgtaatgaaattgtgccaagtatagacgctaacgattaccaattacatacatgtatgctcacttaaccatacagttttgtgttgtaaactagaatgtatggatttataaaaatgagaataggcatgtcaagtccaggacttgaaatctggctaggcaggttatgctgaatcaga

SEQ ID NO: 1772 - DNA, 7288 bp, Zea mays
cgtcgcggcattgggcaggggggcgaggctcagccagcctcctccttcgacgaaggttccggcccagccatgcccgcttcctttgcgacttgacttgccactcttgtgttccttgacaggctaccaaccaccaactctctgactctacggccaatcgacccgatcaggccggaaaggtctcggttagctgcggcatgcgggtggagttggggattaagttgtccgtgtctacggcagcggcggcggcggccatgaggatgtacgccatgtcttcgtagaattgcgatagccttcgctgaaatcggaggtctacttttgcggccgtgcatgatctggaagcgggttctcgaagcgaggaagcatggacgtggtgcaggtcctcgcgtcggcgacccagctggtctccgcgatggtgtccgcggtcggggcactggagcaggcggcatccgacttggcggaggccccgaggaggctgcaggtgctcgaggacttcgtgtccgacctcgacgcgctaacgcagcagtcgaggcagcggcacgcgcacaagctgcacggcccgcagctggaccgccagttccagagcctgggcaggctcatggaccagctgcgcggtaacgtcgccaaggccaggaaggtgctgggcagcaagggcaaagggaaggggtttgccaggttggtgcggagctccgtggtgggtgacccgctcatcaagtacgccaggctgatcagggacgacctcaaccagtggcttgagctgcaggagctgacccagagcatcggcaatgtcatagcgtcgactgccagaagcacgccgtcgttggtgagggttaagtcggagcatggatacccggtgtccaagaagtgcagctatgtcagggagctgttggagagggatggggctcatcgagtcgtcctcatagtcggtctctctggtatcgggaagtcatgcctcgcacgacagattgcttctgatccgccacttagtttcgtggatggtgcgattgagattggttttgggaggtggtgcagcagggcagcatgtaatgggagcagaagcgaataccataaacgccttgctaggaagatctgcacgttccttgtgaagatcggctccatgactctcaaggaggagactggaatagatcttgatgatgtctgttgcttgctccagacggcattggtcggaagaagcatgctgatcctacttgatgatgtttgggagcaagacattgttgatcgcttcacaagactttatgataatgattgccggtatctcgtgacaacaagggatgaagctatctacgagatagcagaagctgaaaaggtagaaatatgtaaagacgacatcaaggagatcagcacggaaattcttctctatcacagccttctcagtgctggagagcttccgcctgtcgcagaagtcttgttggatcgatgtggtcaccatccccttacagttgctgtcatgggcaaggctctgaggaaggaaactagagtggaaaaatgggagaaagctatatccaacctctcaacatatgccacatgtgcacctggtccagtttcatacgtcaatgagaaagatgtggagactacgttgaccatatttggatcttttgagttcagcttagaagcaatgccagaaaattcaagaatttttttcatggctcttgcagctatctcttgggaagaacctgttcctgaggcttgtctggaatccatttggtcagcgcttgagcagtgcggactgttctctctcgtggtttcaaaactagtcgaaggatcacttattatcaaactggaggaccagccgttgtatcatatgcatgacatggtctcactttacctggagaacaaaacaaatgatgccactcgtgctcttttatctgattccatttcatataatgtggcattagtagctccttggctttttgtttttggcaaagagtgtatgaaacggccagccgaacagaagatgggatcattcttttctctgctagaattcatggacatcgagattttattggtaaacacaactcaagctctcatggcatgcagatccctgtctgaacttgagacaaatagaattgggttcagcaaaatacttggccctcgaatagcagagataatttctatagggtcactagatcttatttttgcagtcactgccgcaattacagttatattttccccatcagactacataaatcttgctcactctcttgaaatagcaggttccatagataaattaattgatcttcttggtgcctgtgaagatacttcaactctagccaacctctcttctgttctgaccaagatatctgagcatgttgatgccacaattgcggatgaaattttgtcaagaattcccatggttcgaattgcagatctcttgactgcagaaaatgagcagtggcatgaaattgtgtttacaacacttgcatctctgacaaaggttggaaagctgaaggctgttgagacaatgattgaatcaggaattgacaataaacttcttgtgcttctgggcaatggttctgagatctcacagcaccacgcgattatcacgctaaaaacattctgtgaacttggtgctccacttcaagggtgcatagggcctgcagtgctgcttcatttgccctggcatgctcggatcagtttggaaagatttgttttatctgacagaaatgtgccgcaatcaccaaagcctcaacaatcatttgaggtgattcttcataatatccttcagagagacaacaaaaatatcattaaaggcatccaaggtttattatctcttgctgaaacggcaaatgatacaagggtgcaggacctccttctgggaagccatctgtttgataggttggcttggctgctacaacgcagagaggttgaaaagaaccaggtgaggtcccagaccgcctttttggtgatgaaattggcctgcactggaggagagccatacgtgcataggttcctggagcttaatattgttcacgagctcattgacatgctgcagtgcaacatcgatgagctccaggattcagcgtactacgctctccatcagatcgtctttgcgaagggtggatcccttgtcttgcaaagatttctgcaactaagaaccatagagaaactggtgaacttgctggaccgcaagtctttgaagaccaaggatctagccatgcaatttctggtggacatcacggaggttggaaccaaaccctgtatcgagagaatgctcgcttctcagatcgtcgagaagctcgtggcccttgagaaagccggtgatcctttcggcggcgcggtgtcgaggtacatccagggattgaacatgtgcaagaaactccagtctgctgagagggcggtgatgaagcaacatattctgaggaaggtgcggtcggcagtgagaggtcataagctggaggccatcctagtagcttctgtggaggcctccatcgctgaaggcttcaaaggagcaagtagcagtaggaaatagaaataagcattttggtgagcattcaacagttcagataatcgctcattgatgtaaataagcgttttggtgacatacaaaatatgttaacatgtttggccatacatgagttcgggtctcgtggtagcatcatgtttgcaaaagcactgtcttgtctattttacatggtggtgtttctaaatctaggtgcaggagcttaaacactcccatatgtgaacaaaagtccgaacaccgttgcactgttgttgctgagtggtctactccgtgatgtgaagacgtctcctagtcctttagtgaagcaacatattaacgtcagcaaaaatcaaaggtaaatgcttgtacggtataccatcaatttcagcagcaagacgcttttgacccccaccacaccaacatgacgagcaagatggttgtcttgcattagtgtttgcatacataactagttagaatgtgatatactcttcggagttatttccataacatagtatatgcatgtatagcatatggctgatatgttattgtgttacctgactaggctgtcgtttgtgccactgagtcactgagaggcatgggtggattcctggagtcgtcttcatcctgtgttttgtgacatttctccatctcatacaagtagtttaaattaaggccaaggcatatgagcatatccctaccaacaagcaaaaacccatcagtgatttgtgtatggaattgacattctaattttatataaatgtatgcttcagtaaaaacaaaacttgaaccgaggaaccaaattcaagagaaacaaaagcattcctaaaatctagaattagttctgcaatgttgatagatagatagcatcagttaactcaaatagtagagaagtcatttacccgataatttttcaggccatcatgatcaacaacttgaagtttagtggcagcagaccgctccttgtgatcaaacagtgtactcgaaaagcatgatgggcccatagaatggcgagcacttgccagatcaagccatccttgtattcatattacagtatggtgggaacaggcaaatataaatttcactgtatctcaatccaaaaataaaaaagaatcaggtgctacctgcaaatctgcaactctgggagacacatgcagcaaaagtacaccaaaactggagatctaaaatctagtagtgagctcgtaaccagatgccaatgtgagtttattaatgacaaaaacaactaatctcaaactcaaactaaattagtcttcaatactccgagtcaaagatcatatcgcattcgagcactgtgatttaccgtgaaacattactacctactatttagttaccatgattggattatcctcctctttctggttataaacgcagagaacttaaatcatctgaaagaacatataggagggatgagaatagtcacaggaaaataatgcaagaaaactatatacacacctccttcctcccgccagcacggtcagagagcatactatgacagcctcaaatcctacagtgttaaggagagtcactaagttacttaacatcttttttcgaaagaatattcatccatgtactgtgtaaatatgaaataacacgcagagagtaaggagcgaagaacgttaactgtaacatgggggggggggcaaagtaattttttggaggtggggtgattcacttttcacgccgaagacaagacacagaccttagaggagaaatatggttgcggtttaaggcgcccaacgaatccaaaaatctaagatgcgaatcgtaagaagcgactaacagatccaataaatgtgaagcagaaggaactagatctgctagaaggacaaagtatcgggaaaaaagaaaacatgcctttttctaacctggcaaaaacgtaggaagacgaagtggctacagatagacaagacggagggagtaaggacgaagaggagcgtggcagaaagaataatgagaggcgattacagtggaagactactggtcgaccgatgcaagctgcagaggatcgacggagggagtgaggagaaagagagacagaacaaaacgagcgagggtgggtgggaagtgaggaggaagagagacggagcaaaacgagggtgggtgggaagtgaggaggaagagagacggagcaaaacgagcgagacgaggctgacgctagcgtcacttggaagtctctagaggcgataagtacgaggggcgtatgagagagcaaggaagatggactaatgatccatcatcgaacggctacaaagttttctgacgacgtgaatgagctagtaggcgccgtccgttaataataaggaaatatgttgttaatatagatgtttaatgtataaaggaaaaaatgagatatcgaaaaaaaaatattttacgcgaggacggataggacattcggcgttcctaggtaccccgctgcttccgtgctcacctcgcctgcagggccgcagccgctggaagaacacgaagacgacgggagtgcggggtggcgtcgccgctggagcaccagctgtagccgccggctaggcctccgcgccgctctccgtggccaacgcgccgtcatgcttgcggcgtcggcgcggcggctgtccgccgccgcctcgttttcctcttcttccatgcgctccagccagctcgccgccgtactgaaccaacagaggtggatgcacgacaggaacaagaaggcgatggagctggtggccaagggatggagtgcgctccaggaggtcgaccgcgtcatcgactacgccgatctcaacgacaagcgcctcatcccgcttctaaggggcgctaaggaaaactttgagctggctttggagattgacaatggtaatacacatgcgaggtattggctgggaaaaatgcatttcaagtatcatgttcctggtgcttgcaaggcagttggtgctgctttgttggttgaagctgcaaatatgggtgatccagatgcacagtatgaacttggatgtcgactaagaattgagaatgactatgttcagtcggatcaacaggctttccattacattgagcaagctgttgatcagctgcaccctggtgctttatatcttctcggtgctgtatatctaactggggactgtgttaagagagatatggcttccgcgttgtggtgttttcatagagcttcagaaaagggacatgctggtgcagctatcgcatatggatccttgcttcttaaaggtgctgaaatacctgaagttattacaaggttcaactcaggcaagagtccatcaactgggaaaatgcggaaaaggacccaacagcaggatccagtaaagctagcgaaagaacagtttcaaattgcagctgaggcaggctgtgatctcggtctgcggtggttgaagaggcttgaagcttatgaaaaccaagaagaaaagctaaagcaggttcagcaatgatatccactgaaagaatcccattgcatttgtcgcatacaagtatggtatatggcagcatggttgctgcacataggtataccaataatttcctttcctgccttcattatgttggaggctattcgatcctcggatgttcgggtcaactttgcaggaagatatactgaaatttggatatttagactaacttcttggattataggcgattggatgttcactttgtacgatgtattagcgttgacattactggaagccctaattgtgagaagtagaaacatatcatgtgtgttgctacgggcattatggatgatttagaataaaattagactatataactacttatacgaaggaataaattgtggcatatgatgatgtggataacaaaatgttctgtggcttcctg

SEQ ID NO: 1773 - DNA, 2183 bp, Zea mays
atgcaattttggcttagcggtttgagcaagaaggactgcatcgggaggtactacgccaaggatgccaccaagtacaggccgttcagcgcgctgctgcccgaggggggctggagcggcaaggtgctgtacgtcaagctcgtgctcgtcctcctcatgtgcggctccttcatgggcctcctcaactcgccgtccatccacctcgccgacgaacgccaccaccacgcgcagactgcagaggcgtggaatgcgagctggacgtcgcaccccgacgcggcgaactccgggtacgcgtcgagcctgaggatcgactggtcgcaggtccagacagcggcgaagcaggtcgctccgccggcgggcggcggcgccacgcgtgtggcgctgctcaacttcgacgacggcgaggtccaggagtggaaggcgcggatgccgcacacggacgcctccacggtgcgcctggaccacgtcgggagcgacgtcacctgggaccacctgtacccggagtggatcgacgaggaggatcactacggcgcgccggcgtgcccggacctgccggagcctaaggtggccaaggaggaggaggcgtacgacgtcgtcgcggtcaagctgccttgcgggcgcgcggcgagctggtccaaggacgtggcgcgcctgcacctgcagctggccgcggcgcgtctcgcggccgcgcgcgcgccccgcggcggcggcgggcaggcggcgcacgtgctcgtggtcagccggtgcttcccgacgcccaacctgttcaggtgccgggacgaggtggcgcgccacggcgacgtgtggctgtacaggccggacgtgggcgacctcacccggaagctggagctccccgtggggtcctgcaagctggccatgccatccaaagcgctaggcgaacattacgcgtcggcggcgccgcagcgcgaggcgtacgccacgatcctccactcggagcagctgtacgcgtgcggcgccgtcacggcggcgcggagcatccggatggcggggtccgggcgggacatggtggccctggtggacgagacgatcagcgcgcggcaccgcgccgccctggaggcggccgggtggaaggtgcggacgatccggcgcatccgcaacccgcgggcgtcgcgggacgcgtacaacgagtggaactacagcaagttctggctctggacgctcacggagtacgaccgggtcatcttcctggacgccgacctgctggtgcagcgccccatggagcctctgttcgcgatgcccgaggtgagcgccacggggaaccacggcgcctacttcaactcgggcgtcatggtcgtggagccctgcaactgcacgttccgcctgctggcggaccacgtcggcgacatcgattcgtacaacggcggcgaccaggggtacctcaacgaggtgttctcgtggtggcaccgcctgccgtcgcacgccaactacatgaagcacttctgggagggggacacggaggagcgcgccgcggccaagcgccgcgtgctggcggccgacccgcccatcgcgctcgccgtgcacttcgtcggcctcaaaccctggttctgcttccgggactacgactgcaactggaacgtgccggcgctgcgccagttcgccagcgacgaggcgcacgcgcgctggtggaaggtgcacgacgccatgccgcggcgcctccaggggttctgcctgctggacgagcggcagaaggcgctgctgtggtgggacgtcgcgcgggcgagggaggccaacttctccgacgcccactggagcgtccggatcgccgacccacgccggagtatctgcgccggcggcgacgccgaggcctgccgcgagagggagatcgccggccgccgggtggaagggaaccggatcaccacgtcgtacgccaagctaattgacaatttctgaattcagacggcagtaatagcgtcatattcatcccggccgtcggcggctggtcatccaacggcgcgtcacgcgtgctcgtgcctagcgagaagctttcgaattttggtgctatccaccatccacatccatggccatcagtattgacctaagatggtagagtgagatgatgttagcgtaaaaaacagaaactacacactaatatatctatgagatagtacgattcacatgagttgcgaccgcatacacacaaataaatattacactttattcccgtc

SEQ ID NO: 1774 - DNA, 2317 bp, Zea mays
atcgtcactaaggctgctgttactattgattaaaatttcaagatgccaccagatcagctagagtagagagagagagagaggccatgcatgctctcatggcgaacaccaaccacaccacaaatatgctacgtgtcttgcaagcaaaaccagcatctaaagccactagcagcagcagccaccactgtatttcgcagctttcctgtcacatacacatgctaaatccatgccctccacggccaccacctctaagcatgtaacgtaccgcgcgcagctgaactcggccgagcaatttctgctctgagtttgtcaggtccgagagatgggatcactcagtatggctgaaaaagctcccggcgctgcgttgccagagtcttcatgtgcatacttgcttcaagaactcaagatgatatgggatgaagttgggcaagagcagagcgaaagggagagaatactcgaagagctcgagcaggagtgccaggaagtttaccgaagaaaagtaaacagtgccaacatgtccaggatccagctgcaccaagccttagctgaatccgaggctgaatttaccaacctgctgctatccctcggagaaagatcgttcccggcacgacccgagaaaatggcaggcaccctgaaggagcagctcaattccatcacgcccgccctacaagaaatgcagatgagaaaggacgccagagtaaagcagttcgtggaggttcagactgaaacacacagaatcgcttctgaaatcgctggacggttagcgggtggagctgtcgctgtgaatgaagaggacctgtcgctaaagaagctcgaggagttccaaagcgaattgcgaaggctgaagagagaaaagagtgaccgcctctgcaaagtggaagaatacaaagttctaattcacaattttgcgaaagtgatgggaatggatccttcagagatacttgctagtgttcacccaaggttgctagatggaccaaatgagcagcagacgaagaatatcagtgatgacatccttaacaagctcaatatgactgttcagcagctaaaacaagagaagagcaatagaagggaaaagctccaaaaccttgtaaaagcattaacaaacttatggaatactctggatactcatatggaagagcgtcaaccttatgggcaaattaaggtactcgcaatgacttcagtaaacggtatgctaggtcctggaagcctcacacttgagacaattcaacaggttgaaactgaagttcagcggctgagtcagttgaaggcaagcaaaatggaagagctattcgtaaagaagagagcagaagtcgacgaaatttgcaagaaatcacacatgggcatgccttatcaaacagaaatggacaaaataatgaatctgataatgtcaggagatgtggtccatgatgatctattaaagacaatggatgaatatatatacagagcaaaagaggaggccacaagccggaaagacataatggataaggttgacaaatggatggcttcatgggatgaagaacgatggctagaagaatacagcagggatgaccgaaggtactcagtaagcagaggagcgcacaagcacttgaaaagggcagagcgtgctcgaattatagttaacaaaattccaggcttggtagaacagttaatggtcaagacacaattctgggaacaggagagaaacaagatcttctactatgatgagctcccgcttctagcaatgctgaaagactacatgttcacgctcaaagaaaaagaagaagagaaatacaggcaacgggagaataaaaagatacagactctacttgtaaagaggcatgagaattcaataatgttaaggcccaacacaagcttcagccgtccatcaagcagaggcttcaatacgagtcctggctccacatccatctggagcagccaagtttctgcaaaagttcagctgcctgactcagagaactccccagctgaaaaagatatgcgtgcaaaaataattaggaacagaggtacgcagggcattttgggaaataacagaagctgttcaatctctcatgaagataaagcagaagtctccacagtgaagcaaggcatttcaccaatttaattttttctcactttaaatttctacagaaattgtctgcctgacgtgaagttgcaacagcccccttaagctattagataagtgaagaaaagtatgtttgtatgcagcttacaccatattcatatatatatatttatttatgtatgattcattaaaatgttatttcggtgccgaagtactaacagagatcatcgaatgaaaagcacaaaagggggaacgtgaatt

SEQ ID NO: 1775 - DNA, 2259 bp, Zea mays
gggtgaaacatggccctgtcggtcggtgggcatggccttctcctccgtcactctcaccattggccttggccttgtgggggagtggtagactacctatagactcattcaaacacacacccaataacccaagccaagacaaggctgcctaggcagtaggcactcgctcggtttctctccagcccgtgtcaccaccacctcctcttccccttcctctctctctctctctcccgctgctgctgctgttcccttcttcctccctggcctcggtcccttcagggtgcatctgcatgcatagatggatgatggacggaaaagatggatttgtttgccctctagctagctctccatgccaaaacattccccactttgtgccaaaactgttgttgcggttggtatggtttagtgcatttttaccactctcttgtaatgatctagcttaattagctctaccaagcaatacaatcgccaccacaccaccgtctcctcctcccatcccccaagaaacccttttcctagctctaaaaaaagagcccaccaaaccctgcgagcccccaaccaagctcggtagccgaagccatggagtacaagagatcatcgcatgtggaggatgaagacgaggatgagctggaggaggaggaggaagaagacgaggaagaggaggaggacgaggatgaggaggccagaagccatcgctacaccacggcggcggcggcacccttaggcactccacagcagcaggaggtgcaagcccaagctcttgggctcggctcgcacgcctccctgatggactccgccgccttctcgaggccgctcttgcctcccaactcatctctggtgacgcagccaccgctgcctccaccaggcttcctgccggctcaccgccagccgccgcagctccatccgaggaaagcggagagggagagggagagggacagagccgcgggagcgcagcagccccagctccggcgccaccaagaaccagtgaggaataataatggcgttctcggcggcggcggtggcgccgcgcccccatcggcggcctcttctacgttcggcctcgcgtccgtgcggcccgtggtggaggcaccccagtggcggtaccgtgagtgcctgcgcaaccacgcggcgcggcttggcgcgcacgtgctcgacggctgctgcgagttcatgccgtccgggagcgacggggccgccgcgctggcctgcgccgcctgcggctgccaccgcagcttccaccgacgcgaggcgatccccggcggcgttgccgccgcggcggcggtggtatcgccctcggcggtgccggtggtgacccccacagcccgcgccagcgccaactcgtcccgtgtcatgccgctgctcatggccccgccgcacatgcatacgcgcccgccgcacgtcccggcgtccccggcgtccgcgcccgccgcgctgaccgagtcgtcgagcgaggagctgcgaggccacgcgcccgcgcacccggccgcgccgccgccgccgccgccacacgcgcaggtggtggccctagcggggtcggcttccgctcccccggcgccgagcaagaagcgtttccggaccaagttcacggcggagcagaaggaccgcatgcgcgagttcgcgcaccgcgtcggctggcgcatccacaagcccgacgccgacgccgtggacgtcttctgcgcccaggtcggcgtctcccggcgcgtcctcaaggtgtggatgcacaacaacaagcacctcgccaaggtcccgccctcgcccccatcctcccaggcccaggcccaggcccagcccccgccgccgccgcagcagcatcgccaccacaaccaccacccacctccacctccgccgcaccacatccaccatcaccaccacccgccgccgccgccgcagcaggagcagcagcatgatatgcatgagtgagtaccgagtagtcgcagagtaatgcgggaggatcagacgatgtcattagcttattagctcctttctttatccttcttcctcccttgtaatttcagtgacatcccggttgttaagaagttgactcatcatgcagcagaagttaggagggattaatatgattatgtgacctaatctcatctagtcatctcatccatccatacttctacttccagtcttccgtcgtcctctcgttgctttcttggataaacctttacctccattattaggttactgctagcgtcaatggcgcttgctttgacatccattacacctctttcttgtggtaataatgttcaatgtgtt

SEQ ID NO: 1776 - DNA, 2352 bp, Zea mays
cggaccgctccttccaatgggcgacaggccccatataagccgtggcctcccggctgcctgtccccactcgttgagcccgccccccgccaccggccggatcgacagcatccatctgaccgtctgcgcgcggcggctctcacaccgaacacacgcagggcgcgcataggcgaggcgagggcccccgcgagggatggtgtggtcggctgggatggcaatgcgaggcgcctccgccgcgctgctcgtgctggcgctcgtcgccaccgtggcgcgcgcggaggacccctaccacttcttcgagtggaaggtgacgtacgggacgaagaccatcatggggacgccgcagaaggtgatcctcatcaacgacatgttccccggccctaccatcaactgcacatccaacaacaacatcgtcatcaatgtcttcaacatgctcgaccagccgctcctcttcacctggcacgggatccagcagaggaagaactcatggcaggacggcatgctgggcaccatgtgcccaatccagcccaacaccaacttcacgtaccactggcagcccaaggaccagatcggcagcttcttctattaccccagcaccggcatgcagcgggcggcgggcgcctacgggctcatcagcgtccacagccgtgacctgatcccggtccccttcgacacgccggccgacgacttcccggtcctcgtcggcgactggtacaccaaggaccacaccgtcctggccaagaacctggacgccggcaaggggatcgggcggcccgcggggctcgtgatcaacggcaagaacgagaaggacgcgtcgaacccgcccatgtacaacgtggaggccggcaagacgtaccgcttccgcgtctgcaacgtgggcatcaaggcgtccttcaacatccgcatccagaaccacatcatgaagctggtggagatggagggctcccacaccatgcagaacgactacgactcgctggacctccacatcggccagtgcctgtcgttcctcgtcaccgccgaccagaagcccggcgactacctgctggcggtgtccacccggttcatcaaggaggtgaacagcatcacggccgtgatccgctacaagggctccaacgccccgccgccggccaaggtgccggagagccccagcggatgggcgtggtccatcaaccagtgcaggtccttccgctggaacctgacggcgagcgcggcgcggcccaacccgcaggggtcgtaccactacggccagatcaacatcacccgcaccatcaagctcgccatgggccgcggcaaggtggacggcaaggagcggttcggcttcaacggcgtgtcgcacgtcgaccccgagacccccgtcaagctcgccgagtacttcaacaccaccgacggggtgttccagtacgacatcatcggcgacgtgccgccctccaagtccgcgcccaccaagatggcccccaacgtcatccgcgccgagttccgcaccttcatcgaggtggtcttcgagaaccccgagaagagcatcgacaccatccacatcgacggctacgccttcttcgccgtcggcatgggcccgggcaaatggacgccagcgtcccggagcacgtacaacctcctggacacggtgagccggcacacgatccaggtgtaccctaggtcgtggacggcggtgatgatgacgttcgacaacgcgggcatgtggagcatccggtccaacatctgggagaggcagtacctcggcgagcagctgtacgtgagcgtcatctcgccggagcggtcgctcagggacgagtacaacatgccggagactagcctccgctgcggcaaggtcgtcggactgccaatgccgccgtcctacctctccgtctagagcatgcacgcatctcgctcggtttccccttccttccatcacgtgcgcacggtgctgtatacacaatttaaaggagcgtgagggcagcggcttctctcgtttccttcttctctagctttgtccccctagctcgtttgttctctcgtcgtcccgtcgtccggttcatttccgcttccgaggaataataatcaaccaaaggggcgggcgaccagggaaattaagaggcgatggtcagctgcaaatgcattcatgcgtaaacacatcgagacgccgtctcgaaccattgtaggagttaagtatatgatgatatataatcctgtctatctaataagtccctcagccaaaaattgttctttatatttatgtatatgtacatgcatgtctcctgattcaactttgatgtttattgtctctttcgctttcgtactgaacttatccgtgtaacttggtattggtatatggatcaatagattgttattcactatata

SEQ ID NO: 1777 - DNA, 2706 bp, Zea mays
cgacggcacgactctcgcgcgggtcggtcgccccggcccacacccacactggagcgtcaatgaaatttcagccccaaacagtccaatcacggtaactaatcactttgcacgaaaacagattaaaacaataaaaccaccgccaccgccacctcgacctcgactcctccgccccatcgccgtcgtccccgtctcctccgccttgctgtctgtccgctgctcacctcccctaaaaggaggcacccccggccattgccgcaccaagctccccttcctcgaatgccccaggcccggacaccacgacgccctgccccgtgctcacatggctagcggcgtcctccaccgctccgcctcccgatgtctccgccctgccgccgcgccaacccccgactccggcaggggccacggcgcggttatgatcggtgattcggggacgcgcggtgttgctctgcggctgggaggatctagccggagagagttattatctgtcacaatggcctccagagaccacactggcttgacccgacaacttttggattttcaacatgatacaatagatgaggtaggtgcagaacacggtccattcatggatttgaaagcgagattcatggacttcaaacagagaaactatgtgtaagtggatcatgaagtacaacacatatcattcaccttaacgtttcacagtttttttgacattgctgtatctggaactatggacagggagaatttttcaaattaccaaaatcttgctgaacagcaaacaccaaaggggaatcaataaatagctctctgttgaacttgttaacatacccatggatagagaagagggtgaatgaaggtactttgaatctccacggaggctactacaacttcgttgattgcacatttgagaaatggacattattgtaccgtgaagggttggaaggtggaagcaagtacgctataaagaataggtccacctggtcttgaccaatgaaggcctcatttacttgggtaaatttcactctgcgccctgcagttaagcatggttttgctttgccactacgctgtgcatttccgtcgcacctttgctccattgtggtattgatgtcctgcagaagcgagtccctgtatcaaataactgtgtccattgcgatgcatggcactatggcactagcatgtcagcttgctgtagtattgcatactcacgggcaggtgcatcggcattgtagttgtagcagctattgtttgatacgtacaggaactctccactgtggaagcacaaagccacaatggagtgaggtgcgacgcaatgaacaatatggtggcaaagtgaaagtctgtggaactaccggggggcaaagtggattttgtgcaactatttgtgtgtcgttttccggttgataccattgagaaaatacgaataagttacaggatcagtcatagtgcatgtaattgtcgccacatttggcgttaccttgttattgtaattgtaacatttgtaccatttgttgtatcattataactgtgagatacaatacaaatattatacggtctcggcaaatttgcttgatgacagtgttgttcgttcggaagagtcggcaatgcaaattctgtgatattccacatgttccaactaaaaaagtacgagtagcaccatgggagacatgtcacacagtaccccttcccttccgtctcccatcactccatcagtcagtcacttctacggcgccactgtcgtaaaccctagcgaggtgcgccgagaagcgctgcctcttgtagcactcggcgccgagcatctcctcccggctgagcagcacggcccggagcgccgcctgcagcgctggccgtgacgacgtcgacgttccctcgccatcgtggtgccgcccgccgacgtccagctccaggacgctccgcgtcctcccgccgacggtggctatctccgcgcgcacggccctcgcgctgacggaccgcacggcgcggcccagctcggacatgagccccgggcggtcggcgcagcacacccacgccctgacgcgcctggcggccctctccccgccgtggcagaagcggtgctggtggccctcctcgacgccgacctcgtcgccttcccccgggacggccactgccgcgcccgccgccgcggcgtccgcctcgccccgcagctcccgcacgtgccgcaccacctcccctagcagcgccgccttgtccatctgcatgattaattcgtacacgcacacgtacgtaaccgtgttcgctatcgagttcgatgatgaactgccacgtacggtcagctcctgaagagcaaggacgtgacgtcagtcttacgtacccgcgacgccgcagggaggagggtgcggagcgtggcgaggtgggcgttgatgcgctgccgccgcttccgctccgcctcgctgtggcttctgcccgtcccgctccgcgtcgttgctgccagcggtgagcactcccggtccatcgccacctccgctgcttcgtcaatcccgacaggcaccaccgtgttgcttgagcctttagctgtttctttctttttttttgaaaggaagagaggcgggaagccgatggcttgcgaagtcgcgagtacgtgcgaagctgcgaacacggcaacagccaacaagctagctagctcacacgtctggctagctctcgatcgtttccggccgggtgccggactgccgatcgatcgagctgttaaataagggaggccccccgcgg

SEQ ID NO: 1778 - DNA, 1673 bp, Zea mays
gccaatcgcaaagcgcggtgctgtcatggaggttgggagaggagcacgtggccgtccagaatccagtgatccaccacaaccgcccgtccattctccaggccatgccgcgcacggcactgctccgcctcgccgctgcttcgacgacgcgcgcgtcctcggcttccgcggcggcgcggcgactgtgcccgtcctcagagtcagacgacggcggcgagcggcacgcggccgcccggaaggatgagctcctcccgccgccccgcacgccgcgccccgacgagcggcggctgtctcggcgtggagagcatcggagagagttattatctgtcacaatggcctccagagaccacactggcttgacccgacaacttttggattttcaacatgatacaatagatgaggtaggtgcagaacacggtccattcatggatttgaaagcgagattcatggacttcaaacagagaaactatgtggagaatttttcaaattaccaaaatcttgctgaacagcaaacaccaaagttcatggtgattgcttgtgctgactccagagtctgccctaccgctgttttggggtttcagcctggcgaagcatttacggttcgtaatgtggcgaatttggtaccaccatatgagcatgagggatcagagactagtgcagcactagagtttgctatcaatacactcgaggtagagaatgtactggtggtaggccacagtaggtgtgggggcatccaggcactaatgagcatgaaagatgattcaacgtccggaagcttcattaaaaactgggtttcaattgggaagagcgcaaggttaagcacaagagctgcagctggaaatttgagttttgacatgcagtgcaaacattgtgaaaaggaatcaataaatagctctctgttgaacttgttaacatacccatggatagagaagagggtgaatgaaggtactttgaatctccacggaggctactacaacttcgttgattgcacatttgagaaatggacattattgtaccgtgaagggttggaaggtggaagcaagtacgctataaagaataggtccacctggtcttgaccaatgaaggcctcatttacttgggtaaatttcactctgcgccctgcagttaagcatggttttgctttgccactacgctgtgcatttccgtcgcacctttgctccattgtggtattgatgtcctgcagaagcgagtccctgtatcaaataactgtgtccattgcgatgcatggcactatggcactagcatgtcagcttgctgtagtattgcatactcacgggcaggtgcatcggcattgtagttgtagcagctattgtttgatacgtacaggaactctccactgtggaagcacaaagccacaatggagtgaggtgcgacgcaatgaacaatatggtggcaaagtgaaagtctgtggaactaccggggggcaaagtggattttgtgcaactatttgtgtgtcgttttccggttgataccattgagaaaatacgaataagttacaggatcagtcatagtgcatgtaattgtcgccacatttggcgttaccttgttattgtaattgtaacatttgtaccatttgttgtatcattataactgtgagatacaatacaaatattatacggtctcggcaaatttgcttgatgacagtgttgttcgtt

SEQ ID NO: 1779 - DNA, 2613 bp, Zea mays
atggcacgggcgccccccggcggcggcagccccgtcgtcgcgctggccgttccggcgagcgatgtggcttcctctggcggaggtctggacgcgaaggttcgcctgagctttggcaagccgcgccgccggcttacgctggctccagctccggctgagcatgatgttcccggagtcgtttttggctttgggattccggttgatgagttaagctctgccgaagaggatgaagatgggggggttggtgacggttcgtcggtggcgtggatggggactggtgctcggaagatggcggcgcgacggccatggcgagggccgcttccgccggctagggtgtccccacacctcactttggcggacgttctggccagggcgcggactttccatggtcatgctggccgtgggcatgcccctggtgtcttgttggcacacgcctcggcttcctctccggcgcatgcttcagcttcctctccggcgccgtcttgcgtttctgctgggggacggacgaactcgtcgttcctcgcgtcgcgaccaggcatacgggtgctcggagatcgatctgctgggccgggccgagccattgtaattggcgttgagggaagaaaagcccatttcaccttcacggacggtctttgcggcttgtttgggaacgcggggcgcccgaggggtttctcttctcctgctcgcgcgccgccggacggtgtccatccgcttgcctcggcctttcaagtcgcggcctcctcgccattggagccggttgtcgtgcaggcgaagttcggggcgaagacgaagtccgttgttgccatggatcaccgcggtgctggaggccatggtcggggctcggaccgcgacgtcgcaagtcagggtcggggcgggggtcacggcgtggatcccggtctgttccatggcggcggcggcggagagtttccgggaagcaatctcggtttcgatctagggtacggtggcgatgatcgtgaccgtggctggcagcggggtggtttccggtcgcgtggcccccgtggcttcgctcctcgtcgcgggggtttcgctggcagacgatggcacggcgctcgggctggccaccatggccatcaatcctgggaccctgcaacggcgggcaggggctaccgcccgtttcaggctgtccaggcggctgctaggcccccgcctgctcctgcgcctgggatggatgatgctgcagcagctgctgctgtcaccgtgccggcgttagtcgtcggctctgatgctgctgcaggtgcttggaaccaggagacagtggcgggagatagggaggtgcacaggacagggaagaaggagaagaactgtagccgctgtggtttgaaggggcacttgggtgctgagtgctctaccaagttgtattgtgtaatttgtgatggccatgatcatatcaaccaccgttgccatttgctcaagcaacctcgacctgtggcactggcacatgctgtcggatatgcggtgtctggcttgggtttttaccatatacctcatccgccactctccaggaaaaaggactccaaaacagcccttgtttcggttgttggtagtaatctttcgggtgatcagttggtggcgcaattgcagcgtattgtttcaagcaagtggaattgggaacctgttgttcatgagcagaactctttcattgtcgcgtttccatctaagaatgagctacagagggccattgcatttgggggtgcggatgtccgtgataaagatgtgcccatggggacaaggatgcaatttgaggaatggcatgaggaggaggaaggttttctgttacctaaggtttggattcgggtcactggaatcaggaaaaaattgagagaatttttgaatctctgggccattgggtctatgcttgggtctacacaaacggttgatatggaaactactcgcaagaacaattttggccgggtgttggttgctgtgttagatcccaagttgttgccgacaaaattggatgctgttatcggcgaccactactttgaattaagattcgaggtcgaatctgtgggctttgatgaaaacggtgatgaagtgaaccagaattttggggatggaaatgatggcgacaatgaggacatggatgaagatgatcccaatgatagcagtagcttggacagagaggggaagcgctctaagaaggacctctctggcaaccaaaatggaagtgacaattctatgggaatgggtggggctgcccctggtggcacctctgcagcccctgttttggcacttgagcatggagtagatacggaggaaaaaatcaggaaaatggcaaatgaaattatggatatggccgtggatatgtcgcttgacttttgtgttgacaaagttctcgcggaggaagatggcgaatacttggaaggagcagctgatggcatttctattgacatggtggctgaatctcccactgtttgtcccatgaaggttgtgattgctggctcactagatggtgtgctggtggacaaattgcctgctgcgttttctgtggttggaggggtatctgatgatggtgtgtgcggtggtggatctccttttgaggccttgttgatggctgatactggggccacaatggtggctgctgatctggtgtag

SEQ ID NO: 1780 - DNA, 1250 bp, Zea mays
tctctgcaataaagatgacagttacttgtctctgccatttgtctctctcaattctcatttgccactgagtatacttcaacacgttatcagcacttttgcttggcagaacagagagaagtggttgttgaaaggaagaagaatatgccgctcacaagaagtaaaaaaagaggggctacgatctccagaaatcgtaagtacgatgtacagttcctcttcatcttctaaaaataattatgttggcggtggcacttgcgaagacatccgcagtcacgttgggtgaccatggccggtgaggccacgtcgccagggccatgctgcatgtgcccgcgccagagtactcacgtcggggctactaccgagcgtcgtggccacgtgcccgctccgccgcagccgtgcgccctagcgccggggtctgcctgcgcgtgccgcctgggggccacgcgccgaggccgtgcccgcccaccgccgcggggcctgcgtcctggcaccgccgcgaagccgcgcaagccagatccgcgcgttgccgcgaaacgcacaccgcgggcgccaatcccgcgcgcgccatggacgggtggccgcgcccgcgcctgggctataaccgggtctcgcgcccgcgtgcgccgtggcccacacccgagccgccggggccggggcgtggccgccgcaccacggggagccgccgggaccgcgctagccgagcgcccacgcacagccctcggggccgcgccctccatcgggcctaggccgcgctcgtgcctcgccggggctgcgtgcccgtaggctccgccaggggctgcgcccgcgcgccgtcgaggagccacgcccgcgagccgggggaccgcgcgctcgcctccgtggctaaggccgcgcctgctggaggccgtgcccgccgcaccgggggccgtccacgtcgccagagccccactccgcgcgcgtcggagccgaggacgggggccgccgcgccgccgagggccgcctggctcacgtgctggggctcgtgcccgccctggccgatggccgcctggctcagagccgccccgaggctgagcccttgccgcggctgcgcttgcatccggtcggggcagcacccgcccaatcgcgccgtggccggagccgatgtgcccgagccaggccggggctggtgccgcgcgcccgcgccgcgcagaggccaccagtgcctggccggggccgcgccgtctgaggagagtgctaggcggcggccgcctctgcccacggaggccaacggttag

SEQ ID NO: 1781 - DNA, 1993 bp, Zea mays
ctccggctccggctgtagggccaccgccgccacctcctccttctccgccaccaccaccgccgccgccggtgggctactgggagagccgtgtccggaagcccgacacgtccaaagaaacccgttcgccggcactgtcgccgccaccacaagctgccaacttcaggagcgtccctgcacccaccgatgcgttctcaagccgtccgcccgagagctccgaccaaggcgacaagtcggaggacacgacgccacggccgaagctgaagccgctgcactgggacaaggtccgggccagctccgaccgcgtcatggtgtgggatcagctcaagtccagctcattccaggtgaacgaggagatgatcgagacgctgttcatttgcaacccagccaatgcgccggccaaggaggccacgaggaggccggtgctgccgacgcccagggccgagaacaaggtgctagatccgaagaaggcgcagaacattgccatcttgctgcgcgcgctgaatgtgaccaaggaagaggtctgcgacgcgctctgtgaaggtaacacggagaactttggagcagaactactggagaccttgctgaagatggctcctaccaaggaagaggagatcaaactgagagaattcgaagaggagacttctccagtcaagcttaacccagctgagaagttcctcaaggcagtgcttgatgtgccttttgccttcaaaagagttgatgcgatgctatacatcgcgaacttcgattcagaggtcaattacttgaagaagtcgttcgagaccctcgaggctgcttgcgacgagcttagaagcagcagactatttcttaagctacttgaagcagttctcaagaccggcaacaggatgaacgttggcacaaaccgcggggacgcgcacgcgttcaagctcgacactctgctcaaactggttgacgtcaaaggcaccgacggacacacgacccttctgcacttcgtcgtgcaggagatcatccggacggagggctcccgtcagtccgccagcgcccaaacaaccccaagaacccaggcgaaccctctgcgagaagagctcgagtgcaagaagctaggcctccaggcagtggccggcctcgccaacgagctgagcagcgtgaagaaggcagccggcatggactcggacgtgctgagcagctacgtcaccaaactcgccggaggaatagagaaggtcaccgaggtggtgctgcggctgaagaacgaagggacggagtcaagggacggcgcgtggcggttccacgacaggatgcagaggttcctgaagaaggcggacgacgagataatcaggatccagtgccaggagagcgtggcgctgtcgctcgtgaaggagatcaccgagtacttccacggcgactccgccaaggaggaggcccacccgttcaggatcttcatggtcgtcagggacttcctcgcggtcctcgaccaggtctgcagggaagtgggcagggtcaacgagcgtaccatcgccagctccgtgcgccacttccccgtgccggttaacccaacgacgccgcagctgttcccgcggcttcatgctttgagagctgggttctccgacgacgacgacgagagttcagccgcttcagtgtcgtcgccgtgatcgctggtagtctgccaatttttttttttaatttttcccgcggaccgtcagtagaacaccgccacgcccagggggcgcgggggcagagggattcagatggtagcgggctgctgcccctttttttttccacacacttttgtacctgtagattatagaatgtacaatgtttttgcaaatattttatctctgtatgtaagaagggataaggtctagatcagaagagggaataatcagttaatctatgtaggcagcttttatgtcttgagtagttcagtctgtacatgacatgaagcagttaaccacttgtagatttatccatctcacagaatgatagacgagtgaagctaacgattccaaaaaaaaaa

SEQ ID NO: 1782 - DNA, 1406 bp, Zea mays
ctcccctcctctttctagttttacgtgattcccttgttcctcgcgggccaaagcgcgctaagaatcaaaggcacaaagatagctcaccctcggtttcagcatcccctccaaacatcactataaatacccctgcacacacgcaccttgctgcatcaccaccatctcacttcatataccactccctaggaggacccagcaacacacacagccgagctttgcttaggcaagatgaacaggaagccaggagactgggactgcagggcgtgccagcacctcaacttcagccgccgagacatatgccagcgctgcagcgagccacgtggagttgctgatcgtggcggcggaggaggaggaggcgactacgccagcttcggtggccgcggtggctcctccttcggcggcggctttggcgctgctggctctgacgtccggcctggtgactggtactgctcctgcggcgcgcacaacttcgccagccgctccagctgcttcaagtgctccgcctacaaggaggaggccgctgtgaacagtggcgctggcggctttgacggcgacatgtcacgctcacggggctacggcttcggcagcggtgctgctggtgctggtgctggcgctgcccgtactaccaaccgccccggttggaagtccggagactggatctgcaccagatccggatgcaacgagcacaacttcgccagcaggatggagtgcttcaggtgcaacgcaccgcgggactctggtagcgctgccatgacctacgaaaactacttgcactgaggtgtaggatcgagcaagttaaaaagtctgcagcgccgaagaaagcgacgacaagaggagtcctcatcacgtcgtaacgtaagagagagagagagtagtggatttgcaacaaaaaaaaaaaaagacggccgcgatgctctgttactagctagctagttttgttcaaccacccatgccgtctcttctcttttattagatttggtttggttctcatagccctttaattaccatttgggacctatgtttgctgttctgtttcccgttcgtctcctccgcatgtttgcgcttggatcgagtcttgtgatgtaaccccccaaaaaacgcttgcttaactagtactgttgcttcttaatatctccgggggcgttcatcttgttcttgctttatggtgtaaggctagctccaacaaggagctttaaaaggttctgtaccctaaatttagaggatcagggtcatctactctctccagcagcgtctctaaatgctgctggatcctttatatatagagtttctctaaacggttttttatctatttgaatactttaaacaaccggtttagtaaaactaaaatatgtataatatatttgagagtatgataaatacgtatgtataaaaaataaaaaatatct

SEQ ID NO: 1783 - DNA, 1836 bp, Zea mays
gtgaattctcaaagaaactgaaagctggaacgaactttgcataaggctgcggctggtttgccgtgcgggaggccgttataagaaccacgccaccaccgtggccatcatacgcgctctcatctctggctggctcagaaaacagccgccaagcgcacacaccactctctcatcatgacctccatataggccccctacattctttgatcagtgatcactctcgctgggtctcaccccctcccgcagacggccaaacagaacccacgcgtgcgcgcgcgcccacgagcgagcgatgcctcccctccgccgcgcgcgctccatcctgctcctcctccactacgtggccgcctcccacctcctgctgcgcgccgccgcggccacattgccggaccccgcgccgctcgacccggcactggtcgcgaccccggtgcagcccgccgccgccgttccggggggcacgatcccggcgttccccgcgcagtcggactcgctggcgggttcctcgtccacgtgcccgctcgccccttccccggcgctcctcccggccgtgcgggcctcctgcgccgccgccgcggcgctgccgccgaggctgcgctgctgccccgcgctggccgcgtggctgttcgcggcctacgcgcccgccgcgctcgcggagcggccgcccgcgaggcctccggccgcggcggcggccgccgtggacatgccgctgccgcccgacgactccgaggcgtgcgcgggcgccgcggaccgcgcgcttcgtgcggcgggggcgacgctgccccgccccaccggcggcaataacgggacgtgcgacgtggcgttctgctactgcggggtcaggctgaggcggctgacgtgcggacccccgccggcagccgagggcgggctgtgggcgccggctgacgacgcggcggcgaggaggctggagagggactgcgcgcagccgggcgtccccggctgctccaaatgccttcttgctctgaccatgataaagaacactagtcccggcggtggcgccgccgcggaggcagcgagcaaggagaagcaggccgccgtccggtcgggcgagagtgaccgggactgcgagctcatggggctcatgtggctgctgcagcgcaacgccacgcgctacggagcgacggccacggccgtcatccaggcgctgatggccgtggacgaggcgtccgccgcgggtgtcgcggtggcggcagacgcggggccggccgcggcgtgctcgctgcccgtggacgacatgcccctcccggccgaatacgcgcaggtcggcggggccagcgacgcgcctcgcggcgtctgctgcttcttctgcctgctcgtgctgttctccgttctaagcttccgctccgtgtactcgctgtagcaattttgtggttcaattgaagttcgttatatgctccggccactgtgttttgctcatggaaaattatctgattatgtcctgcacgcatgggatgagcacgtgtcaccgcatcgatcaccttgtgagttgtgaggcatgcatgcggccgttgccatctgttccatggacactggttcttcactggagatccagcatgtatccctctttttagtttttacccggtgggcggtggctctatccatctttgttttgcgagcgaacctcttcaaagaaggcaggcatgtaggtccaaaagttcacctaaaaataaataattgatcggattttatagggaaaaatgaatccaaaaaactaacagcagtataatttattaaaggaaaaccaacgaaaacctctagcaagacacaccggttgactatccaggcgtaccacactaagggcatgtttcgtcaattgcctaa

SEQ ID NO: 1784 - DNA, 1360 bp, Zea mays
caaaattcaggctacagacatcagggttgtccggccaccgggcgaagcggcagtccgacggcgcagccacggtgacatcgcccgcggcgaagcgcgcccgcgacccgtccgcgcccgcgttccccacgaacaaggaagtccccgacatgccccccaagacccgtatcttctgcgatatcctggcctcccgcgccgctttctttcgctgggcgggacaccggcacctcggccacgagcactcgccctactcgtggaacctcttcgttgacatcctcggtaaaaatcgcctcttcgagcccatgtgggacactgtcaaatccatgcactcgcagcagctgctctcgctcgccactttcgcctccgtattctcctctctggcggcgacccccggcggttccccgctgaaggcgttcatggacatgccgcgctacggcatgacccgcgacacggcagcgctcaactcgctgctctccgcgctctgccgtgccaaccgcttcgacgacgcccgcgccgcgatccctgtagccgcgctgaggctggcacgcgcccggatgccgactcctacgccatcctcctcgagggctgcgagtctgcctccgacctgcgggttgcgcgcgaggtgttcgacgaaatggtgcgcgccattggctttgatcctgacaacatgcctgcctatgactccttcctcactacgctggtttcaagcgactcctccacggcgccaccagaagcaatggggtacctaaatgaggcaccgagaggcagcgccaatatttagcaagatggtcaagaatgaatgttggccaaatgagggaaattgttcgcttgcacttcaaatgtttttggatacacactattgggagactgggatcaatgtctggagctgcatggtggagaatggcttgccacctttagaggagtgtgggaacatgcttgtatcaaagctgaaggatgacaggctacctgaggcatgcaaatatgcagaagacatgattgatcggggtatcaagttgagttcatccacactgtccaagctgaagcagtgcctgcataagattaagaaaggagagatccatgatcacctacttaaaaaatggaaggcacattagtttgttgagctctggatagcctgaataaagacaggtgggatcttactgccagtttgtatcccatgaattgaaatcaatatctagaaagcgcttctcattttattattagattctttttcagtgtctcttaattactgggaaccaaacagggcattagtgttgatactgaggttgaatgttttatcactctgtaacgtttgaaacaacagttggaacttggaagtctctttctacatggaaattatcatatc

SEQ ID NO: 1785 - DNA, 1292 bp, Zea mays
aaaaagctcggtctccttccctactccgttcactccccaaatcccagactctcaccgcttccctcgtctcctcagtcctcccccgccatggtcacggacaagtccaacctcccacagcagcagcagccgcctcctccctccgcctcctcagcaccctcctcgctcaagtccctcaacaaggcctcctacaagatctccaagcagtcgtcttccgcctctcccgctcccgttcccgcctccaccatgcgagcgccttccccgccgccgccggctccccgcccgcctcctcctctcccgccgccgccgccgccgccgccgcaggcctcctccatccctgccgaccacccgcctccccagccccccgtgtacaacatcgacaagtccgacttccgcgacgtcgtgcagaagctcacaggctcgccgtcccacctcctgccgccgcagccagcgcccactcccgccaccgcccgcgcccgcgcccccctcatggcgccaccgcctcccatcatggcgccgccgcctccgccgccgacggcgataccctcccgcctccaccgcatccggccgccgccgctggccccgccgcccatcctgcccccggccccgccggcgctctccccgctcccgccgctcccggcggtgtgcatgaccgcggagtcgcccatctccgcctacatgcgccgcctccgcgggatgccctcgccgatccgcgcgcccacgtcgccgctcggcttcggctgcctgccgtcgcccggcgtgcccatgccagctaccagcccccgcgtccgcgacccgtgacgtgcgtgatgcaggaacccccaccaccaccgttgcgccgccgccgatgtgtacatacggccggctggtgtaggagagatctggcgaggcggcgggcggcgaccgcagaaggaagcaggcagcaacaccttcacattctctgtcgacgttggagcaatggcgtttctctggtcaattgggtggtagtagtgccgacgtgaggtgctccactaaagagaattttattactgtgaaccaagttggtcgaaaaagcaggagctgggaagcgtaggtgtccatttctgccaaagatcggtggcatgataggggtaacagttgctgcgaagtccaattcggaaagcgatgcgctgagaagacgccggtgcctgttctcttcctgcgagctgcgctttctagggtcgaaacattggtttcctggtgtaattttatcgtctgaatgtactgtagtgtagtagtagcatttcactctcaacatgttttttttccttcttcca

SEQ ID NO: 1786 - DNA, 2585 bp, Zea mays
acatcccacatctgtgagacacgagccgccgccagaagaccaccgcgcgccccggcccttcttccacgcctccgtcttccgcgcctggccacggcccaccgccgtccgcccttcgacgcctgacgcgccccggcaccgcccaggcaaggcggccgccggtagctacggacagcccaccgcgtccgcggcaccgcccaccggcagcagctaccggcaaccgcgcccgcggctctgtacccagggagtagcctatcatggggaagaggccgaggacaactctgcggcgcacgccagcacggggccttccaaagtccaagcgggccgacgagctgccatcgatgcctgattctgacaacgacgaaattgatgcatttcacaagcagcgggacatgatccctttcgacgccaatgatgtaagggagtcggaggatgatgatgtggagcagcccgtgtttgacctcaagggtgtttctgatagcgaaagtgatgacagcaaaggagaattgtccggtgacatggctgaagctgattatgaaggatgggacaaagggtatatttcgaaattaaaaagagcacagagggctgtcaaacaaattgctggaggtgatgatagcatggatgagcaggaggatgaaacacaagaaaatgtttggggcagaggtaaaaatgcatactatgctcctggtgaacaatctggtgatgatgaggtggattacgaggaggcacaaaggatacaaaaaaataaggaaaaaaggctgtctatgaaggattttggattagaagatggtgaaagtgatgaagagggtaatgcaacaaaggtatccaaccatgaatccaaaatgaaagaagactttgctgtcttatcaggcgatgagaaaatggatgtgctatacagttctgcccctgaactcgttagcttgttgtctgagttgaaggatgcccatgaagaacttagggccataggacagctaacaagtgaggtcacgtcttgtctaggcaaagataaaatgcaaccttttgaagtgaagaaagcttgtttgcttgctcattgtcaagctattaccttctatctccttatgaaatctgaggggttgtccgtacaggatcatcctgtaatttctcgcttgatagagaccaagaatatggtagagaagataaagcaaatcactttgaatccagtgagccaaaaagggtgcgctgatgaccatagtatgcattgtggcaccatccaaacagataagatagtctcattggacaaacaggagggcaaatttagcaatgtactagcactggataaagtgaaacaaggtgctgaagtctctgaatcaagaaagagtgagccttgtaataacgattatcatgaagttaatgaacagaagaacaaggatgaacgaatgggcttgcatagccttgaaatgttgaaggtaagagcaaaccttgaggaaaggttaaagaaaaaagggctctataatttgacacgctcgaagccagagaagtcgtcaaaaaccaggacaactagtgataaaagtggcctgcagacattggatgattttgatgatgaagtgctgaagaataaccaaatgatgaagcctagcaagcttgttgcagcagctgctaaatcaaataaaagcatgtttgtttctggtgatgatgaccttccgaagagagataatatcggagaaagacggagaaaacatgagcttcgcgtcctatcaagagtaggggctaactcagcagaggatcatgagctgccagatggtgacgcttctgaagaggaggaccaccatgagttgccagaaggtggtgatgaatctgaagacgacatccatcgggatgtcaaaagaaagaggactgaaaagctatcaaccaagaatgctctgtactcgccaactccgggcgttgaacatctggaggaagaaacagaaggcgatggcaagaggacgatttcgtatcagatcttgaagaacagggggttgactcgttccaggaataagaagaagaagaacccgcggaagaactacagggataagcacaagaacaagcttgtcaagcggaaaggccaagtgcgtgatatcaagaagcagtctggtccgtatggaggtgaaacgtctggcatcaacccgaatgtcagccgcagtgttcggttcaagagttgagttgatgcaagtagtatatttaggttggacatggaaggagttgtttctggtcttaacttggcattttctttattttttgtttgcatgtcattcgaacgcataaactccagaatttgtcttacggtattagatgagtacaattttgcttgcgaaaaatatcattatcaccgttgcctgtgtgtgtgaaaactaggtggtataattatcaaggaaatttgtatattatttcgaaccatatatattagtaggggctgtttatttagataaatgtccttaccgtgagacattgctagtagcatgacagcatgcataacatggcagcctttcattcttgacaataaccagctgtggaactgatatgggtccctaggtaattctacacatatgcagcctgttcacttggctttaatccgaacccgcttagacctt

SEQ ID NO: 1787 - DNA, 661 bp, Zea mays
atggtagtacatcatagtgctcacccaaaggttggtattgactgggacgcactacaaattgttgagtgccaagatgaggaaggtaggatataaattgttgacgatggcagaatgtatgagttgatcggttgagagctgaggatgaagctgctcagaaggcgggtgaagctttcaagatgcaagagggtgatgtcaatagaagttattgtgagaatgaaactattgatgcagccatccctgatgatgatgaaattctagatgaaagggtcatgttgcatgacccagacaagccttgtatggatattggaacaatgtaccccagcatgcgtgacttcaggctagctatgagacagtttgcggtcaatgaagagtttgagctagaaatatataaaactgatccgagtcggtttattggtaattgcaaaggagaaggttgcccttagcatattgtgggacgtagtcaataatctgggaatagtgttatggtatagtctaataagcctaagatgtttgtacataggatattgtttatgttgttactaactgaggttaattgttgcaggtgactatctcaattgaggaacacacttgtacttccaatgctagaaggaaaaaccacgacccctactagctcttgggtagcatcaaaggttatccatct

SEQ ID NO: 1788 - DNA, 977 bp, Zea mays
gttgtccggtacgtcccctccccttctcctcgcgcccccgcagccgaactccgccgccacgcgctgatccggtctcccccggctgtgcaggaacctacgaggaaggcttaggcgttttcctcgttcgctcgccgcggcgtcggacgatgcctctggggctgacgctggggtcgctggggcgggctatgcggcagaagcggccgtcctcgctcgacatcctctcctccaagcgggcgccgcgggactactacaagggcaagaactgcaagcccaccgggttccacacgcgcaaaggcggatacgtggttgtcgatgaaaagctgccaaggttcgcagttcctgacaatgactcatttcaaggtaactggcccctttttttctggtccacacttcacactttcacgacttcagagtttagacagcatcacaacctgttacgttggctaaggacgaggttgaggtccagtcctcgccatgaaccggatgccatgtgtgggcgattgcagctgaagccgttcgtgtcgcagtgcaccagggacctcgcagcgtcgacgacatcctcggcctctctaacttcagcacagactactgagagcaggagctgattgtcatcggactgctctagccatttgcaggaagcgagcgaccaagccttgcagtattgcggctacgttttcctggagagtgcccgtgttcagaggattagtcattagtgtcggcgtcttagcagctacaggtggtcatttcagatgtatttttctctctctctctctttatcttgtgtaagggcaaacatgtggcgtaaggccctgtcggccctgtctgttttcttccagaattatataatctaacttatagattacataagcatctaatgatctgcttatggattatcataatctaggtatctagattatataatccactgataatatatgttgtttgtttgtcccttaacttatttaagctatatgcag

SEQ ID NO: 1789 - DNA, 408 bp, Zea mays
atggtggccaccggatgcgctcctcctggccccggctctctgctgcgctcgccccaggtcgccgccgtcgagttccctgcgcgcttctctgctcggcgtcctgcttgcccccgatgccgcactcggtcgctatggcgtgcccaggctccagctcccctacgcgctctgcttccttgcgcgcgcgagctcgcttgtgatgctcctgctcctgctccagctcggtccctgctccagcccctgctcgccatggaccttcctgcgcgcgcgctcctctgctcctgcgcgctcccaattttccatggcgctcggccgcgcaaagccttcatcggccatggggcctcatcgtcgctgtccttgcttccctgcagctcggtcatgatttccatcgggcgttctgttttcgtgtga

SEQ ID NO: 1790 - DNA, 3131 bp, Zea mays
ggcctaccgttccttcttctacctgctctgctctgcttcggctttcggcttctcgcttcatcacccatcaatccaccgctcttctcccatctcttggctcttgcttgcgcactcgtccaaacggtaaaacagcaagcgctaactgatccaaaacatcaaaagcgccgcgcaggcagaagcagcagcaggtaaagaaccggaagccaaccaggagcgcattcccactcatcaaccagcagagctcagatataagctcaccagcactaccccttcccatcctctcccactccctcctccctccccctcgtccagtccacacccattgggcgagaagccgagaaggacagggagggagcggaagctagccaggccgtcccgtccagagccgctatgtccggcggcgcgcccctcctggccctgctgctgctggcggcggcggccatgatcgccccgtcgccggccaatgccgccgtgtcgtacgaccacagggccgtggtcatcaacgggcagcgccgcatcctcatctcggggtccatccactacccgcgcagcacgccggagatgtggccgggcctgctgcagaaggccaaggacggcgggctggacgtggtccagacgtacgtgttctggaacgggcacgagccggtgcgtgggcagtactacttcggcgaccgctacgacctcgtccgcttcgtcaagctcgccaagcaggccggcctctacgtccacctccgcatcgggccctacgtctgcgccgagtggaacttcggcggcttccccgtgtggctcaagtacgtccccggcatcagcttccgcaccgacaacggccccttcaaggcggcgatgcaggcgttcgtggagaagatcgtgtccatgatgaagtcggaggggctcttcgagtggcagggcgggcccatcatcctggcgcaggtggagaacgagtacgggcccatggagtccgtcatgggcgccggcgccaagccctacgccaactgggcagccaagatggccgtcgccaccggcgccggcgtgccctgggtcatgtgcaagcaggacgacgccccggaccccgtgatcaacacctgcaacggcttctactgcgactacttcagccccaactccaacagcaagccgaccatgtggaccgaggcctggaccggctggttcacggcgttcggtggcgcggtgccgcaccggccggtggaggacatggccttcgccgtggcgcgcttcatccagaagggcggctccttcgtcaattactacatgtaccatggaggcaccaacttcgaccgcacctccggtgggccgttcatcgccaccagctacgactacgacgcgccgatcgacgaatacggtctgctgaggcagccgaaatgggggcacctgagggacctgcacaaggccatcaagcaagccgagccggcgctggtctcaggcgacccgactatccagtccctcgggaactacgagaaggcgtacgtgttcaagtcgagcggcggcgcctgcgcggcgttcctgtccaactaccacaccagcgccgcggcgcgggtggtgttcaacgggcggcgctacgacctcccggcctggtccatcagcgtgctgcccgactgcaaggccgccgtgttcaacacggcgacggtgagcgagccgtcggcgccggcgcggatgagccccgcgggcggcttctcgtggcagtcgtacagcgaggccaccaactcgctggacggccgcgccttcaccaaggacgggctggtggagcagctcagcatgacgtgggacaagtcggactacctgtggtacaccacctacgtgaacatcaactcgaacgagcagttcttgaagtccgggcagtggccgcagctgaccatctactctgccggccactccctgcaggtgttcgtcaacggccagtcctacggcgccgtgtatggcggctacgacagccccaagctgacatacagcggctacgtgaagatgtggcaggggagcaacaagatctccatcctcagcgcagcagtcggcctccctaaccagggcacccactacgagacgtggaacgtcggagtgctcggtccggtcacgctgtccggcctcaacgaggggaagcgggacctcagcgaccagaagtggacctaccagatcggcctccacggcgagtcgctgggcgtgcagtccgtcgccggtagctcgtccgtcgagtggggcagcgcggcagggaagcaacccttgacatggcacaaggtcagtgttctactacgttgccacccaccacaagtattccattgtctgaaaccaagcacgcctgtggactgtgatcgatcgccaggcctacttcagcgcgccgtccggcgacgcgccggtggccctggacatgggcagcatgggcaagggccaggcgtgggtgaacggccgccacatcgggcggtactggtcgtacaaggcctcctccagcggctgcggcggctgcagctacgcggggacgtacagcgagaccaagtgccagaccggctgcggcgacgtctcccagaggtactaccacgtcccgcgctcctggctcaaccccagcggcaacctgctggtgatgctcgaggagttcggcggcgacctgtccggcgtgaagctggtgaccaggacggcgtgaccaggaatggagaggggagggcatgccgcacgcacacaggatgtgaataatttgctgggaagagaagcgagctgagggcagggcgcgcgcgcgcgcagacacgacacgacacgacaccgattctttcttcctcgtgaagtatctatagatacggcgtacatacggacacaatttgtgcccactatacgtacgtacaaaaaagattagtactagagtttaccgtagatctgttcttggagttggccgacgccggcacggctgcaggaactgcggctcacggccggctggtaatggtactagtagcgtggtttttgctctgcactccgcatgaatctcacggcgcacgcaggcttaattttcttagcgcaaatttgcgaaactgagttgtaaatgaggttatttattcctacgattaagtatgatacaagacgaataattattatgtgagttctttttacggtggttggtgaagccttttctcttattc

SEQ ID NO: 1791 - DNA, 1928 bp, Zea mays
ctgccaagtacacttccaattttccaaagatttgttgtgcctttagtcccctgctcgctcttcaccatcctaaattaaagctgcagcacacgcctgatccaccaatgtgcaccactcccgtgccgtcgccgctgcctgtggcgctggtcggagtcaagggagaccaccgtgtctacgtcacggtaccccagcacccggaaggcgacgtggccgtccatcgcagccggcagttcatgtgcagagccgtgcccctgccgacggcgggggagaccttccgggaggcagtagcgctgtgccggctggcgttcccgatcgcgttgacggctctgctgctctactcgcggatggccttgtccatgctcttcctgggcaccatcggcgacctcccgctagctgccgggtcacttgccatcgccttcgccaacatcaccggttactcggtgctgtcagggctctcgctcggcatggacccgctctgctcccaagcgttcggcgccaaccacccacgcctgcttggcctcaccctctaccgctcagtcctcttcctgttctgctgctcgctgccgctcaccgcgctctggctcaacatgtctaggatcctcgtcttcctcggtcaggacatcgagatcacggcactcgcccaggagtacatcctcttctccctccccgaccttttctccttctcactcatccacccgctccgtgtgtacctccggtcgcaggggataacgtggcctctcgccgcagccgcgggcgctgccgtgctgttccacgcgccgaccaactacgtgttggtggggcggctccggctcggcgctcctggggtggccgccgcggcgtccgcgtccaacttcgtgctcctcggcgtgcttctggcgtgcgtcgtcggccggcgcgactcggggcttcgagcggcggggccgcccacggcggagtgcctcgccggttggggtccgctcgcgcggctggcagcgcccagctgtgtgtcggtgtgcctggagtggtggtggtacgaggtgatgatcctgctctgcggcctcctgccagacccgaagccggcggtagcatccatgggcgtgctcttgcagacgacggcgctggtgtacgtgttcccgtcatcgctgggttttggcgtctccacgcgggtgggcaacgagcttggcgcgaaccggcctggccacgcgcgtgccgcagcgcacgtggccgtggccggagccgcgtgcatgggtctcgcggccatgtcgttcgcagctggggtgcgccacacttggggccgtatgttcaccgccgaccccgacatactccggctgaccgcggccgcgcttccagttgtggggctctgcgagctcggaaactgcccgcagaccgtcggctgcggcgttctccgcggtagtgcgcggccgacgcgcgcagcgcacgtcaacctcggcgccttctacctggtgggcatgcccgtcgctgtgctgctggccttcgggctcggcgtgggcttcgtcggactctggattggtctcctcgcagcgcaggtgtgctgcgcggggctcatgctcttcgtcgtcggctccaccgactgggaggcgcaggcgcggagggcgcaggagctgacgtcatgcgcggtgggcgaaatggagaagactggggcccacgcgtcagctaccacggaagcgggaggcaggccggagaagggggagcaggaggagggcgtagaaaggaggcacgacgactacgagccattgatgatttcgaacagtggggagcccgagccagaaactgtgtaggctgcttcaagattcgtgaaaatgcctggatccattcttactctctaattaattggagttactgctagtactactccagttctaatggtaatgagtataacttgtttttttatttgttgctttccatttcccctagttttttttctcttg

SEQ ID NO: 1792 - DNA, 261 bp, Zea mays
atggagaggtttattattaaagaaccacaagtttctagtcctaataatcaggctattgatcaagacaccgcccaagatacagaaactgccaatggccataatgacagtgagatagagagagaaaacattgtttctaatgacgatgaactagagactgaaaatatcgttgacgagcaaggtcccgataacattgatgatactagcatggctgttaacttggatagttcccatgctgcaaacatcgatgattcttctttttag

SEQ ID NO: 1793 - DNA, 1392 bp, Zea mays
ctcacctccaccaaacacgcatccacccgccagcactactgctgcgtggcaaaaatccctggatcagcattgtccaactccgacacgtctctctccctagcttcaatcttcagccaccgctttatataggatattttcctcatcgtgttcaacaggtgcttggaatcagcctcaggtttcttcctcccagtccgtaggagccacgtagctctctgcgtcttccatggtcacttctccggcgttactccagctcgccccgacccttgcgccttagtgtttatccatgctccatgccatggcttctcctaggtcgctctcttcgcgggccgtgatgcccctctgctcctgcctcgcctagccgtgtgcgtgctctctccgcgtcgagcactcactgcagctcgacaccgaccccctcccacatctcccccacaccatcgtctttccctagtggcgagctcgcctagtgatggtcgtcgttggtccctgcgtccttccccggtcgtctcacctcccttcgacgcccctgttttttttcagcttcggcgtccatcgcgtcctgctccttccattcgtatgctctggtgatcgtccaccccggcgtccagcgctgcccttgtctcttcgggttttgtctccccaacaccagtcggacgctccttccattcatatgctctggtggtcgtccaccccagcgtccagtgctgctctcgtctcgtcgggctttgtctccccaacatcagtcgctgcttcaactcatgttcgtggatgccgtatctacgactccgacactccctacacataatctgtgttttgtgttcatcgccgaataaaaatccctggcgttttggagaaaggaagatgaagtctgctcttcgatccctaggtgttcagtgttatgcgcgaaccagaaatcgttgccgatatcacggtcttcaagttgagtttattttattggtacgttaagtgatcacgtgatgtggaggaccagagctgagtcgaccacaagatgttgttaagcgtgggcttcttcgcaaggtgatgctgatggacgaacctaaggatggatgacctgatcaagaaccatgatgaagatgatcgtcaagtgaacgtcgtctaacaaacactaacgtagtgtttattccaggtactagatttgtgctactgtggatggtgttaagcgccaattggcacgaccttcttataagtctaagtacctctcctataattcttattgaggattgtcattgagctagcatatatttcaaaattataaataatttataacatttcaaagtttaattctttgaatcacttttgcaatcactccgataaacataatgtaaatttgttgtaacttgtaacttttgtaataaagaaattccgctgcaaaaa

SEQ ID NO: 1794 - DNA, 1115 bp, Zea mays
accaatgaaaatacgtggtctttctacaaccctatttatatgataggcccggcccctttccccctatccctcccttatgtttaggagcgggatctgcccaagaacgacctgtggtggtacggactccgcaagcgtcccgcaccctctgagaaagaaactcctcaaccatcacaagataaagaagtatgacgctctgtgtctgactctattggtcatagttccttgctgttgcggccggtgctcgtttgcgcgcgtgtgaaccaccagatcataaggaaagatgcctctcggggcatctaagaatgattcgagccgtatgaagggaaactcccacgtacagtttgttttgggggggaaggagcccgacagggtcccccccccccccactgacttggcccgggcctaagtgaaagtgaaaaagtgaagtggtgggcctacccatcccaacctggggtatgctgggattcgcgaagagcagcacgttacgatgttcatgaccaatcggatcttgacgtaccagtaggtaccagaggagatcgctatgatcgttactgtattcgtatcgaagagatgcgacaaagtgttcggatcattgtgcaatgtcctaatcgaatgcctagtggcatgatcaaagccgatgatcgtaagctatgtcctccatcacgatctcgaatgaaactatccatggaatcgtgcgccgtgtgaaacgtagatcatcgccgttcttaaccgagactcaggttaagctccgtctcggaaccgtcgtggggttaggagtaaagcatcccgaggttggcgcatctcgttgggcgtggagaagcattgggaaccccaatatctttcttcgagcagtttcttttcccgtcccctcgccccggcatagcgcttcgcttccggttcttcggaagaatcaactgacttctcccttcttcattgatccgggggaaagggaaccgtctaccagttgggaagctagacatcaaggttgtggcttgatgaggataactaagctgacacgccggagttggctgctggcacaacagggtggtgccttaccgcaccgcaggcgcacgcgcggtagcgcggttgtgcttagtgcgtattaccccttcata

SEQ ID NO: 1795 - DNA, 6583 bp, Zea mays
cggctggctacaagccgacactgttgcagctgtttggactgctgcagctgcaatccatagagagaaaaatactgtagaagccgcagccgcagccggattgcagccgcagcaagccacagcgaacaagctggatatttcaacggtaccgcacttacgttatctctgatcttctatcttatcccatatttcaaaatctactttacaatataaaacaatattttctacggtcgtatacacaattccaacagtaccgggcgtacgccgtccgatacgtttcgtcctcctatgtcccacctggcagtctcgcagcgcaaaccatctcaccaactagccatctatttataggcgtcgccatggccctcctccaacatcaaccagcgactcacacacccgcccgccgcttctgtagccgccgccgccaccccccccccccccccccccccccccccccaaccaaccaaccgcgcagggagaaaaccacagcgcagcacatgcagcgcctcgcctcctcccggaggctcctccaggccgcgctcgccgcggccgccgtcgccgcgcccgcgccagcgaatggcgccttccccaagatgccggccttcgactacacgccgccgccgtacaacgggccgcgcgccgagatcttccggaagcgcgctcagttcctcagcccatccctctttcatttctacgatcgcccattggacatagtcgaaggaaagatgcagtacctatttgatgaggatggccgtcgttacctggatgctttcggtggcattgctacagtttgctgtgggcactgccatccagatgtggttgaagccatagtaaaccaggcaaagcggatccagcactccacagttctatatctcaatcatgcaattgcagattttgccgaggcattggcttccaaaatgcctggtgatctgaaggttgttttcttcacaaattcaggcacggaggcaaatgagcttgcactgatgattgcacggctttacactggttgcaatgacattatctctcttaggaatggataccatgggaatgctgctggaacaatgggtgctactgctcaatccaattggaaattcaaggttgttcagatgggagtacaccatgcgcttaatccagaccccttcagaggtgcttttggttctgacggggagaaatacgccagagatgttcaggaaatcatcgaatttggaactacagggagagttggtgggttcatttcggaagccatacagggggttggtggaatagtggaactggcaccaggatacttgcccgtggcatacagtatggtaaggaaagccggtgggctctgcatcgctgacgaagttcaggcaggagtcgcgcgaactgggagccacttctggggattcgaagggcatggtgtcatcccggacatagtcaccatggccaagggtatcgggaatggcatacccataggagctgtcgtaacgacgccagagatcgctcaggtgttgacccgcaaaagctacttcaataggagtacctttgatggtaaccctgtcagcactgcaggcgggcatgcggtgctcaaagtgctggagaaggagaagctccaggagaatgcgtttgttgtgggctcctatctaaaggaacagcttaacaatctgaaagacaagcatgagatcatcggtgacgttaggggcaaaggcttccttcttggagttgagctggtgacagaccgtgagaagaaaaccccagccaaagctgagatctcacgtgtcatgaaccatatgaaagatatgggagtgttggttggtaagggtggtttctacgggaacgtttttaggataacaccgccgttgtgcttcaccaaagaggattccgacttcttcattgaggtgatggacattgcgctctcgaagctgtgaggcaggcagggcgaagatgatgtgcaaaccctggtccgtggccatgggttttttgcccatgaataatattaagattagtgagacagcacctcgttgtctcttaatctaagacgatgccatgtcatccggtggcatggtattcctgcttgcccataaataagggacgagttgtgagacagcacctcgttgtctcgtgatcagacccatggtccatggagcaatacgattcttgtaaactctagcttcatccaatctgttcctcctgatctaactagtctgaatagcaactgttcgtttgttaccaatatcaacttcttttcagatgctccatatattcctgctctctgtaaacaaacaattatcactgttcaatagatgcggagatgtggatataaaaattacatatacagtactgtttggtgtaccagtggtttggcaagaaaggaaaggtttaacgtacaatccaaaataaaatgttcacgtattaaattaatatgcatgatcatcatcaggtcacttgagaatgttgaacacgaagcaggcaatggtttccgtcatcaaaccgtcacgataatgatgtcactgatcatctggagcaatgacttctctacaattctctagtaaagttaaacatgcagcaactccgaaattgaccaaagtaacaaatccgcaaattgacacgtgaaaaaagacagcaaatttacatcaaaccaaacgacagtggctaccagctaaatatatgctcatccctatcttaaacagcagaggcctatttgtttctaccgatcataggctggccaccaccctttggactcggcatgctggtagacctgctgatcttgcttccggcgccaaaactcttcacgtcgatcaggtctccaaacaagttgtccggcatgtaatatggtctggctgctgccactggagattcttttggccgctgattccctttcacccgagcatttgtagccacgttcgaaccagtgtatgtttgaggaatagagaagttgtaactttgcaccggtgttggtgctggagatggaacatgttgcgctgatggagcagcatacggtgttgacatagttggataggcagctgaaggggcaacagaagcagcaggagtgtttggcgtttggtatgtcacaggctggaaaggattagctgaattggcacttgcaggcatagcccatgggggtgctggattgctcgacacatattgttggggttgagtcgaatatgccccaggctgtgcaaccggtcccgtttgggcccatggtgccacatagttattgtatggaacatatccctgatttgttggataaacctgggtgttggcagggtaatttgccccgttcgccacagcaggctgatagcttggcagtgtttctggtccatttgatgtgacactcggctgactcccattttggttctgagttgaagagtctgcagatgattcaggactgtacaaggtgaggctgagaaggtcaatcatatcctgctccttcgtcctggttccactaacagaagttgcgccgagaggtactattgcattgctctcaaccgaagaaacttcagaaagcgcccgactgcggtctcggattttgtatattcaggagggtgatgccaacacctccttttttcatcagcaggctagatacagaaaaaagaagaacttcattcctaagctgcacgttggtgatcaggtggtcacctcccaagaagataaacagaaggctgtttctgatttctatgagaacattttgggtagggctgaggagaggagctacactcttgacttggatgagttggccatccacaatcatgatttatctgctttagatgctccgtttcttgaggaggaggtgtggactgtggtaaaagatttgcctccggataaggccccggggccggatggtttcacaggtcgattttataaatcctgttggaatattattaaaggtgatgtgttgaggtctttggatgtcatccagcgtggccatgttttcaaattccgcctgcttaacacggcttatatctccttactgcctaagaagatggatgctgttgaagttaaggatttccggcctataagtttgattcatagttttgccaaattggtagctaagctcatggctactcggctggcccctttgcttccctcactggtttctgtgaaccagagtgcctttgtgagggggaggaggattcatgataactttatgcttgtccaacaaattgtgaagttgctgcataagaagaaagaaccacatatccttcttaagttggacatctccaaggcttttgactctgtttcttggtcgttccttttggaagttttaaggaaaatgggatttggtcagcgttggcgggatctcctttgtttattactgtctacttcttccactcagattttagtcaatggagagcctggggacatcattattcatcgtcgcggtctcaggcagggagatcctctttctccaatgctctttatcctagtcatggatactctgaattctttaatcaactatgccacttcgttgggtttgcttcaacctattgctgttcagcaggtcaggcatcatgtttccttctatgctgatgatgttgtagttttcttgaggcctcacattctggatctggtttcggtcagacgcattcttgatttatttggtcacgcctcaggcctccggaccaacctggttaagagctcggtctcccctattcattgttccgatgatgagctggctctttctgtggaaactctctcttgttcggttaaagtttttccttgcacttatttgggacttcctctcacaacctgtaagccttctaaagaggtgttgctggcctttgtggataaggtggcagattaccttcctgggtggaaagcttctttgttgaatagggctgggcgtcttgtgcttgtgaaagtggttctcactgctgttcctatttattggctcatagctttggatctcccgaaatggttcatcaaggctgttgataaaaagcggcgggggttcttgtggaagggacatcaacaagctaatggaggaaactgcttggtagcttgggataaggtccagagacctcttcagtatggcggccttggaatccataatcttgagcttctaggttgggccttgagaattagatggctttgggctcagaagactgatgtggagaggccgtgggctggactctcaatttctattccctataaagctcgggccctcttcgatatggctgtgaatgccgtggttgggaatggtgagaaaattattttctggactgaccgttggttggatgggcttaccatggctgagatggcacccaatcttttcagaactgaccctatgcgaattgctaagcgaaagactgtggctcaggctttgtttgggcggagttgggttcgtgatatcaagggtgctcttactgttcaggttttaattgagtacctccaggtctgggattttgttgaggaggtcgtactgcaagctgatgttcctgatcatttcagatggaagttgacacaagatggctgttatagcagcaagtctgcgtatgaggccttcttcgtgggctctaccaagtttggcccttggaagagaatctggaaaacctgggccccgtcgcgttgtaaattcttcttatggttggtgcaccataatcgggtttggaccgctgatcgtcttgagcgcagaaatctgccccatccagtgtcttgtccattttgtgaccagatgactgagacggtgcatcacttgttggttggatgtgtgtttgctcgccaaatttgggccctgatccttcaacagttggggctgctgcagttggctcctcagccctcagtgtctcgattctcaggttggtggaagagaactgttgctgctgttcctaaggggcttcgtagaggcctcaattctctaattacgttagtggcttgggagatttggaagcaccgcaacaggtgtgtctttgacaattcaagaccatgtgttgtggaagtgctaaaagctgttaatgtggagggggggctttggtgtttggctggagcttccaagctccaggaacttgtttttgggtcggtgcctactggagcttaattagctctgtaggttgtggtcgccttcttcattgatgtggcgcgacggttgtatttaagggaaggcgtgtgtgtgttggtgtttgtgtttcgggtcactcttgacctttgtacctcctttcttccttaaatgaaatgacgcgcagttctcctgcgctgttcgagaaaaaaaaaaacaggtaccaggggttgatcaccagcactcgatgatgcctcatcaccgcatatcacagatttgttttttctgcaaatatataaaaaatgatcaatagctaataaggtaatgccgtaacaaacaaccacagtaagtatagactgtctggagcctttgcatgccactaggtaccttcgtgctatttgagcaaactcatcatcttcatcctcttcaacttgagccttattatcatgtgtaattggtgtagatggctcaggatttggatcctctctctgtggttctctaatcggtgtctcaactggtaatggagaaccagaagcaatagcatcatgtcttgtgaggacactctgtaagcgatcatttaattctagtccttgctttagcaggtcttcatccctg

SEQ ID NO: 1796 - DNA, 1621 bp, Zea mays
gggatggcttcccgctgtatcggggtggccttgaggatgcccttcttcctcaacgccctcttcagctgctcgtccaggccaagttcatcgaagctcacctccacttcttcctcctcttcctccttcctctcctccctgctgcaggcggcagcttccgggatactatcctccccaacagcgctgactacttcctgcccagcctcctccgctgtatccatctcagtctcaggggtggctgttacggttacggccctaggctctagccggcggcggcggtgtgtgagggcgccgcaaagattgtggcagcggatgaagaggaaacgcgagtgcgcacgaggagaagaaaccctcaacctcaagtagtcaagtgggccgttctttgcggcggcggttgaagaggaaacgcgagcgcgcacgaggagaagaaaccctccacctcaagtgggccgagttttgcagctttccgattttgcccctgcatccaacggcggaaacagcgatacgaatatacttggattgaaggtttatggggaacccgacctgttctggtgttccgctctgccgagtcgatgagaaatagccgccgggttcacagttcacttgcagtcgcagtcgcagtcgcagttgctggttgctttgctccccacatttgtcgacggtcgccgtcgccggttcctcgtgcaacgcaccgcgctaacgatggccgagacggtgggcttcgcgagcggcgacgcggcggcgtggcgcgcagcgctggccgcgtacgaccgccgtctcgcggccctagacaaacccgacctcgtggccgtggactccttttaccgccacgacctgcccgcgctcctgcgctgccgtgacccggatcctttcctcgccaagcccgagctggtgcgcctcctccagtggaagctctctcgcggcaagtggagaccgaggctgatggatttcgtcaagggcttggacgacgccgtggtggagtcggcgtcgcgcaaggcgttcgcggctttgcccgacctcagaagggccatcaccgagcttaccgtgctcaagggagtcggacccgccactgcgtccgccgtgctcgctgcgtatgcacctgatgtcgcaccgttcatgtctgacgaggcgatggtagcagccttgggcaattcaaaggagtacactctgaagcagtaccttgcatttgctgataaattgcaggcaaaagcgaaggaactgagcataggagaagaaagtttcacaccctcagatgtcgagagagcactgtggagctcggcaattgcgtccaagtcaccaccaagcggtaacccaaagagggaatcaaagatgcatggcaagaggaaaagatgatttacaccgcgcttctttattgaggctaaaagggttttagtagctgcgggtcttagattcttagttgaacacttgtttttgtaacctgcggaatggaatcctttggtggagtataatttgaaatccttagttgaccaaaacactttatttcctacatgcctaccagtgaccctcgctacatgagctcggatgcatcgtgcatgtgtatttcaagactaatgcacccgttgttgctattgctgaaaatatgtgccggtctttttgaacacca

SEQ ID NO: 1797 - DNA, 186 bp, Zea mays
tcatgaagcataggaactaatgcacaccaagtcggcctcgatgttgctggcctccagctcatcctgcgcatcggagagccacactttgacctgcttcacctccacggtgaccgcgaacagcgccgcggcgaggtcatcggccaccttcttgctcctctccttgtcctgccttgttaatctaaattg

SEQ ID NO: 1798 - DNA, 1006 bp, Zea mays
gagcacgggtgcgccgtcgtgttcatggtgatgaccccgccggagttcatcaacccggcgcccaacgacatatgtacccatggccggtggctctaaatacaacccggcgctaggagaatcacacgagacccccgattcaatgtttgaatggtggtactaccttgcccacagcgcgacgcggcgccacggagccagggggctccaacaagcaattcccaacccgctgatgtataattacctcccccgcggttcactatccatgtgattggtagcccggttggctatgtgcaagctcagcgggtgcattgactatagccgtgcccgtgattggtctcctgcgcaggatgcgatgagcctgctcacgtgcatgcagcatagttaattttttcagctcccgtttacatgcgtggggacgatgggaggaggcgtctctgctgatccaggccggcgcgagcctagcgctcgcggtcagaggaaccaatcacgcggtatatttcaaggagtggtcaacgaagacgacagaagtggccatacctgcagcggtactgcgatggagccaatcccctgcgaggggcagagtcgaggtgacgccaagctccggttatcgattccgaccacgcccagccatgcaccaacttgcgtgacccgcaccggaggcgctacggctcccccaacccggtctttgaccacggcgcggtcccagcgaccctcttcctcactttcgctctttactggcttccgtgggagactccgggaggacgaatgggtgacgggggtgcccgaccaaggatataacctagggaggaagaaggggggaattcggcaacccatcgggtccagtagtcgtgaagattacgcgagagaggccccaaccatgcgaatccgtcacagacggcgtcaaactcggagtccgttgcgcgagcagcaagatgacaatagggggccaccagtcggcgtgcggtcacatgggtccagggagcaaccggccagtgagctcgtgaattag

SEQ ID NO: 1799 - DNA, 1446 bp, Zea mays
atgagactgaggctgaggcaggaggtgcggctgagggtggagatgaggctgaggcagctccagcaaggcgtccacctgtattcatcaaatgtaagcatgtttgatgcttgcccgtctttttgtagggagtggttggactactctttcaccggccagggtcgtcaaaagcaggtgaactctgtgttgagttcgctcctgaagtttcactaccctggactggtgaagacgtccgacgatgcagacgctgcgccggtcctcgtctcatgttgggacgattacaagctgaaggtcgatgtcacttatggcgatgcccaggggcttgttcgcgctgacttctgggcacgttttcggttggccgacggggatgacgcgaaccacgccgagaaggtgtttcaagtaaatgcctatcggttggtgaaggaggccctgtacgaggcaaggattcaggccacgtgcatgtattatcaacaaattttagggcaaaagatgaacaagaagacaggggcctcgagtatataccttcgcgaggaagagtatcgtaaggtggtggttccgtggatgtctaaccggccagaggcctacgcagcttggtgtggggtatgggcttctgaagccttccaacagaagtcaaaaagtcacagggacaatcgaggcaccatgccgaaccacaccttcggtggcgacaacttcacgcgaaaggcgaaacgcctggaagctcaattaggtcgcgagccgactcccatcgaggtgtgggaagctggccataggggaagcgacccttccaaccctttgtgcagccagacacaaagggagcgtctggcggcatatgcggaagagatgaaggaccgtcacggagaagactgcgattggaggaccatgccgatcgatgctcaagccgtgcataaatccggtggaggaaaggcacatggacgattctctctctttgatggaatgatcaacacgacggattttagagcgtctcggcggtcggcatccgggtccggaagctccggtcgtagctctcgtcggctcactgagcaagagcttgagatcgtgaggctgcgtgaggagaaccgtgagcgcgatgagcagttgagggctcaaactgagcagttgagggctcaaagtgagtactatgcctcagtccacgcgcagcaacaacagatgattcaattactagctcagcagcagggcattccgtatgtggcccctccgcctccgccgcaatggacgttcgtccctatgggccctcctccacctccgggacttgtgccgcagcagcctcagtttagcacaccgccggcacagctacctgcccctggcgcacaggacaatcaggaaggaagtggaacgatggatggcttcgtcaactccctattcgtgtacccaactccggacggaggcagcggccaaagctccaacaaccctagccgccgcggttcgtga

SEQ ID NO: 1800 - DNA, 1000 bp, Zea mays
gtcggaatcggaatacagctgctccagctcttcttcagtcccccaagcagtgatgagctgaggagccaggagtttgtcagtttcgcgcctaccaaccggtccagcctccgcgtccaagatctctccccctctcccatccactagtgtctcccacagcccgttcgatcccccggccgggtcggtggtcgccaaagtcgaggagcaatggcgaccgacgcgatcctggagacgatcaagccgcgggggagcgaggagcagctgccggtgaccacggcagggaccgggatcgagctgcggcggcgcatctcctccttctcggcgcgcgtgaggccgtcgtcctccgtggcggcgttccggcgcgcgcggtcgatgccctccgtcaaggcgctggcggcggcgggcgcgctgcggcggtggtgggagtgggggctcgggtgggtcacggcaccgttcgcgacccgcgcgctggagctcggcggcggcgacgacgacgacgacgacgacgacgaggcgcggccgctaggcctgggcgggtgccggtgcgccggcgggtggcggcacaccctcttcaggctccgcgccggggcgcgccgcctgctggggcgcgacggccgcccgctcaaggcccccgcgccgcaggacttcgggtacgactccgtcagctacaagcagaacttcgacgacggcgaggcgtgacgccgagccggcatcgatcgaggaggtgggggccatggcgctgtcgcttcgcttgccgcccgtacgtgatccagctcccgcaataaagctactgacgattttgattttgtggtgatgtatatggcatctatctatctatgtaagtatggcgattgtgtgcatgatatgacatcggtcggtctcggaaggaagatgatcgatcgatcgttgccgcgagttggagacccggaccatgaatggtcggtccgtgaacgggcatgtaacttgtgttcttctttcgttgtttcgggtcatcgtcattgtc

SEQ ID NO: 1801 - DNA, 911 bp, Zea mays
agcaaaagagccacaccgccaacgctcgtccgcccacccacccaccgtattacctcgatacgttacgaggtggcgccaaaaacgactgcggactgcagtacggcgcggcgtctcgtgattgatgggtgtaacgtaccagcggctgctctcgcaggggagccagagccagcgtccgcggggcggcggcgtgcgggcgcgggcgtgggtgctgctgcggtgggcggccgtgcggctgagctgcgcggcgaggcggcggtactggtgcggcggcgcaggccgcgcgcggaagctggcgtgggcggggctctgcggaagaggcggcacggcggcggaaaggaagggcggcagcggcaggaggagtgccacggcgggcggcggggccggggccggagccggagccggggtgctggggtacgactccgccagctacgcgcgcaacttcgatgacggtgcgtggaaggccgaggagggcgtgtcctgggccggccccggcggcgcgttcttccccggcgccaacatcggcggcgcggccgtggacaccgcccgcctgtgatgccgttcccagctccgtccgtccgctaggtaactggtaactgttgctgcgctggaaatggatggatcgtggtcgtggatgcgtcactcgggatttgctttcttttctttttttttcttgttcatctggattgttggcatttactttcttcggtcgacaatgaaagtattcaggccgtgcttgttcgggtgcaaaaaacaaaaaaaccttgctgccatgcgaatggaaactgccttgagtatctccgcacctagatgtatatacagtatacggtatacatatgtacgtatttatgtgtatacggctagcaagctgtccaaaacacaacgcacaataatccagatcagactggagaaga

SEQ ID NO: 1802 - DNA, 2253 bp, Zea mays
atggccggagtgccatcgtcgctagcgcgcctctacttcctcctcctcccgctagccaccggatgcctcctcctgctgtctgctgaagccgcgcggctcccgctgtccctcgctcccgccgacgccgcggccgacgcgctcctcaggctcaaggctggcatcaacgacagcggcggcgctctcggcagctggtcccccgacacgagcccctgcggcgacggagacggcgggggggccagctggaagggcgtcatgtgcaacagggacggcgtgcacggcctgcagctcgaggggatgggcctctccggcgtgctcgacctgcgcgccctcacgagcctgcccggccccggcctccgcacgctgagcttcatggacaacgatttcgccggcccgttgcccgacgtcaaggcgctgagcggcctccgcgctctttttctgtccgggaacaagttttccggcgtgatccccgccgatgcgttcgccgggatgggctcgctaaagaaggtggtcctctccaataatgacttcaccggccccatcccggcgtcgctcgccgacgcgccccggctcctcgagctgcagctcaatggcaacaagtttcaggggaagatccctgacctgaaacaggacgagctgacggcagtcaacctcgcaaacaatgagctcgagggggagatcccgccgagcctcaaattcacgccgcctgacatgtttgccggcaacaccaagctttgcggcccaccgcttggtgtcaaatgcgaggcccctccgccgccgtcagcgtcgccgtcgccatcaccgccgccgtcaccgaagacaccgcctccagcctccgtcaaagaaggcaccacgccatcccaaccagcagcagacaccgtggcgtccacaggcgcgtcgtcagctgacgatgcgaagcaagacgagggccataagcccgtcgagggctccacctccacgtcgttcggcgtcctcgccgcattcattggcacgcttgggatcgccggcgtggcgttcgtcgcgctgcggaggcgacgggggtacaagaccaagaacttcggcccgaccgcgtcgtcggctcggccctcggatccgccgagggtcgagccgcacccgccggcggcgaaggccgaagccagcgcggcgcaggcgccccctgccgccgccgggtgcgtggcgcgcgctggcggcgcggcgcggaaggtggagcaggggcggctgacgttcgtgcgcgacgaccgcggccggttcttcgagttgcaggacctgctcaaggccacggcggaggtgctcggcaccgccaacctcggcgtgtgctactgcgccacgctcacgacgggccactctgtcgtggtgaagcggttcaaggagatgaaccgggtgggcaaggaggacttcgaggagcacatgcggcggctgggccggctcagccaccccaacctcctcccgctcgtcgcctactactaccgcaaggaggagaagctgctcatccacgactacgtccccaaccggagcttggcgaacctcctccatggcggcggcgacgagcgcgggatgaagaaggcggcgctgcattgggcggcgcggctgaagatcgtcaagggcgtggcgcgggcgctcagctacctgtacgacgagctgtgcatgctcacggtgccgcacggccacctcaagtcgtccaacatcctgctcgacggccactacgagccgctgctgacggactacgcgctggtgcctgtgatgaaccagtcgcacgccgcgcagctcatggtggccttcaagtccccggagcggaagcagttcggccgctcgtccaagaagagcgatgtctggtgcctcggcctgctcatcctcgagatgctcaccgggaagccgccgacctacgacctgcccaaggcggcgggggcggtgccgtcggccgaatcgttgtcgtcaccgcagaagccgggtccggcggcgggcaacggcacggacctggtgaccgtcgtggggtcgacgccggagggcgagtggctggacaccgtggtggacccggacctgaggggcgaggaggaggaggacaaggaggagatggtgaagctgataagggtcggcatggcgtgctgcgagagtaacgtggacagccggtgggagctcaagaccgccatcgacaagatcgaggagctcaaggcgaaggagcgccccgcccccgacgaggagcaggccttctactcgacggtgaacaacgaggacttcaacgacgttgccatcaactga

SEQ ID NO: 1803 - DNA, 2440 bp, Zea mays
acgtcctgtctcacctgtcatacgcggttacgtccccttcgccccccgtttgggctccagaagcttccccttccgtctccatatcttcttcttggtccgccgtctccactccgcgttccctggctccctgcgttgcgtcttgggggagagagagaagtgggagacccgcgagaggctgccgtgtagggactagggaccgtagagtaagcgacagcgaaggagggagagggggatggccgggatcgggccgatcaggcaggactgggagccggtggttgtgcggaagaaggcacccaccgccgctgccaagaaggatgagaaggccgtcaacgccgcgcgccgctccggcgcggagatcgagaccatgaagaagttcaacgctggtatgaacaaggcggcgtccagcggcacatccctcaacaccaagcgcctcgacgacgacacagagaacctcgcccgtgagcaatcatctgtctcgggccatttttcccatgaacaatctgatcgacgtttttttgtgcctaggatcccaatagataaattcgggcacttgtccaccgttgatgtgataaatgatttatatatgttcatgttcacatctctcgctgttgatgatgttttcttttaagatggattctatacctagtgctttaaggctctcactttattagtaacactagccaaaatttctcttcttaggatttagatgggaaagtaatatctcttgtttgcacaattgttaaattatcatcgtgcatccattgtttctttgtttctggccatttcgttatggcaaatcatggatgttttataaaatgatgctttcttggttggccacttgtttgaaagtctgtggataagttttgtatcctatgacattgatttacttgggggagtaagtttgaaatattgcagtgtttgtgtctataacaatttgcttgttgcatcaatcaaccttgataacatttggtactttcaaccaactagccatttgcacaccatcatataatatatttgtttatgttagctgatgagtttccacagacttaattactaagtgggcactgggcatgccttgaacaactatcttggtgaattcattgaggctttagtggcattatatttgttgtataagcatcttgtatgagattctctttggcttgtttagtgcacatgataattacagtatatgaatctgatgtgaagtctgtccatcctctccaacggtgtgcatagcatgattcactggaatatatacagcagataaaaaacatgccgcatttgcgcgctgtgtaccttgaccaagtaaaaatgggtgctgctgaaccatggtcctttgtccattagtgtgcaaaaaaagcacccttggttcacaatggttattgcctctaatttcatttactctagtgtgggtgcttgcttcacaatggttattccctatgcttttatctatgatgctggtgttggagctataaagacgttactggccaggacaaggtgcaatattttgatgatcaccttgttatgcctgtaccatgtagtccaatgctaatgaccatggtctcattttagtcgcaaggatataaaaatttactacagattagatttggtttttctacaaggatttcaaaattgtcgaactattgaacctgaacatgagttgagtcatgcagaagattgccctaagctttctgcatgatatccttttcatgatagtaataacttgggctctcctcacttatgctagatgagcgagttccaagtgacctgaagaaaaatctcatgcaagcaaggctcgataagaagttgacccaggcacagcttgctcagatgatcaatgagaagccacaggtgatccaggagtatgagtcaggcaaggcaattcccaaccagcagatcattggcaagctcgagagggccctgggaacgaagctgcgtggcaagaaataaccaggagcatcatagcgaagacaaggcaaactgtctgcttattatttgctatgtttggtatctcaagtcatgcggactgtttgtgttggtacaagagtgaattaactgtgttctcctgaatgcttgctgcttgtcatatgagtatatgatctagctctaaaaaaattgtgatgaagatgtcaactgatatgacaacctcataaccagcgtgatcaagatgatgctcattactgcagtttggcactgacctctgtcaccggtaatatttttctactagtacatttagtgggtgtttgtttgggattatattctacccagattatataatcccaaacaaacacccccttagcctcatatgttgacgagcgtcgcatagcatagcagttatgaagctcaaattactgatattgtaatttgacgggactacgatctgtgtatccatgttaagctatctctagcagcttatctttactactctataagagagcaa

SEQ ID NO: 1804 - DNA, 1095 bp, Zea mays
cacgccacactcgcctcgtgccctcgtcctcacacagtcacagtcctcccccggcagcggctctccgctgccaaccaactccaccaacaccccccacaacagcaggagaaaaaaagggacgagccatggccatggactcttcctcctccggctccgagcccacgtcctcgtcctctgctgaggctcctgcgtccccaaccgcgtcgtcctccgaatcctccgccgcgggcagcaagaagcggcggcgcagcaaggacgggcaccacccgacgtaccgcggcgtgcgcatgcgggcctggggcaagtgggtgtcggagatccgggagccgcgcaagaagtcgcgcatctggctcggcaccttcgccaccgccgagatggcggcgcgcgcccacgacgtagccgcgctggcgatcaagggccgcgccgcgcacctcaacttcccggagctcgcgaacgatctgccccgcccggccaccgccgcgcccaaggacgtccaggccgccgccgcgctcgccgcggccgcggacttccaggcgcccgccaatgcagccgccgccacggaccccgacgacggcccggccgccgccgccgactccgcgtccgcctcgccgccgccgccgccgccacagctggacaaccccgacgacgctctgttcgacctccccgacctcctcctcgacctcagacacggggcctcgtcgtgccagctctcgtgcgcgccgtcgtggtacgacgacgcgtgcttctccggcgccggcgccggcgccggcgcgttgttccgcctggaggagccgctgctgtgggagtactgagtgcagtgaaatagactgttttgctcagtcgacgagaatcaagcgcggcttcgagctgctgctgcttggtgtgtggccatctacggcctagctatgggctgtaattgcggcggtggaccagagcgcaatcgatgtaaaccatggagcagcgttggagttggaccagctggaatggaaccaaattagagccatttctcctttgcgtctgctcctacagatttagaaagcaaaccacatgtataaaagaaaaatcattcgtcgaccccggccagcacgttccttt

SEQ ID NO: 1805 - DNA, 3364 bp, Zea mays
ccattcctggccttccccttcctccctgttcggcttgctcgtccagtccacccacgataagccaagtcatccaccccactccctgcctaccaggagccaagtcatccaccccctcccccgacgaggcaggcagggacagggcaccacgccattctcgcgcgaggagagggcacaggaaagaaaaagaaaaaaatcacctccttcaacctctccccctcctccaccgaaatcatcctccagaatctcccgatctttactccgcccaaagatcctatacacgcgcggctatttgtagcgtctgccctgccctgcccggcctcgtggaaaggcgctccgctcttggctctccccacctgcgggcgggggctgttggttcgggggggaggcagtcaaatccgcctgcggctgaatcgggggagagggcccgcatggcggaggaggacaggcagcggcggtggcggcggcggcggttcgcgaacctgcgcagcgtccggtggcggatcgatctcggcatcctgccggcgtcgcccggggcctccgtcgacgagctccgccgcgccgccgcggattcgcggaggaggtatgttagtttgaggcgccgccttatggtagacccgcatcttccaaaggaggaggacagatcatccaaccttgttgttgacaacccgctctctcagaacccagatagcagctggggccgcttctttagaggggctgagttggagaagacagttgaccaagacctgtctcgattatatccagaagatggtagttactttcaaacgcctagttgccaggccatgctcaggagaatactgttgatgtggtgccttcagcacccagagtgtggatatcgccaaggaatgcacgaactactagctcctctagtgtatgttcttcaagttgacattgataaactatctcaagtaaggaagctccatgaggattgcttcaatgatgattttgatggagtggctttcccagatacagatatgcttttcagttataaacctagaaaggactcaaactggcattccagggctgacaatggcgatgattctgaaagcgcttccagagttaacactcttgatgagcttgacctggatacgaaggaaataatttcacttagtgatgcatatggagccgagggtgaactaggcattgtattgtctgaaaggttcatggaacatgatgcttattcaatgtttgatggtttgatggacggaggtagtggagtggtctgcatggcagagtttttctctacatccaaggttggatctagctcaagtctagcacctgtcattgaagcctcagcatctttatttcatttgctttccattgttgagccatctcttcatagccatttcattgagctggatgtagaaccgcagtatttcgctcttcgttggctgcgagtcttgtttggacgagagttctgcctcgacgatcttttagttgtatgggatgaagtttttgcttgctccaatgatatgctacttagagaaaatgaagaatgcaactttaagatattgtgctcatctagaggggcattcatcgcagccatggcggtctctatgattcttcaccttagatcatctctactagccactgaaatcaatacgttatgtcttcagaggttattgaattttccaaacaacgttgatgtgcataagttaattgagaaagctaaatctctacagtctactgctattgatgcgaatacattatccccatctcttttatcaaagaaggatagctgtgattatgatagagtttatagtaatcttgctacttcaactcctccaaggactccgttgcatccattagctgagagttactgggaagagcagtggagaaacctgcataatgacggaactgctcttaaggagagtgataataagggtctttcttataagagatcattaaagcaatctttgagtcagaggcttggtttatctaggacagagtcagatccttctccagttaaggtagtcagtgtgaataatgacgcgaggaattcagtgagacggtgtcttctaaactcttattcagataaagtagtacaatccaatgaagttattggaaaatttgagcaagataaatttcctatcgtgtcgattcacaaggagactattttgagttctgaaaggtcttcacagctaaagctaaaggcggctagtgagaatttaacagtaagtccaccaccaagtgtggcgaagttcaatccacttatagattcaccggtgaagcctgctgacgagagttcagcgaaaaggacagaagattgttccagtggtgaaaattctccagtgttttatacagctagggctggtaatgaacatgagaattgtcatgataatgattccgagaagagcagtattacttcaaattcatgcgccggtgatgattatagagacgaagtcttgccagacgagtcgtccagctgtaactgcgaggataaaaccgtctcagaagcaatagagtctggagcaaatgtaggtcaaactagacccttggagaaaaccatggtacctaatgaaagaaagccatttattaacaagctgcagtggctgttgaggtttggcagaccatcagctgaaggcaatgtggtggagaagggcagtggtcaggcatcatcggatggtaaacatgacgcggttcctccctgcccttcacctgctgatgcgagttcagataactcttgcagcggcataaatttggcttatggcgataataagaaggtgatgggcacgctgaagaatatcgggcagaacatgctcgaaaacatccaggtgatcgaaacggcgttccagcaggaccgcgcgcagcccagcgccatggagaacttgtcgaacaacatcctgggaggcaaagggcaggtcaccgcgatggctgccctgacagagctccgcaagatcagcaacctgctgcgcgagatgtgacccatccaaggcgtgtgcaggctcctcctcccccattctcaccccccccccccccccccccccacaaatcattagctcctcagaatcagataagcaaggcctccgtagttgaagcccaggcacctagccaccccccaaaccccccttgtatatatagaccccattcgattattccattgagcctctgctcggcaggtatgctaaggctctcgttctttttctttctttcttgtaactaaggattggtcagctgctgtcaactgagttgcgggaggtgagggagtaaaaaactctcttgtctcctgcgttaggagcaactttttgatggaacaattttggacgcgaaaatgtctctcgaggttcagtaaataaatggaataagctatgtcgaaagcgcgtatctgttttttttaatctctatt

SEQ ID NO: 1806 - DNA, 2196 bp, Zea mays
cagcatctcgctggcctacaggtgggcccaaaggtacctctctctcccgctcttccccgcttgcgactggcggagtccaaactccaaaccaaaccggcgcttctcccacgtcttctcgagttcccacgcgcccgcctgctataaatcgcatccctcaatccccactctttatcccctcctcagccatcgcctccctctcccctcaacccagcgcccccctcccgccgccgctagggtttctcctccctccccgcccacccctaaatcatttccgaagcttccagtgcgccgcagccatgagcgacggcaaggactccctcgacctctccgccctcggcgctgccatccccaactcggccgagctcagcgcggaggacaaggctaaccttgtggcgtcgatcaagaacacgctcgagggattggcgtcgcggcataccgacgtgctcgagagcctcgagcccaaggtcaggaagcgcgtcgagaagctcagggagatccagggcgaacacgacgaacttgaggcaaaatttttcgaggagagagctgctctagaagctaagtatcagaagttgtatgaaccactttactcaaagcgttacgaaattgtcaatggtgtggtcgaggttgagggtatcacagtagaaagtgcagctgaaacccctgcggagcaaaagactggagatgagacctctgctgatcaaaaagaagaaaaaggtgtaccagctttctggcttaatgcaatgaagaatcatgaaattctagctgaggagatccaggagagggacgaggaagctctcaagtacctcaagaacatcacgtggtataggatcagcgagccgaagggctttaagcttgaatttcaatttggtacaaatccgttcttcaagaattcagtgcttacaaaaacatatcacatgattgatgaggatgaaccaattttggagaaagccattggtactgaaattgaatggtaccctgggaagtgcttgacacaaaaggtgctaaaaaagaagccacggaagggttcaaagaacactaaacctatcacaaaaactgaagattgtgagagcttcttcaacttcttcagtccacctcaagtccctgatgatgatgaggaaattgatgaggatatagctgaacagttgcagaacgaaatggaacaagattatgatattggatctaccatcagagacaagattatcccacatgctgtctcgtggttcactggagaggctgctcaagatgaggagtttgaagttatggatggtgaggatgacgatgatgaagacaatgatgatgaagacgaagatgacgaggatgatgatgatgatgatgattacgattcaaagaagaccaagggaactgccggaggggaagggcagcagggcgaacgacctgcagagtgcaagcagcagtgaggtgctgcacaatgaatgttggcaggcattgtttgtggagcaattagtttggttctgcttgatgctcaaggtcattgagttggtttgtggaaccttcgagggggcgcttgttggttttatggaattggttggggaatttttctgggacatggcgttatatcattatatgtgggtagtttcttcactttctgtattgggtttcagatattatatgtgttcttatgcttggagtgaagatggttgccactctggtatgtcttattgtgcataccactggcatagtgtgctgtctgtactttcatcaagcgtgccgtgccgctgagaaattttgctctaggggaaaggctagccttttgcctgaaaatgttttgcgaattgcatcttgcatacgggtcttgaattttgtctgttgttttacaatcaggagatatgctgcccagtgagcgcgctaggcctcatgggggtaactgcgtgaagattttatttttgtaccgctctagcgttccagactccatttcagaagttccggaattcatcttggtctttagaaataaagaaagcagatttgtgaactttaacgccagccaccgttactactgctcccagccgacgttccaggggccactcaggaaggaacagacggctcctggtctacagggttgtctccacttctctattgaggcgtctgggtcctacagggttgtctccacttctctattgaggcgtctgggtcctgtaccggcatctactcctttttcctgtacatgtataaatatca

SEQ ID NO: 1807 - DNA, 1765 bp, Zea mays
cgtcgccattatatagccgccctcctcccgggccgatctcttcgtctcaatcccacgccacatcctcccctccttcctccttgggttcccagcccgtgcgcccgcctgtcgcagtcgcaccgcagccgccggccatggcctgcctcaccgacctcgtcaacctcaacctctcggacaccacagagaagatcatcgccgagtacatatggatcggtggatctggcatggatctcaggagcaaagccaggaccctcccgggcccggtgaccgatcccagcaagctgcccaagtggaactacgacggctccagcaccggccaggcccccggcgaggacagcgaggtcatcctgtacccgcaggccatcttcaaggacccattcaggaggggcaacaacatccttgtcatgtgcgattgctacaccccagctggcgagccaattcccaccaacaagaggtacagcgccgccaagatcttcagcagccttgaggtcgctgccgaggagccctggtatggtatcgagcaggagtacaccctccttcagaaggacaccaactggcccctcgggtggcctattggcggcttccctggccctcagggtccttactactgtggaatcggcgcggagaaatcgttcgggcgtgacatagtcgacgcccactacaaggcctgcctgtacgcaggcatcaacatcagtggcatcaacggggaggtcatgccggggcagtgggagttccaggtcggaccgtccgtcggcatctcttcgggcgatcaggtgtgggttgctcgctacattcttgaggtacgacgccacgtctttctctgggctagaacatttgtaggacgacgccgtctcgtcttgtcttgtccaagcatgtgtgatttgtgcgctgcattttttttttgtttacagaggatcaccgagatcgccggcgtggtggtgacgttcgacccgaagccgatcccgggcgactggaacggcgcgggcgcccacaccaactacagcaccgagtccatgaggaaggagggcgggtacgaggtgatcaaggcggccatcgagaagctgaagctgcggcacaaggagcacatcgcggcctacggcgagggcaacgagcgccggctcaccggcaggcacgagaccgccgacatcaacaccttcagctggggagtcgccaaccgtggcgcgtcggtgcgcgtgggccgcgagacggagcagaacggcaagggctacttcgaggaccgccggccggcgtccaacatggacccctacgtggtcacctccatgatcgccgagaccaccatcgtctggaagccctgaggcaccccgtggccgtgtcgtgtcggtttgctccgcgtacggcgctggccgttgcatcgcagggcccagcggttgcgcaactattttcccttccccgttctgtttgcttgtactactactctaccgctagtcctgcatagcattttagctagaacacaacaacagccaaaaaaaagtattgttgcttgcttcgacgcttgccaccacttccattccatgccgtccgtccgcttccttcctgtgtaatcctcctccaataatagacgtgccatgttgcatcctctattcctctgcattgtataaaagtggtgtaattcttttgctacgcctccaatgtctgtggcttttagctgctgatgcgatgtcagattctgtcacggacgattcgtttcttttccttccgataattcagcgccgccggtcatctgacactgacatgttcttccgtc

SEQ ID NO: 1808 - DNA, 1465 bp, Zea mays
gcgcggcagaatccgatggcgcgcgctcgccattggccggcgcgctatccgtcctaccgccgcggagatttcccgcggccgcggccgccctgtgccgcggcgcggctattattattaatctgacgtcctgctgctgttccctccaatccaacgaactgaccacaaccacctaagctaaaagctaaccaccagacccccggccatggcgctcgcgcccacttccgctgccgtgctcaagaccccgttcctcggggccaggcgcgcgctcgccaatgccgccgccaagcccgcgcctcgccgcgcgctggtcgtcgccgccgcggccgccgccaagaagtcgtggatcccggccatcaagagcgacgccgagatcgtgaacccgccctggctcgacggctcgctccccggcgacttcgggttcgacccgctggggctgggcaaggacccggcgttcctcaagtggtaccgggaggcggagctgatccacgggcggtgggcgatggcggccgtgctgggcatcttcgtggggcaggcgtggagcggcatcccgtggttcgaggccggcgcggacccgagcgccatcgcgcccttctccttcgggtcgctgctgggcacgcagctgctgctgatggggtgggtggagtcgaagcggtgggtggacttcttcaacccggactcccaggccgtggagtgggccacgccatggtcccgcaccgccgagaacttcgctaacttcaccggcgagcagggctacccgggcggcaagttcttcgacccgctcggcctcgccggcaccgtcaaggacggcgtctacatccccgacgtcgacaagctcgagcggctcaagctggccgagatcaagcacgcccgcatcgccatgcttgccatgctcgccttctacttcgaggctgggcagggcaagacgccgctcggcgcgctcggcctatgatttgcatgctgccggcgaccgagtcagttatcgattgcgcggggtgggtgagctcctagggacgtacggctgcaggggatcagacgccttgcctcgcagattggaggcgaaagaagagcgtagcagcaatctactgtctgtgttggtggtttagcgtgcgtgaaccagatggggtgttcctctctgttttttctttctttcttttctgtgtatgtatcaaatgtatgtaccatgtaatgtatagtatggatcgatttcattgcattaattccgactggactggcagatatatattgactattgagagagtgggatgtgttagctgcactgcacttgtaggatgcttgagtggttgactgaggtcttggcatcgcttcttcctttctaaactagtttgttcgcaaaggagataagagcagtcgcatgtcaatttctttttattccactcagatgctctagagctttaggattttctcagaagtggaggaattggatcgccacaattttgagctcttc

SEQ ID NO: 1809 - DNA, 6388 bp, Zea mays
tgaagaaagagagctgttcgtccaccggggacacagacacagttgctggcagttgaccttgcaacctccacgcggatgacagcaccgtactacacgaatctccaacaggcccgcgaccgcgaggcatccccgtcctggcgtccggaatctcagctggggtccgaccgtccacgtgggacaagaccccccgctttgaatgcggcatccctcgtctaattaccttctgattcgagctcaaggccccgacgcaatctccgctgcctccctgatctgtggccccgagacggtaggaaccacctgtcagcctgtactggctaccacgacgcgccaccgactgtttggtgacccatttcttgcgcgagcagagtcgctaatcgatttccatcctccaactaatctcacaccaatcgggtaattagcgaatatatatatatccatatttactagacaagccccccgggtccccagatccgtccacccccacgctccgatccagcccgtccagttcgacgcgaagcggatcgtagccgtccgaatccgaggggtggacccgtgaattccgggaaggacgaggggtagttggctaccggttaaaacgcccgtgccagtggcccccgtcttcctcctctcctacgcgggcggggaagccaaggaagaagaagtagtagttcgctggaggagttggggcctcgtcctcggatccagagcgcggaaacccgtgcgcgcgtccggatcgacccgctcgctcgacggccgcgggcgcgaggctagggatcaggatcggcggcggcggcggcgatggggaagtccgtggtggtgggcgcggcggtcgtggcgtgcgcggcggtgggggtggcggcggtgctggtgcaccgccggcgcaagcgcgacgccgcgctcctggggtccgcggaggcggagaggaggcggcgcgcggccgcggtgatcgaggaggtggagcgcagcctcgccacgcccacggcgctgctgcggggcatcgcggacgccatggtcgccgagatggagcgcggcctgcgcggggacatccacgcgcagctcaagatgctcattagctacgtcgacaatctccccaccggagatgaacatgggctgttttatgcactggatcttggagggaccaacttccgtgtgctgcgagtccaactaggaggaagggagaaacgtgttgtcaaacaacagtacgaggaggtttccattccaccgcatttgatggtcgggacttccattgaactatttgatttcattgctgctgcattggctaaatttgttgatactgaaggtgaagatttccacctcccagagggtaggcagagagaacttggtttcacgttttccttcccagtgaaccaaacatcaatatcatcaggaacactcatcaagtggacaaagggcttttccatcaatggcacggttggtgaagatgttgtttctgagttgagcagggccatggagaggcagggactagatatgaaagttacggcattggtcaatgatacagttggcacattggctggtgggagatatatggataacgatgtagttgcagccgtaatattgggcactggtacaaatgcagcatatgtggagcatgcaaatgcaattcctaaatggactgggttactgcctaaatctggaaacatggtaattaatacggaatggggaagctttaaatccggcaagcttcctctctcagaatacgacaaagccatggactttgaaagtttgaaccctggagagcagatatacgaaaaaatgatttctggcatgtatctgggagagattgttcgaagaattttactcaagttggcacatgacgcttctctatttggagatgttgttccaactaagctggagcagccatttatattgaggacgccagatatgtcagccatgcatcatgactcttcgcatgacctcaaaactcttggatctaaactgaaggatatagttggggtcgcagatacttccctggaagtaagatacattacccgtcacatctgtgaccttgtcgcagagcgtggagcacgcttggctgccgcaggtatatatagcatcctgaagaagataggccgggacaaagtaccaagcagtggcagtaaaatgccaaggactgtaattgccttggatggtgggctctatgagcattacaagaagttcagcagctgcgtcgaagcaactcttacagacttgctcggcgaagaggcctcttcctccgtggttgccaagctggccaacgatggctctggcattggagctgctctccttgcagcctcacactcccagtatggcgagagtgactagtcttgaaaactggtgtggatcgaacttcgagtgtagctctcatttttatctttttttcccttcaaaacatccctaatattctggctctcctcggggaatttttcggcttcctttcttggctattctgtggatgcacttaaggctctgcagcgggatatagctagtatagagccaatcagtttggaggttatctaatggcataaggtttggacggcaggaacatagaaatggaagctgaacaatgccattcatgttctgcccagtttttcttctccttgtatggtgttgtaaaccaatcaaaacttttaacctttttgtgttggcaataaagaggaggcacgataatttgaccatgtgttctcttcactgcttcgtcaaatatatgattggatttagttttatagtttcgctgttacagtacataaaaacctatattacggggtggcactgtccatcagtgttgttgtaatgagctgtgatgactatcctttgctctggcaaagagcgtgcacaagcacatggcgtcctatatgctaggttctggcctcaggtggtcagggttcccatagccattgctcattctgcttttcttcagacattgcagtcgaaaccgcccttcccatcgtcgtcgatcacttcggcatcggagagttgtttccggcggctacctccatgcacctgcagcagcggagcggcgtcgtagtcggcgaccttctcgtcgaaggtcctctggtgcgcctgctcgcaccgctgcagtatctgaagcacacccttcatcgtcggccgcgaggacggctggcgaccggtgcatataatgccgagcttgaagacggcctcgacttggtcaccgtaaccggcgtccgcgatggacttgtctgcggcctcggcgatgcttttaccggactgcaggtgccgccacgcccagtcggccagggagccgtgctcaccgccgtcgttggctaatctaccggtggtcagctccaagagaacgaccccgaagctgtacacgtcgaccttctcgttcaccttcctcgtgtacacggactctgcgcaaaggaacgtgacgatcagaaaacgtaagctgacgtgtcactggaactggcgttcaggatcccggcagaaagacgagacacgtaccgggagccatgtagccgaacgatccggcgacggcggtcatcgtgtcggtcgtgccggcctggaccaacatccgggcgagcccgaaatcggcgaccttggcattgagctccgagtcgagcaagatgttgctggacttgacgtcgcggtgcacgatgggcggcgagcactcatgatgcatgtagtacagcccgcgcgcggcgccgacggccaccttgaccctcgtcggccagtccagcggctcacgccggaccgacggggccctgaccatggcagtcccggtcccggccagcctgctgtggccgtgcagccactggtccaggctgccgttgcccatgaactcgtagacgagtagcttggtctccgcgcgggagaggcagcagaggagcttcacgatgttgctgtgccggatgtggccgaggatgtccacctccgacgcgaactcgcgctccagcttcttgtccagactcccgccggcccagatgcgcttcacggccacggtgcccgccgcttcgccgctgctccggctggtgtacgtgacgcggtacacgcgccccgagccgcccttgccgatgaggttctcgtcggcgagcccgcgcagcacggaggcctcgccgaagtccacgggctggaaagcggtgagcttccagggctcctcagccagcgcgagccgccgcttccgcctcctgatgtcgcggacgacgaagacggcgagcgccgcgatgaggacgacgagcgcggcgcccgcggcgaggaggcccgcacggagacgcggcgagacatggtcggttgacggggccgcgcacgagcgcatgcccgacaccggcggggcggtgcagaggcctggattgcccatgaagctttggtcgtaggtacgggcgagcgcatcgggaacctcgccggtgagctggttggaggacagattaagctggttgaccctcagcgttcccagcgccggcggtatggcgccggaaagctggtttgacgaaaggtccagcagggtgagctccggcatcgagcctaaccccgccggtatgccgccggtgagctggttatggcttaagttcatctgcgacatgccactgagcgacgcaatgctctgtgggattgccccagacagctggttcgccgacaggtccagctcctgcagaaggggcatcgcagcggtgaaccccggtggtatgtcgccggagaacaagttgttgctggcgtggaaccgcttgagattagtagccgatgcaggaatcggtccggtgaactggttgttgtcgatgctaagcctcgacaggttccagtacagcttctccggcaggctcccgcccaaccgtccattgttctccaacgacacggtcagaagcttcggcaccgtccatagagcggccggcacctcgccggacagctggttacctccgaggaacaaccatatgagactcgagcagttggcaagaccggtcggtattgagccgttcaagcggttaccgggggcggtgagcacccacagctggttgtgctcacagatccccgccggtattggcccggaaaagttgttgtcgtcgatctggatatctctcagcaccggcgtctcctttccgagccccggcgggagctctccgctgaggctgttgctccacagccacaagtataccaaggacggtagctgggctatgcttgccggtatctcgccgacgagattgttgtcgtgcaaaatgaggagccttagcttcgtcaagcttccgaagcttcctgggatggtcccagtcagcatgttctcggacaggtcaacctctaccaaacctgccgctcctatcgtcccgttgttgatgacgatgtcgccggagaggttgttggtgtacaggtacagattcgtcagcttctggaggttccatatcccggacggtatgtttccggtgagtccattcatggacaggtcgagccactccatctccgccagctccgcgacatagctcgggatctcgccggtgaggttgcacttggccagccagacggtcgttagcttggtcaagttcttgaacgactccggcagcgtgccggcactgaagggagtcctctcgagcttgagcgtccgaaggttaaccagctggccgagctccggcgggatggtgccggtgagctggcttccgccgagagcgaggtacgtgaggttggtgagcctggacaccgccgccggtatcgcgccggtgaagttgttgtggtccagggcgaggtaggtcaggttggcgccgagccggtcgatgtcggccgggaggtccccggcgagctggttgtgggagaggtcgaggcgcgcgatggcggcgcagttgtagagggacgcagggaagccgccgccgacgctggtgttggacaggtcgagcaccgtgagggccgtgagcccgccgatggcgtcggggatggtgcggccggccagcgtgacgttggtgaggttgagcgagctgacccgcccggccccgtcgcagagcacgtaggcccagctgcactgcgcgagcggcgccgccgcggtcgcgttgctccacgacgcgagcggcgccgggtcgccccacgcgctcttgatctgcagcagcagccgcgcctcggcgtcctgcgccgcggcctggcgcgggaggcacgccagcagcagggcgagccagacgcaggcgcacagcaggggctggacgcgtagaacggttgttggcgacgtgcgtggcttttcggggtggctccggctccgcgtgattttttccgccgacggccggcgcgggggcgcgcgcgtgccgtttactcggcgggcgcggtggtggcctgccatcgcggaccgcgtggtgtgaactgtgaaccctggagcgtgcgcggggacacacttatatgtactggtcagtgggaacgtgacttgggacggtgacgcccagccttttgcattgtcccgttaattattggc

SEQ ID NO: 1810 - DNA, 3257 bp, Zea mays
aacagggttcacacactcattgaaaatttgctaacttctgcataagtttgtagcagcctctgaaacatttcaaccaaaatgaagatagcttttctcatgtcgttggttctgtccctgtttctcctccctaatgggatctgcaaaagcttagttgcaaggccttcggtcgtgaatattgggtctatacttcggttgaactccaccattggaggtgtttcagatgttgccatccgtgcagcagtggaggatatcaactcagatccaacagttctaaatggaacaacgttacatgttgaaacgagagatacaaactgtaatgacggttttcttggcatggttcaagctttgcagttcatggagactgatgttattgcaatcattgggccacaatgctctgctattgcacatatcatttcatatgtcgcaaatgagctccaagttcctttgatgtcctttgcatcagatgcaactctatcatcaattcagttcccattcttcgtgcggactatgcccagcgatctctaccaaatggcagctgtggctgcagttgttgattactatcaatggaagatagtgactgccatatacgttgatgatgattatggtcgaaacggcattgctgctttggatgatgaacttactgcaaggcgctgcaaaatttcgtacaagactgggttccgttccaatgctaaaaaaagtgagcttctaagtctattggttactgttagtaatatggagtctcgtgttattattcttcatactggttcggaacctggactcaagcttctgtcacttgctaatggactaaacatgatgggcaatggctatgtatggattgcgactgattggctttctgcttatctcgatgctaattcatcggtctctgctgaaactgtaaatggcatgcaaggtgttctgactgtacgtccacacacccctaagtcaaatatgaagagaaatctggtgtccaagtggagcagcttaagcaagaaatacaaccacagtgatcttcgcaccagtgcttatggtttttatgtttatgatagtgtgtggactgtagctcgggccctggatgccttctttgatgatggtgggaggatttcctttacaaatgactcaaggttgcgtgacgtaaccgggggaactcttcaccttgaagccatgagtgtttttgacatgggaaacaaattattggataagatcagaaatgtgaacttcgctggggtgtctggccaagtgcaatttaatgctcagtttgaactcattcatcctgcctatgatatcataagcataattgggaatggcatgcggaccattggtttttggtcaaactatacaagattgctatcaaccacccctccagaagacctatattcgaagcctcctaatacttctcttgccaatcaacagctctatgatgtcatttggcctggtgagactgcacaaaagcctcgaggttgggcctttccttacaatgccaaggagttaaaaattggtgtccctaacagatttagctttaaagagtttgttagcaaagataatggtactgggtcaatgaagggctattgcatcgatgtcttcacccaagcattgacactgcttccttatccagttacatacaggtttataccttttggcaatggtactgaaaaccctcactttgaccaacttgcacagatggttgcggacaacgattttgatgcagcgataggggatatcgaaattacaatgagccgaactaaaattgttgatttcacccagcccttcattgagtcaggcctggttatcttggctccaatcaaaaagcacataacaaattcttgggcattcttgcagccatttacattggggatgtggtgtgttacagggttgtcttttcttgttgtgggtgtggttatttggattcttgagcatcgaataaatgatgattttcgtggctcgccgtggcaacaattaataactattgtttggttcagtttttcgactctattttttgcacatagagaaaagactatgagtaccttaggacgtggcgttttgatcatatggctatttgttgtattgataattcaatcaagctacactgcaagtcttacttccatcctaaccgtgcaacaacttgatacttctattagaggacttgatgacctgaaacatagtgattatcctattggtttccaagttggttcttttgtcaaagaatacatgatcaaggaactgaacatctcacagtcaaggctaaaagctcttggttctcctgaagaatatgctgaaaacctcaagctaggccccaagaaaggaggtgttatggccattgttgatgagcgcccctatgttgagctgtttttgtcaacttactgcaagattgctgttgctggtcaagatttcaccagtggcggatggggctttgcatttccaagggattcccctctgcaagtagacctgtccaccgcgatcctaacactgtcggaggatggggaactgcagcggatccatgacaagtggctcaagacaggcgattgttcatctgacaacactgagtttgtggactcgaaccagctccgccttgagagcttcatgggcctgttcctcatttgtggcgcagcatgtgtcctcgccctgctcatttactttggcatcacgctgcgccagtacctgagacatgagcagccgggatcagcaatctccgcggactcaggatcatcgacatcgaagcgcagtctcagaaaattcatttcgttcgtcgatgaaaggcaacgatcaccaaagaaaaacggaccatgagcctctcaaggagttcaatgccaacaacgccgatgagtaaccgtcctggtactggtattgatatagaaagctagtgcttgacctggaatacatcatctatgggccaatgatccttagtagccaggttcccggattgatggggttgaggaatgggaacgtggtacagtacttgaaaaagattgtaacactacggggacgagattgttcctgcgttttcggaacggaacaaatgtttccggaatgaggaacgtggacacgttcccggtttgtaagggccaatctatgcgtccttatatataggaaattagagccaaaagtctgtgtagtggattgtaatagtcgttttttgcgccccgaccgcccaaggaatccgagtttggcaaaactgtcaaattgtaaagtcaacccttgtccacgaataatgatggtcttatgaatggaatatatgtttgtttcaattgatttgttctttc

SEQ ID NO: 1811 - DNA, 494 bp, Zea mays
ggatatggtatatccatacaacgccatcatgggtcggggctccattaataagttcgaagccaccattcacggactgtacctatgtatgaagataccaggtccgataggcgtcattacggtctacggcaaccaacagacggcgcgcaacatagagcgggacttcgtgcccggtcagaccagcgcgaggtccccgcgcccgccagcccaaccgataaacagcacgacaaggcacagctgcagagccaagacgggaccaagactgtccccctcgatcaggccacgcccaagcaaacagtcactatcagcgaagacctcacctcgcatgaagaagagaaactcctctgctgcctgtccaagaataaagatgtcttcgcctggtccgccctcgacctggtcggagtcagccgatccataattgagcacagcttgggaattgacccttcggtgcgaccaaaaaagcagaggcttcgcaaaatgtccgacgaaaagacaga

SEQ ID NO: 1812 - DNA, 2163 bp, Zea mays
caagctcatcagcattcgatcgctccagctagctgcagacccataccaagcctgtttgatctctcagcggcagttctcttgtgttgctaatatatataattcgtccactaataatcagttcaaaccaatggacggcaagaaggtgcaggagagggcagcatggtgcgttagcgacggtggcggcaacctagtgcaggatgccgtcgactacaggggctgcagggcggacaagtccagcacgggcggctgggcgtcggcggcgctcgccgttgggatcgagctgtgcgagcgcctctccaccatgggcatcgccgtcaacctggtcacgtacctcactgccaccatgcacctgcctagcgccgcagctgccaacgtggtcaccgacttcatgggcacctctttcctcctctgcctacttggtggattccttgccgactccttcctcggacgatacctcaccatcgccatcttcgccgtcgtccaagccatcggcacggggctcctcgcagtgtctacagaggtgaggcagctgaggccgccgccgtgcggtcccggcgcggctgggccgtgcgagcaggccacggggctccagatgggcgtgctgtacgtgtgcctctacctcatcgcgctcggcactggcgggctcaagtccagcgtctcgggcttcggcaccgaccagttcgacgagcgcgacgcacgcgagcgcgccgccatgggccttttcttcgaccgcttcttcttcttcgtcaccttcggcacgctcctcgccgtcaccgtcctcgtctacgtccaggaccacgtcggccggagctgtgcctatggcatctgcgccggcgccatgctcgtcgcggtcgccgtcttcctatcaggcaccaggcggtaccgctacaagcgcagctccgggagccccatcgtgcacatcctccaggtcctagttgctgccacccgaaaacggaacatcgtcatgcagccactcaccgccgccgcgctctacgaggaccaccctgagcacgcgcgtatcccccacaccgcccagttcccgtgcctggacagggcggcggtgatggctggcgacgacgacaacgaggtgggccacgacgggcggccgacgatgaacccgtggaagctgcgctccgtgtcccgcgtggaggaggtcaagatggtggcccggctgatgccggtgtgggctacgaccatcctgttctggaccatgtacgcgcagatgatcaccttctccgtggagcaggcgacgaccatggaccggcgcatgggcgggttcgagatcccagccgcctcgctcaccgtcttcttcgttggcgctatcatgctcactctcgccttctacgaccgcgtctttgtcccgctctgccggagcctcatgaccggccggcagggatttactaacctggagaagatcggaatcggcctggtcctctccacattcggcatggctgctgcggccatctgcgagaaaaagcgcctcgccgtcgctgccacgagtgtcgccgtagggcatgggtcgctgcccatcagcgtgttcatgctgacgccgcagttcctgctggtgggctccggcgaggctttcatctacacggggcagctggacttcttcatcatgcggtcgcccaagagcatgaagaccatgagcacgggcctcttcctcaccacgctctcgctcggcttcttcctcagcagtgcgctcgtctcgctcgtcaagagctgcacgcggtggctcggcgacaccatcaaccacagccgcctcgactacttctactggctgctggccgtgctcggcgttgtcaatctcgtcgcctacatcgtctatgccatgtgggccgcagcaccggccagcagtcaggcggagcagccgcagcacgcgatggccgcggacgagaaatgctagcaagatctatcaactaccaatcgacctcagctgctgtgctgcacccatcgcttaataactatcagaggcacacctatacgcttaccaatttagaggattttatagttctgatgcgtggatgcagtgacgacatgatttccctacatactaaaacaagttctcctctggttattgaaaaagatgaaaaaagttaatatgttttttcttgtctaatcatatattcatgtaaaacaatgctctaatgggttttgttagaggtc

SEQ ID NO: 1813 - DNA, 4606 bp, Zea mays
agggttcacagttcacaccacgcggtccgcgatggcaggccaccaccgcgcccgccgagtaaacggcacgcgcgcgcccccgcgccggccgtcggcggaaaaaatcacgcggagccggagccaccccgaaaagccacgcacgtcgccaacaaccgttctacgcgtccagcccctgctgtgcgcctgcgtctggctcgccctgctgctggcgtgcctcccgcgccaggccgcggcgcaggacgccgaggcgcggctgctgctgcagatcaagagcgcgtggggcgacccggcgccgctcgcgtcgtggagcaacgcgaccgcggcggcgccgctcgcgcagtgcagctgggcctacgtgctctgcgacggggccgggcgggtcagctcgctcaacctcaccaacgtcacgctggccggccgcaccatccccgacgccatcggcgggctcacggccctcacggtgctcgacctgtccaacaccagcgtcggcggcggcttccctgcgtccctctacaactgcgccgccatcgcgcgcctcgacctctcccacaaccagctcgccggggacctcccggccgacatcgaccggctcggcgccaacctgacctacctcgccctggaccacaacaacttcaccggcgcgataccggcggcggtgtccaggctcaccaacctcacgtacctcgctctcggcggaagccagctcaccggcaccatcccgccggagctcggccagctggttaaccttcggacgctcaagctcgagaggactcccttcagtgccggcacgctgccggagtcgttcaagaacttgaccaagctaacgaccgtctggctggccaagtgcaacctcaccggcgagatcccgagctatgtcgcggagctggcggagatggagtggctcgacctgtccatgaatggactcaccggaaacataccgtccgggatatggaacctccagaagctgacgaatctgtacctgtacaccaacaacctctccggcgacatcgtcatcaacaacgggacgataggagcggcaggtttggtagaggttgacctgtccgagaacatgctgactgggaccatcccaggaagcttcggaagcttgacgaagctaaggctcctcattttgcacgacaacaatctcgtcggcgagataccggcaagcatagcccagctaccgtccttggtatacttgtggctgtggagcaacagcctcagcggagagctcccgccggggctcggaaaggagacgccggtgctgagagatatccagatcgacgacaacaacttttccgggccaataccggcggggatctgtgagcacaaccagctgtgggtgctcaccgcccccggtaaccgcttgaacggctcaataccgaccggtcttgccaactgctcgagtctcatatggttgttcctcggaggtaaccagctgtccggcgaggtgccggccgctctatggacggtgccgaagcttctgaccgtgtcgttggagaacaatggacggttgggcgggagcctgccggagaagctgtactggaacctgtcgaggcttagcatcgacaacaaccagttcaccggaccgattcctgcatcggctactaatctcaagcggttccacgccagcaacaacttgttctccggcgacataccaccggggttcaccgctgcgatgccccttctgcaggagctggacctgtcggcgaaccagctgtctggggcaatcccacagagcattgcgtcgctcagtggcatgtcgcagatgaacttaagccataaccagctcaccggcggcataccggcggggttaggctcgatgccggagctcaccctgctggacctttcgtcaaaccagctttccggcgccataccgccggcgctgggaacgctgagggtcaaccagcttaatctgtcctccaaccagctcaccggcgaggttcccgatgcgctcgcccgtacctacgaccaaagcttcatgggcaatccaggcctctgcaccgccccgccggtgtcgggcatgcgctcgtgcgcggccccgtcaaccgaccatgtctcgccgcgtctccgtgcgggcctcctcgccgcgggcgccgcgctcgtcgtcctcatcgcggcgctcgccgtcttcgtcgtccgcgacatcaggaggcggaagcggcggctcgcgctggctgaggagccctggaagctcaccgctttccagcccgtggacttcggcgaggcctccgtgctgcgcgggctcgccgacgagaacctcatcggcaagggcggctcggggcgcgtgtaccgcgtcacgtacaccagccggagcagcggcgaagcggcgggcaccgtggccgtgaagcgcatctgggccggcgggagtctggacaagaagctggagcgcgagttcgcgtcggaggtggacatcctcggccacatccggcacagcaacatcgtgaagctcctctgctgcctctcccgcgcggagaccaagctactcgtctacgagttcatgggcaacggcagcctggaccagtggctgcacggccacagcaggctggccgggaccgggactgccatggtcagggccccgtcggtccggcgtgagccgctggactggccgacgagggtcaaggtggccgtcggcgccgcgcgcgggctgtactacatgcatcatgagtgctcgccgcccatcgtgcaccgcgacgtcaagtccagcaacatcttgctcgactcggagctcaatgccaaggtcgccgatttcgggctcgcccggatgttggtccaggccggcacgaccgacacgatgaccgccgtcgccggatcgttcggctacatggctcccgagtccgtgtacacgaggaaggtgaacgagaaggtcgacgtgtacagcttcggggtcgttctcttggagctgaccaccggtagattagccaacgacggcggtgagcacggctccctggccgactgggcgtggcggcacctgcagtccggtaaaagcatcgccgaggccgcagacaagtccatcgcggacgccggttacggtgaccaagtcgaggccgtcttcaagctcggcattatatgcaccggtcgccagccgtcctcgcggccgacgatgaagggtgtgcttcagatactgcagcggtgcgagcaggcgcaccagaggaccttcgacgagaaggtcgccgactacgacgccgctccgctgctgcaggtgcatggaggtagccgccggaaacaactctccgatgccgaagtgatcgacgacgatgggaagggcggtttcgactgcaatgtctgaagaaaagcagaatgagcaatggctatgggaaccctgaccacctgaggccagaacctagcatataggacgccatgtgcttgtgcacgctctttgccagagcaaaggatagtcatcacagctcattacaacaacactgatggacagtgccaccccgtaatataggtttttatgtactgtaacagcgaaactataaaactaaatccaatcatatatttgacgaagcagtgaagagaacacatggtcaaattatcgtgcctcctctttattgccaacacaaaaaggttaaaagttttgattggtttacaacaccatacaaggagaagaaaaactgggcagaacatgaatggcattgttcagcttccatttctatgttcctgccgtccaaaccttatgccattagataacctccaaactgattggctctatactagctatatcccgctgcagagccttaagtgcatccacagaatagccaagaaaggaagccgaaaaattccccgaggagagccagaatattagggatgttttgaagggaaaaaaagataaaaatgagagctacactcgaagttcgatccacaccagttttcaagactagtcactctcgccatactgggagtgtgaggctgcaaggagagcagctccaatgccagagccatcgttggccagcttggcaaccacggaggaagaggcctcttcgccgagcaagtctgtaagagttgcttcgacgcagctgctgaacttcttgtaatgctcatagagcccaccatccaaggcaattacagtccttggcattttactgccactgcttggtactttgtcccggcctatcttcttcaggatgctatatatacctgcggcagccaagcgtgctccacgctctgcgacaaggtcacagatgtgacgggtaatgtatcttacttccagggaagtatctgcgacctgaacatgatatcaaatatttcataagtgatcaagacaatttatggtaaccaatttggcacaaacaagtcataccccaactatatccttcagtttagatccaagagttttgaggtcatgcgaagagtcatgatgcatggctgacatatctggcgtcctgttataccacaatgattgtattcagaaaacatatcctattagatacataagaagtttcaacttactaagcataaaagagcacaaaagagctggtgtgaaagaatgttaagcgtcacaaaaagatgacgttactaatggcatggggggttcaacatgcctcaaatatgctatactccctccagccctttttaactgtcgttctcatatttcgagaaatcaaat

SEQ ID NO: 1814 - DNA, 1673 bp, Zea mays
aggcgacgagcgcgcagctgggcgtcttcttcctgggcctctacatcctggccgtgggcacgggcggcaccaagcccaacatctccaccatcggcgcggaccagttcgacgacacccacccgcgggagcgcggccacaagctctccttcttcaactggtggatgttcagcatcttcttcggcacgctcttcgccaacaccgtgctcgtctacatccaggacaacgtcggctgggccgtgggctacgcgctgcccacgctcggcctcgccgtctccatcgccatcttcaccgccggcacgcccttctaccgccacaagccgcccacctccgagagccccttcgccaagatggccagggtcatcgtggcgtgcgccaggaagctgcccgtcgcggtgcccgtggacccgcgcgacctgcacgagctcgacgacgggtactacgccaagaagaacgcggccccgctcccgcacacgccccacctgaacgtcctgagcaaggcggcggtgaagacgaccggcgggggcggcgcgcctgcgtcgcggtggtcgctcagcacggtgacgcaggtggaggagacgaagcggatgctcaagatgctccccgtgctggccatcacgttcgtgcccagcgcgatggtggcgcaggtcaacacgctgttcgtcaagcagggcacgacgctggaccgccacatcggccgccacttcgagatcccgccggcgagcctccaggggttcgtcaccatctccatgctgttctccgtcgtgctctacgaccgtgtcttcatgcccctggcgcgccgggtgacgggggacccgcgcggcatctcgttgctccagcgcatgagcgtcggcctcgtcatccacatcgtcattatggccaccgcgtcggtgacggagcggcaccggctggcagtggcgcacgagcacgggctctacgacagcaagggcaccacgatcccgctcaccatattcgtgctgctcccgcagttcgtgctcatgggcgtggccgacgcgttcctggaggtggccaagatcgagttcttctacgaccaggcgcccgagggcatgaagagcctcggcacgtcgtactccatgaccagcctcggcatcggcaacttcctcagcagcgcgctgctctcggctgtgtcgcacatcacggagcgccacggccggaccggctggatcctcaataacctcaacgcctcgcggctggacaagtactacgccttcttcgccattctcaactgcgccaacctcatcgccttcttcttcgtgtgccggttctacgtgtacaacgccgaggtatcccgcgtcgtcgacaccgggagcagcaagcagaagcgggaagtggcgatgcagccggcggccgtgggcgcagtggaggccaccctatagtagctactagtgttccattacaaatgtagctgtcatactcatacgtacgtgaaaagctctgcgtgtacattgcgtaatctctgcatgctccaccatcactagaagctttgatccaccacaacccgtcatacgcccaatacagcaagcatccgcgcacaacagcggaacccagagcctgaaatctttgaggcacaggaagatgatgacgacaaaccacgtcgtcgtagcgcacgcctctccaagaaggcagtgagccggtcgtgagggcgggcaaccgga

SEQ ID NO: 1815 - DNA, 1529 bp, Zea mays
cggacctcaagagcggactgttcagcaaccgacgagttccgcatgtacaacttcaaagtgaagccctgctcccgcgcctactcgcacgactggaccgagtgccccttcgtgcacccgggcgagaacgcgcggcgccgcgacccgcgccgctactcctacagctgcgtgccctgccccgagttccgtaagggcggcgcctgccgcaagggcgacggctgcgagtacgcgcacggcgtcttcgagtgctggctccacccggcgcagtaccggacgcgcctctgcaaggacgaggtgggctgcgcgcgccgcatctgcttcttcgcgcacaagcgcgaggagctccgcgccgtcaacccctccgcggtgtccgtcggcatgcagatgcagcccaccgtgtcgccgccgccgcccagcggcctcggcgacatgctcagcccggcggcctggccctcctccccggcgagcaggctcaacaaggccgcgctcggcggcggccgggacctggacctggaccagtaccagcacatgctgttcgacacggtgtcgtcgccgagggccaactggggctcggccggcgggatcggctcgccgcttccccccgccagggccgtgccggactacgccgacctgctcggctccgtcgacgcggccagcatgttgtcccagctgcacgcgctgtcgctgaagcaggccggcggcgacatgccggcatacggctccatggtggcggacacgcagccgcacatggcgacgacgtcgcccatggtgggcctgggctccagcaccgcgttcgggctcgaccactccatggccaaggccatcctgagctcccgcgcctccgcgttcgccaagcgcagccagagcttcgtcgaccgcggcggccgcgccccggccgcgcgctcgctcatgtcgcagcaggccgccgccgccggcgcgccgcccgtgctctccgactgggcttcgccggacggcaggctggactggggagtccagggcgacgagctgcacaagttccgcaagtccgcatcgttcgcgttccgcgcgcgatccccaccgccccccgccgagccggacgtctcgtgggtcagctctcttgtcaaggacggccacgccggcgacatatttgcgcagtggccggagctggagcagatggtggcctgatccaccggccctcactggctcatagcatctagctgaccaaagttatttccttgaatcattttttcccctcctttctttgcttaattccattcgtacgagatgttttttttactagtacatagatagggctgtttcacaataacatttggtcatcaacaagaagcatagatacccaaagggagctttatagtatactgatgaggaggaacagccatcggtttataaatagttgtacacacgaattccctacatcacaaaggagtttatatttattttacttgatgtataagatatcggcagacacggtaagatttgattcatgtgctttccgcatggcgacaattgagacgaacagtaagatttgattc

SEQ ID NO: 1816 - DNA, 1248 bp, Zea mays
atggagcggcgcggccattgccacggcggcaagcccccgcacccgcacccgccgccgcgccgggtgcgcacccggcagccgtccagcggctccttctcggcgtcgctcctggacgccatctaccgctccctcgacgacggcgacggcgccgacgtcgtcgttgacgccgcgcgtgggagtgtagaggagaaggcggccgcgaccgcgacggcgcagttctggtggttgaacaaggcggcggcgcccaagccctgcaggcaatcgtcgtcgaccgcggacagggacaggcgccggcgggaggcgggagttgcgcgcccgcgccactcggggtcggggtacgcgtcgtcgaccgcgtcgtcgtccgactcatcggctgctagctacagcagcctctcctgctcgtcggcgtcgaccgtaggtatcgagtctacgtgccgccgccacggcctgcccccgccgcgggtgtcattgtcagaggaatccgtcgccacggacgcggaggagacgaccccgccgccacccaacagcaaaccaaagaagaaagccaggccatgtttccccgtggcaagaatccgaccaagggcctcagtgccaccaccatcgtccgggccacagccgccgtcgtcgccggcgacgttcgcgtgcgcactcaaggctctgttctcctcggcgcgcctccagaggaagcccaaggctccggcaccagcaagaacgacccctccgcccaaaatctcgcatcctccgcgcatgtcgaccacgagcgctgcgaaggctgctgatgcgccgcagccgtcggagccgacgacggtacggctccaccctgaagccgaggcgtcggtggtgcgacgaagggtggaggagctggtgcggggcctcgaggagctggaggaggacgaggagaggagcgacgccagttccgacctcttcgagctggagagccttcgtggcgccggcgccgacgagctgcccgtgtacggcaccaccagcctcgtggccaaccgcgctatcgcgcaggggccaggcggccagctcgttaataagtaacaacaccaccgtcaatgttatctgcgtttctgcatgttaataatgctgcagtattttgttgtgagagaaacaaaccgctgcagcatggtttgtattctgtaccctgtctatatatatttgaactttgtcctttctacaactctgtatttttcatgaaaattgtaaataaagttcctaaaaattgtgatcggcaaggaattaagg

SEQ ID NO: 1817 - DNA, 1174 bp, Zea mays
aaaccgaaccgaagtgcaaccatccgtcacatcacaaaccgaaaaaggccgcgacgagccgaccagctctactgcccccttccggccttcggcgaccgtgacgagcaacgacgaccacggcgacgatggccgcttcctccctctgccacgggcacttgctcctgtttctcctcgtgtccgtcacatcggcctgcctcggtaccgcggcagcgcatcaagccgggtctggagagggttacacgatcgccggccgcgtcaagatcgatggcatgagtgagaagggctatggtcttccagccaagacatcaaacacaaaagtgatacttaatggcggccaaagggttacatttgccaggccagacggctactttgcattgtatcctacaaatgattcattaccccacaacgtgccagctggaactcatctgattgaggtctcctcaattggttacttcttttcccctgtccgagttgatataagtgcaaggaatcctggatatattcaagcagcattgactgaaaccagaagggttctgaatgagcttgttctggaacctctgaaagaagagcagtactatgaggttagggagccgttctccatcatgtcacttttgaagagccccatggggttaatggttggttttatggtcttaatggtctttgtgatgcccaagatgatggagaacatagatcccgaggagatgaagcaagctcaagaacaaatgaggaacaaccctgtatcattctctggcttgctcgccagagcgcagggctagagaagtagactgtagacatgaggatactgcaaaggtcaaacattctagaatgtgagtaagagcactattaaagtgcttggcacgtcactcactcggggcaatttcctggggataagaaggaaatcctttccccctgtttttaccgtattttagggctagtttgggaacaccaatttcctaaaagatttatattttcccatgggaaaatgaactaatttcccttgggaaaataaaaatcttttggaaatttggggttccaaactagcccttaagttgtaatttgtctgcggtgtagaaccttctgaaacctctgagctagtgatgcgtcagattgagatattttgttcaatgtttgctgtttgaatcaggtgaatctttgacaccttgcttagtcatca

SEQ ID NO: 1818 - DNA, 1074 bp, Zea mays
tgaggggtctggtcgtttggagaagccgtgtccttgcacgaatcttgatgcagagcgtatgaagaaggattaaagctgaggccgaatggttcgctaggtttactctcccctcctcttccacggccgcgcctgcgacacccatccgccgccacgccatggccaagtacaacgtggtgcagaagaacaagcgccagtgcaatcaggaccgcaagcgcgccgcgcatggggagcccgggaccggcaagctcaagcagcggaccgcgcccgtctccatgtccggcaagcggaagaagaagctcgagcgccgcctcaaccggaagcagaaagaggctgcgatgattaaggcgctggagaacaacatgggggatgtcgacatggtctcagttgaagagtcttcagaagctgcaaagggcaagtcccaagtgaagttcagtgtgaagaaaaactcaagaatacagataaagagattaaagggcaaaggtaccacggtgctcaaattaatagtaatacatcaattgaaacaccattttccttcttggaaatgattgggtattgtttgaggcatgtaatcatggtgatgcactctgcaggcaggaagaaagccaaaaatgcaaaaccacctgccaaggagaaagttgatgccatggtagaatgacagttgatgccatggtagcatgacggacaagactacatacatccatccctttgtatgttttctcagagtttgcagcatggaccgacctcaccgaacactggcgcgtgtctcttgcatcttctgcctgaatgttaaatagaagctacttaggcctggtgttaatgtacttcaaacatgaatctacctttaatagtggactatgcgaatttgttcatgttcttattgcgtttatggagatgcttcattgtgaatgtcggcttctatagtaagcaactagcataatcttatcaccccccccccccccccccccccccctccctccctccccagcatcggatggcaattgttgtaatcagacataggcgcataggcaatccgcagtgatacttgtctgctaaaacagtattccagttatgggc

SEQ ID NO: 1819 - DNA, 2446 bp, Zea mays
cgcaaaaccccgcaagcgaaaagcggcggaaaacacacagggccgcgcgcaggaggaaatggcgccaagctcgcgcgcgccaatctcccgccttcttctccctccctctatttccccaccccatcctcgcctcccaatcccaatccgtccctaccccagctcagctcagcccagctgcccctcccctcctccccactccccagcgccagatctcccgccatggcctccgacgcccccgcccccgccgccgcgcagcccaagcgccgcggcagctataactgcggccgatgcgggctacccaagaagggccacgtctgcaccgtccccaggctggccgccgccgggggcggcgacaaggcgggggagcagcagccgccgccacccccgccgcagaccaagccgcggcgcgcgctgcagttcgacgacccgccggccgcgtcggacgtgttgctggacgccgtgccgctggcggccgcggcgccggggaagaaggcgagggtggaggccgtggacgtggaggaggaggaggatggcggcggcgactacgacccgccgccgctggattggtgggtcgaggcgggcgcggggcggcgggcgcccggggaggtgctggtggaggtgctgcggcgcatgcccccgcgcgccgtggcggccgcggccggtgtcagccgcggctggcgcgaatgcgcgcgccgcgtctggagggccgccgaggaggtccgcctccgcgccgccggggtcgggcccgtcggcgcgctcatggcgcggtgccccgcgctcgccaggctcgtgctccgcatggacagtgatgttgatgccacaatgctggcatgcattgcattttcctgccccaatttacagtccctggatatcagcatggccaatagcgcggtcaacaggataactggggatgagctatctaggtttgtttcagagaagcgatctctgtcagttcttaaactagatggctgcagcagccttggttttctcaacatcagctcttcaagcctctcaacactttggatgtcaggtctttgttcccttaccaaggcggtcatgaactgcccaaatctgaccgagctatcactggacttccccaaacagaataacgattccaccgacctggctgctctaattgatagtctgggccgcacgtgcccaaacttgagaaacatgcacgtctcgtcgatccgcttatgcaacgaagccgtgtttgctctagaaagcgccaatctcaggggcctatgcatgctgtctttggttctaggttcaaaaataacagatgcagctgttgcatctattgttcgttcatactcaagcttggagctgcttgatttaagtggatctggcattaccgacaacgggcttgggatgatcagcaaagcattccctgacaccctaacacgcctgctcctggctctgtgccccaacatcacgtcgtctggtgtccaggtggctgcagcacagttgccgctcctccgtctcatggactgcggcaacagcatatgcgccaacccccagcctgaagctgggagatcctacttcggcgacctgaccggcgggatcaagttctgctctaagttacctgtccagaagaagcagcagcagcagcaggctgcctgccagaagctgatcataaagcacggcgccctgaagaagctcagcctgtggggctgttcagcgatcgacgccttgtacgtgaactgcccggagctggtcgatctgaacctcaacgcgtgcacgaaccttcatccagagcggctgctgatccagtgccccaagctgaaggacgtgcacgtcagcgggtgccgcgacatgctgatcggcgccgtcaggaaccaggtcctgaacgagttcgcggccgccgagccccggctgccctgcaagcggctggccgacgggtcgaagcgcgtgcacgtgccccacttcatgatcgagcagctggaggagcaggagaaatggggcgggccgcggaagagccagtgcaccgtccacctcacataggcagataggctaggccggccgctgggcgctggcgagtgctactgctggcctgtgaagtgaggccctggtagtcggcggcgcccgcgtcctcgccgtcgaggagctgctgcggcgtcgattcagcgagcctctagacccccctgtatgttccatccagactagagtgccatgatccttctgttcatgctgtgtgtgtgtgtgtttaatctgtggagtctgtaggataataacggggtgcaatgcaaacgtgcccgactcctgtactttgaaaccgtattttgctcttgttcatctaggacaataattgccttcggttttccccagattacttttgcatgctgtgtgttgtttggtctctgagctagagcagctttgcagtcaggcccttgtatcatgtgtattttcgtttaaggtttggtgataagggaatcagagggggttg

SEQ ID NO: 1820 - DNA, 3699 bp, Zea mays
tttggattttatatggtttaaatatatggatcggacattgaccgacgcaggccaacaaagacaggacatgttttaggatcggactagaccactgtttctactctttaggctcgcacgacacgacctaaaattttttagaccttcttagtccaaacccgtttggaacgaaccacaaagtggacccggccaattcccatcactagtccaaacacacaatccaggacatacgacatacactacacacacagagtcacagacagaccagcgctctgcatggccatcattctggtgaccacgcaaaaaggaccagccattcccgggcaaagatggtttcagaagccagcgagcttggcattggcacacactatacacactggtcgctgatatttcgattccccacgtgcgacacggcatctacccgtcgaggaactccacatctctccatgaagctcgctatatatgcatgtgagcttggcattggcacaccacagagcagccacttggatccggtgctcagcggaacagctagctatagcctgtagctagcagctagcttcagtcacaggccggacggtcggctcacacacagctagccgccgccgccgctagcttagccaccagtagtccgatctgatctacaggcaaggggcaactagctagctagccgcgcgccggcgccatgatgaacctgaacctgaagcagcctctggtgctgcccgcgcaccacagcaatgtcgtcggctcgcgcctgtcgtcgtcgtcgccctcggcagccgccgccagcaggaggaccggcggcggcgtgtcctcccggtccggctcccggcggcacgtgcggctgccgaggatcagctgcagcgccaccgaggaggtcagcggcgccgtgtcgtccgtcaccgtggagaggatgctcacggtgacggcgtcggtggaggcgtcgccggccatcgggcagatgtacttccagcgcgccgtcgacgacatcggcgacctcctcggcaagacgctgctgctcgagctcgtcagctccgagctcgacgcaaagtcgggcgtggagaagacgcgggtgacggcgtacgcgcacaagacgctgcgggagggccactacgaggcggagttcaaggtgccggcgtcgttcgggccggtgggcgcggtgctggtggagaacgagcaccacaaggaggtcttcatcaaggagatcaagctcgtcaccggcggcgacagcagcaccgccgtcaccttcgactgcaactcctgggtgcactccaagttcgacaacccggagaagcgcatcttcttcaccctcaagtcatacctgccgtccgacacgcccaaggggctggaggacctgaggaagaaggacctgcaggcgctgcgcggcgacgggcacggcgagcgcaaggtgttcgagcgcgtctacgactacgacgtgtacaacgacctgggcgacccggacaagaacccggcccaccagcggcccgtgctgggcggcaacaagcagtacccatacccgcgccgctgccgcaccggccgccccaggaccaagaaggaccccgagacggagatgcgcgagggccacaactacgtgccccgcgacgagcagttctcggaggtgaagcagctcacgttcggggccaccacgctgcgctccggcctgcacgcgctgctgccggcgctccgcccgctgctcatcaacaagaaggatctgcgcttcccgcacttccccgccatcgacgacctcttcagcgacggcatcccgctgccggcgcagaccgggttcgacgccatccgcaccgtcgtcccgcgcatggtcaagctggtggaggacaccaccgaccacgtcctccgcttcgaggtgccggagatgatagagagggaccggttctcgtggttcaaggacgaggagttcgcgaggcagacgatcgcggggctcaacccgctgtgcatccagctgctgactgagttccccatcaagagcaagctggacccggaggtgtacgggccagcggagtccgccatcaccaaggagatcctggagaagcagatgaacggcgcgctgaccgtggagcaggcgctggcggcgaagcggctgttcatcctggactaccacgacgtgttcctgccctacgtgcacaaggtgcgggagctgcaggacgcgacgctctacgcctcgcgcaccatcttcttcctgacggacctgggcacgctgatgccgctggccatcgagctgacgcggcccaagtcgccgacgcggccgcagtggaagcgggcgttcacgcacgggcccgacgccaccgacgcctggctgtggaagctggccaaggcgcacgtgctgacccacgacacggggtaccaccagctggtgagccactggctgcgcacgcactgctgcgtggagccctacatcatcgccgccaaccggcagctgagccggctgcacccggtgtaccgcctgctgcacccgcacttccgctacaccatggagatcaacgcgctggccagggaggcgctcatcaacgccgacggcatcatcgaggagtccttctggccgggcaagtacgccgtcgagctcagctccgtggcgtacggcgcgacgtggcagttcgacacggaggcgctgcccaacgacctcatcaagcgcgggctggccgtgcgcggggaggacggggagctggagctcaccatcaaggactacccctacgcccacgacgggctcctggtctgggactccatcaggcagtgggcgtccgagtacgtcaacgtctactacaagtccgacgaggccgtggccgccgaccccgagctgagggcgttctgggacgaggtgcgcaacgtggggcacggcgacaagaaggacgagccgtggtggcccgtgctggacacccgcgacagcctggtggagacgctgaccaccatcatgtgggtcacctccggccaccactcggccgtcaacttcggccagtaccacttcgccggctacttccccaaccggccgaccaccatccggaagaacatgccggtggaggagggcgggccgggcgaggagatggagaagttcctcaagcagccggagacgacgctgctggacatgctgcccacgcagatgcaggccatcaaggtcatgacgacgctggacatcctctcgtcgcactcgcccgacgaggagtacatgggggagttcgcggagccgtcgtggctggcggagcccatggtgaaggcggcgttcgagaagttcggcggcaggatgaaggagatcgaggggttcatcgacgagtgcaacaacaacctggacctcaagaaccgctgcggcgccgggatcgtgccgtacgagctgctcaagcccttctccaagccgggagtcaccgggaggggcatccccagcagcatctccatctgatccatcctcagcatgcattagtccaattaaatcggggggtgtactattattgcatgcagaggctgcttgtcgaataaaacgtactatatgtacgattgtattgtacatgtgtgtcaatgcaacaagaggcacgtttgagactttgagttaataccaattaaactagtaagatggcattattaacagagcctttatacattttgaaacaactttatacattttgaaacgactagatatatatatacagtataattttgagatagcttcaaagtacgaaaagtaaaaatgaccctgaaagtgat

SEQ ID NO: 1821 - DNA, 505 bp, Zea mays
atggagaagaaaatgccgtggatatcgggcttgaccaaggggactaaccacgtcggggcagcgctggtcgaccggcaagagcagagcgccggctgcctattcgcgcgagggagcaggggccccgacgcctgggcccacgggcgagccgccgcgcggctgccggctgcttatcgcgtcgcgctgggcaagctgtgctggctgccatgcacgctggccgccgcgctggctggctgccgcgctggctgcgccgagctcgcgcgcacccgcgccgagacgccgcgcccggggacgtcgagcctggccacaccgcgccgccggccgaggaaaacagagggagcacgcaggggaggcagccatggattgaagacgccctgccgcatgggacatggccacggcacagcagcctgatcggaaaaaaggagggagcacgcagaggaggggagagagggagagggctcacctgcgcacgcaagaagaccaataaccgtctggatgggatgcctgg

SEQ ID NO: 1822 - DNA, 2252 bp, Zea mays
ctttggtcatgcgctagttactttatgacaagtgggccagccacgcgcagttatggcgccaccctccgccacggaacacgagccaagaagcggtaggtggcgccaacgactcgtcgtcgtcgtatccgcggtccggttcctctcctcctgctgcgaatgcgatccctgccctgctccccgttctagattaattgcctttagttattcccttcccctcggctcgcgtgttaatccacggattaaactcgcacctgccctcctcgtccttgacacactgaacgagtgcccgcctgcccggagcagaaccattctcgccctctccctctggcctctgcctccgcctccgcggacgaaaccgccggctgggtccaagtttagcgcgtcggaccctcgctccccaatctcagagcaatggaggtggaggcggcggggccggataagctggcgcctccctcgccggtggagggccccggcgagaatggcgcggccaccaaggtgcagaaggtgtaccgcagctaccggacccgccggaagctcgccgactccgccgtcgtcgtcgaggagctctggtggcaggcgctggactacgcgcgcctggagcacagcaccgtctccttcttcgacgagcccaaaccggagaccgccgcctcgcgctggaaccgcgtcagcctcaacgcatccaaggtgggccagggtttatccagagacggcaaggccctcaagctggctttccagcactggatcgaagcgatcgacccgcggcataggtatgggcacaacctgcacttctactacgatgaatggtgcaaaagccaagcaggccagccattcttctactggcttgatatcggcgagggaaaggatctggaccttcctgaatgtccaagagctttgctgaagcagcaatgcattaggtatcttggtccgcaagagcgtgagcactacgaatacatcattagcgagggaaaggttatccacaaacagtctggggaaccacttgatacaaggcgtcctaaggggactaaatggatatttgttatgagtacagcaaaaaagctttatgctggcaagaaacagagaggcgtgttccagcactccagctttctggcaggaggtgcaactatagctgctgggagattcactgcagaaagtggagtgatcaagtccatctgggcgtacagcggccactacaaacctagcgcagagaacctccacaacttcatgaacttcctcgaagagaacggagtggacctcaaagaagtcgaggtacgctcatctaccaaagaagactacaacgaggacccagtgccagtgccggtacttaacgacacacggagttccacttcagctaccatggaagaggcagaccttccacaggcggcggttcccgtccccgctctaaacagcacagagggcgacgaaggagacagccctccggaagacgaaggacgaggcagggcgaggtaccagaggaccttgtcaggcgggctgcagagccccagagccacccaagtgccccagagggcgatcctcgagaggatgaagtccaagggcgagttgtccaagtcgtaccagctcgggcacaggctgtccctcaaatggagcaccggggctggcccgaggatcgggtgcgtcaaggactacccgatggagctccggatgcaggcgctggagatggtggacctttcgcccagagggttgtcgtcgactccgtcgccgtcgaggagactgcctcctccgtgcttttcccccactaaagtcgcctcgccgacgtctccgctcgcgccagttcaggcgtccctgccgcagccaagctaggagctcgagagtagcagcattatgcatggccacgcgcaaatagcacaagaccggttccattcgagagtagcagcacaactcaatgttgtccaagtgaaacagggtgtgggcagaatctgtcacgtttcagacaccggtagctttgaagcagatatgtgctagtgtagtgtttttttttactaccatggttgaggaacctgctttgtactgtatcatctgcaaacggaataatgggcaaagcattacatgtgtgtgtgtgtgtgtgagagagagagagagagagagtactcagagcccttgcatacaggattacaggttgtgatttgtgaagatgttgtattttttgcctgcttcgcattgaccatcgagagttcttcagggggtcctgctgcctgcacagtgagagagcctttgcagtgactatactgctgagc

SEQ ID NO: 1823 - DNA, 3821 bp, Zea mays
ggaattgggaactcgattcttacagaagagacagacagaacaaagttgattagcatccatcacttttgagtgcgccactggaccaccgaacagcaggcggagaccgttgacgctgaccacaactcgcacacccatttcacacacacgtataaagagccgtgcacaaactcggacaccagccgtcactcccgcggcatcactccgcccgagtcccgtgatcccgtcccgtctcatctcctcctcacatcacagccgaggaagcttccaaggacaaaaacaaaaaatgcggcccaccacgtcctgccatcgcttccccctgctgctcgtcttgctcctcttcctcctcgccggcgagggccgctcccagcccgccgccggcggcggccccagtgaccgcgacacgctgctcgccgtcaagaaggcctggggcagccccccgcagctcaagtcctgggaccccgccgccgcccccgaccactgcaactggaccggcgtcacgtgcgccaccggcggcgttggggtcgtcaccgagcttatcctgtccaggcagaaactcacgggctccgtcccggcaccggtgtgcgcgctcgcgagcctcacccacctcgacctctcctacaacaacctcacgggcgccttccccggcgccgcgctgtacgcgtgcgcgaggctcaccttcctcgacctctccaccaaccagttctcggggccactcccgcgcgacatcgaccgcctcctctcgcggtcgatggagcacctcaacctctccaccaacggcttctccggagaggtgccgcccgcggtggcggggctcccggcgctcagttccctgcggctcgacaccaacaacttcactggcgcgtaccctgcggccgagataagcaaccgcaccggcctccagacgctcacgctggccaacaacgcgttcgcgccggcgccggtgcccaccgagttctccaagctcaccaacctgacatttctctggatggatggcatgaacctcaccggagagatcccagaggccttctctagcctcgaacagctcactctatttagcatggcttccaacaacctcaccggctcgatcccggcatgggtgtggcagcatcagaagctccagtacatctacctgttccacaatgtcctctctggcgagctgacgcgcagcgtgacggccttgaacttggttcatatcgatttgtcgtcgaatcagctaaccggagagataccgcaagacttcggcaatctcaagaacctcacaacgctgtttctatacaataaccagctcacgggcaccatcccggtgagcatcgggcttctaccacagctgagagacatccggttgttccagaacgagctgtccggagagctcccgccggagctgggcaagcactcgccgctgggcaacctcgaggtgtgccttaacaacctctccggcccgctgcgagggtcgctctgcgctaacggcaagctcttcgacatcgtcgccttcaacaacagcttctcgggcgagctccccgcggcgctcggggactgcgtcactttaaacaacttgatgctctacaacaacaacttctccggcgacttcccggagaaggtatggtcgttcccaaatctgaccttggtgatgatccagaacaacagcttcactggcacgctgccggcccagatatcccccaaactgtcacggattgagataggcaacaacatgttctccggctccttcccggcctcggcagcagggctcaaggtgctccatgcggagaacaaccggctgggcggcgagttgccgtctgacatgagcaagctcgccaaccttactgatctgtcagtgcccggcaaccggatccctggctccatcccaacatcgatcaagctgctgcagaaactgaattcgctcgacatgagaggcaaccggctgaccggcgcgataccgcaggggagcatcgggcttcttccagcactgacgatgcttgacctgtccgacaatgagctctccggcaccatcccatcagacctaaccaacgcgttcaacttgcttaacttgtcatcaaaccagctcaccggcgaggtgccggcgcagctgcagagtgcggcctacgaccggagcttccttggcaaccggctctgcgccagggcgggctcaggcacgaacctcccaacgtgcccaggcggaggccggggcagccacgacgagctttccaagggcctgatgatcctctttgtgttgctcgctgtcattgtcttcggcggcagcatcggcattgcctggctgctcttccggcaccggaaggagagccaggaggcgacggactggaagatgacggcctttacccagctcagcttctccgagtcggacgtgctcggcaacatccgcgaggagaacgtgatcggcagcggcggctccggaaaggtgtaccggatccatctcggcagcggtaacggcgccagccgcgacgaggagggcggcggcgggaggatggtcgccgtgaagaggatatggaactcgaggaagggcgacgagaagctggacagggagttcgagtcggaggtgaaggtgctgggcaacatccggcacaacaacatcgtgaagctgctgtgctgcatctccagccaggaagccaagctgctggtgtacgagtacatggagaacggcagcctggaccggtggctgcaccgccgagaccgggagggggcgccggcgccgctggactggccgaccaggctcgccatcgccgtcgacgcggccaaggggctcagctacatgcaccacgactgcgcgccccccatcgtgcaccgcgacgtcaagtccagcaacatcctgctggacccggacttccaggccaagatcgccgacttcgggctcgcccggatcctcgccaggcccggcgagccccagtccgtgtcagccatcggcgggacattcgggtacatggctccagagtatgggtacaggccaaaggtgaacgagaaggtggacgtctacagcttcggcgtcgtcctgctggagctcacaaccggcatggtcgcgaacgacagcggcgcggacctctgcctggcggagtgggcgtggcggcggtaccagaaaggcgcgccgttcgacgacgtcgtcgacgaggccatccgggagccggccgacgtgcaagacatcctgtcggtgttcaccctcggcgtcatctgcacgggagagagcccgctggcgaggccgtcgatgaaagaggtcctgcaccagctcgtccggtgcgaacagatcgccgctgaggccgaggcgtgccagctggtgagctacggcggcggaggcgcaccggtcgtcgagtcatggaagagaggcagccggcgacgcagcacgtctggctccagccggtggagctacgacgacgaggacagcggcgacttcgttgcgcacgtggtgtagttgtcggttcggacagtatatagctagctactgggcgtctggctgctgcaagcagctcatccatggaggaattttgcagaggtgccgcgccggcctctaccgagcggcggcgagaaggcccatgaagcccgaccccgcatgggcgccgcgcaacgcaagaacaaaccacgaagtgctttggttcgcgtcctgccactactgcgtgtaattacgccgtgtatgatgtatccagtgtttgaccggcgccggcggtaaaccagtttaattgacgaactagctgcctcgctgtagatggtgtaccggtgcagcttgcagatacaggatgttgagtcgcttttcggttttctgaaactgaaagactgaaacttttggccactctttggggattcagaaaacttgagaccac

SEQ ID NO: 1824 - DNA, 3249 bp, Zea mays
atgagaattaaggataatatattaaatccggattgcccaaatttcagacatccattgggtaacggctccacaccagaggctctagtagggctctctaggatccgaaacggaaggaggggcttgagcctgctcgtcccaccgttagatcggcctctggttgcggttatcatcaaaactttccgaaaaaggctgaagaaaaaccctttaaaactgaatcaaacatgcccactggaggctctagtagggctgttcgcacaagccacaggacagacgaccagcgtgcacccgaccaagcgaacaggaagcgccgcctctgccgaccgggccaggggcctccttccgcaggccgcagcacacttccccgctccgctgacccggccagccacaacccacaaatggaagcgggctccttccccagcaagttcccgccaattcccgcgggcgacaaaacctagatccagtagcggccgccggcgccgccgcgaccaggaggatgaggacgacctcccctctgacgacacctccgacaccgatttcgtcgccgactccggggacgcggtggagaacgacgacagcgacgaggagttcgcgcccgataaggacaccccgcccgcgcccgcggtgcccgaggcggccctgccgccgccggtgccgatccggattaagaatcaggcgcggaacaggagggagaagaggaggcgaggtaagaaggcgaggagggacgcgccgcccctgccatgggaagagtggcaggtggcaaacgacagttggctcgacgagcggaacgcagccgacgggggcgtcgaggccacggacgccacggtggcggccgtgccgaccgcggacccggccccggaggtggtgctccgattgctgcgtttccagaaggagtggctcgcttgggcgctcgcgcaggaggcgtccgtcacgcggggcggcatcctcgccgacgagatggggatggggaagaccatccaggctatctcgctcgtcctaaccgcgcgccgcctccggcccccggaccatcactccgccgcctcctcgtccaactcctcggtgggccgcaccaagccccaggtcgggtgcacgctggtcgtctgccctgtggtggccgtcatccagtggactgaggagatcgaacgccacactgctagtggcagcgtgcgcgtgctcatctaccacggtgccaagcgtgtcactcagagtttcgatttcaacagctatgactttgttatcaccacctactctaccattgaggcggactaccggaagcacatcatgccgcccaagactcggtgccaatactgcaataaattgttctaccccaacaagatgaaggtgcacttgatgtatcactgtgggcctaatgctaaacgcacagaagctcaggctaagcagcagagcaagaggaagtgggacagcagcaaggaaaaggtgaaggagaagaggagggttcataagaagggtgatgaggtgaataaggattttcaagagttggctgatgaactgggcagacagttaaggggccaatctcctctgcattctgtgcggtgggagcgtgttatcctggatgaggctcacttcataaaagatagacgatgtaatactgcacgggctgtttttgcattggagtcagaatgcaagtgggctctgagtggaacacctttgcagaaccgtgttggagaactttactctcttattcggtttttgcaaatcttcccctactcatactatttctgcaaggactgtagctgtgagatactagataccagtatgaagaaacaatgcgactgtggtcactcatctgttaggcacttttgctggtggaataagtacatatcaacaccaatacagtatgggtcaacaagtttcgaaggaaaaagagccatgactcttctgaaggaaaaagttctgaaaggcatagtgttaaggcgcacaaagaaaggccgagcagcagatcttgctcttccaccaaagattgtgacattgaggcgggactcttttgataaaaacgaaatggaattctatgaagctttgtacactcagagtgtcacacaatttgatgcatatgtagatgctggaacactgatgaataactacgctcatatcttcgatcttctcacaaggttgagacaggctgttgatcatccctatcttgtagcatattctaaaacagcaggacatcctgaaggaatgaagaatgaaggaaacgagtccatggagagccaatgtggtatatgtcataatttggctgaagatgttgtggttacctcttgtgatcatgcattctgcaagacttgtttgatagactactctgcagctttggggaatgtttcatgtccatcctgttcaatacctctcaccgtggacttaacagcacaaaattcagttggaaaagtaactcgaagtgtcaagggtcgcaaatgttcaggaatattgagcagactaccaagccttgtggattttaagacgagtacaaaaattgatgccttgagggaggagataagaaacatgattgagcacgatggttctgccaaagggattgtcttcagccagttcacatcattcttggatttgattcagttttccttggagaggtccggcattaagtgtgtccagttgaatggagccatgaacattaccgaaaagggaagagccatagacaccttcacccatgatgcagactgcagggtcttcttgatgagcttaaaagctggaggagtcgctctgaatctcactgtagcatctcatgtgttcctgatggacccttggtggaatccagcggtcgagaaccaagcgcaggaccgtatccaccgaattgggcagttcaagccaatcaagagcactaggtttgtgataaaggacacggttgaagagcgcatactgcaactgcaacagaagaagcagctggtgtttgaaggcaccgtgggggactcgccggatgccatgtcgaagcttacagaggcggacctcaagtttctgtttcagatctaaatgctgacgtagttaagcatgagtagggagggccaggctatgctaggactaggagcactgacttgttggaagttggaaccctgacgctgccataacaccaggacggacggggtcggcggtgcgtagatcgactgctgctgtgcctgttggaactgatgtacttttgcagtgtgtgtaacatcgatggcagcgactagcgaggctttccgttggagtagcccgtttgggaaagaacagaacagggtgttgtaggcc

SEQ ID NO: 1825 - DNA, 837 bp, Zea mays
tactacctgaatctgaattagcgcgcaccattgtgattgtgagtgagtgatggatcaaccaagaataggccaatacgattcgggtactgatggtcttctcttcttcttcttcttccctttctctgctgattggaatcacatcgccctccgatccttattatatataaatgaaccaccgatcctttctctctgcagctagctagctaccaccaccagcagcagcagcagcaggaagccacccaacgcacgcgcacggcattgctgctggatcagccaacctagctacgcgagtagtggccgtcctcctgaattcccatggacggcgacggcagcaaaccacgcggcggaaataaggctgcacggcccgcgccagcccccgatgccacgcagcagccagcgtcatccgccgcggccggcgctggcgagaaggtcgatgacggccgccagcagcccgtggcgccagtggacgagagccgccgcgctgcgggcggcgccgagccggaggaggaggaggggggcaaccgcaacgacgacgcgcaggtggagatgttctacgcgctgctggccaacatccgggcaatgaggaggggcctgccgccgcacgacgtggcggcctcctcgtccgtgcgcggaggcggcggcgacaccggcgacgacgccgtactggactctgcgagggagaagcggctgcgcctgagcgcggacccgccgtggcgaccggcgttcaggatggaggacttcgaggagcccgctccggcggcgtgcgagacgaggaagcggacgaggggcacgggccacgacggccacggcgacggcgcgagcagcgggcacgaatag

SEQ ID NO: 1826 - DNA, 141 bp, Zea mays
atggcgcacctgggccgccccggcctagaggctggccgcgtgggccgcctcggcctggtggcgcctgggccgccctcatgggaccaaattggtcctaaaatgacctattttactattttaaattctgaattttaagtacaa

SEQ ID NO: 1827 - DNA, 4048 bp, Zea mays
gaggagaaccatcgaatcaattaattattaattaatgtcagagacttatacaaatcacaatagctgctagcctgttactgcaggcctctctctctctgtcctctccccagcccgcctccgcttctcgccggactccggccgccgcccgcaacctgtgcctagggctcccgcttccgccacacctgcgcactcggccccggagacggctccttgacgagaggcctgtgggaggagttgcagctgggacgcccggtcggacttgcgtctccgcagctgggagatgctcagctcgtcggcgtccaggagggacgccgcgaggagcggcgcggagctccctcggccgcacgcggtggcagggatggcgcggagcggggagctgcccaagggcgccccctccgcgacggcccctgatgcggtgcggtgcgagggatggatggtgcgccacggccggaggaagatcgggaggtccttcttccacacgcgctacttcgtcctcgacaacggcgtgctcgcgtactacaagaagaagccgagggaccacatgatcccactcaagtcaattattattgatggaaattgcagagtggaggatagagggcttaaaacacatcatggtcaaatgatttatttgctatgcatttacaacaagaaagaaaaggagaaccaaatcacgatgggtggatacgatattgaagatgccctagcctggaagaggaagatagagcttctgattgatcagcaacaggatactacgacagctaaaaaccataaagcttttgcttcgttggactttgatatagatcttggaggaccattttcgttctctgaccatgacagcggacccgaagatgaagaagagccccgacccaccttgcttcgcaggacaactatagggaatggccctcctgattctgtacttgattggaccaaagaggctgacagtgggctgtcaaatcagaatgccaccagtcaggcttactccagaaagaactggaggcttcttagatgccagaatggattgcgcatctttgaagaacttgtggaggttgaataccttgcaagaagctatagtcgagcaatgagggctgtaggagtggtggaagcctcatgcgaggccatttttgggcttgtaatgagcatggatgcatcacgatatgaatgggattgtagcttccaatatgggagtttagttgaagaggtcgatggtcatactgcaatactgtaccatcgtctacaactgaactggttttcaatgttggtctggccacgagatctttgttatgtacgctattggcggcgcaacgatgatggaagctatgttgtgctgtttcgatctaccgaaaatcagaactgtgggcctcaaccaggatttgtgagagcttctatcgaaagtggaggtttcaagatttcccctctcaaaagcctcaatgggaggccccgcactcaagttcaacaccttatgcagattgatgttaggggatggggcgtgaactatttaccatcattccagtactactctttgctgcagatgctgaactgtgttgctggattgcgtgaatatttttcgcaaacagatgaaattcatacagttccaaggattccggtgatgcataccatggttaatgcggcctcaatgaaaaaggaccaaaaccttcaagaaccagactcgaagaccaaacaagctgataacaaacatttggatatggtagatgaagagtcggaagatgatgatgactatcaagttcctgatgctgatgtggaggaagaacctaccaaatctgacagtgatgctaagaactcagacccaatagatttgtcttggttttcgggcattattcgtcaggatacaaatgagaaaagtcgtaactgttgggcagtgcctgatagcaagatctttaaagttcgtagcaagaactttccacatgacaaatcaaaggtaccagcaggtaagtatctaatggagctcgtagcagttgactggtttaaggacgccaagcgcatggatcatgtcgctaggcggaaaggatctgcggttcaggttgccgctgagaagggaatgttcactttcctggtaaacatacaaattcctggaccaagtcattacagcttggtcctttattttgtctcaaactccttgaagaaaggatcgctgttgcagcgttttgccgatggtgatgatgattttagaaacagcagactgaagcttatcccatctgttccaaaggggtcttggatagtgcggcaaagtgttggaagcacaccttgcttgctggggaaagccgtggactgcagctatttgcgtggtcctgactacttagaagtggatgtagatatcggttcgtccgcggtagccaacggggtcctgggcttggtgtttggcgttgttaccaccttggtagtcgacatggcgtttcttatacaggcaaacacgtacgacgagctcccagagcagctcctaggcgctgcgcggctgtcacacatcgaaccttctgcggccgtgtatcctgtccttgacaacatttcctgaacgggacggacaaatcaacctgtgcagattctttcgttctttccgtccgccccgccacaaaaaggctctcccaatttgttcagccactgcagcattgtgcagctcgatacatttgaggttcagacagacagactgcagcagtccacaagtgccttgtacccttcatacagttttgccatttttttaggtcttttcttttacattttactttactcggtgtagtttgagcttcctacagatattgtaatgcaatagacacatcaaagtgagatatacagatacagcatggttcagaaacaagttcgtgtactttccgattcccgacccactgaaactcgccttttgtgcattcaccagtttgggcttgcttcattgctcatcagatctggtccatgaatgcccattcgaggcccatcacagcccaaacccccactggtcctaaacctctcgccgtcacgcagctttaagttccgatacccacaagcacttggcatcaaccctaaaccacccactatacccgcccgcccggctagggttttgccaccatggccgccgccgcggccgccgcccggaggctcctctcccgccgcgcctcctcgaactcgctctccgcgttcctccgccgcggcgctgccccggagcagtcgctgctgcgcccggccgtcgtcgcggcggcctcccgcctcggcttcccgcgcgggatggcgcggcgacctggcggggacggctacggcgcgggccgggaccgcgcgcccacggagatggcgccgctgttccccggctgcgactacgagcactggctcatcgtgatggacaagcccggcggggagggcgccaccaagcagcagatgatcgactgctacatccagaccctcgccaaggtcctcggaagtgaggaggaggcgaagaagaagatctacaacgtctcgtgcgagcgctatttcgggttcgggtgcgagatcgatgaggagacatctaacaagctcgaggggctccctggtgttctctttgtgctaccggattcgtatgttgaccctgagtacaaggactacggagctgaactgcttgtcaacggtgagattgttcagaggcctcctgagaggcagagaagggtcgagcccgtgccacagagggctgcagacaggcctaggtacaatgacaggacccgctacgcacgcaggagggagaaccagcgatgagatgaaaaaagtccacaataacaagttcaggtggtttgagctctgtaattcaaggatagtgtgctttggatgtattgtactctgtaactacagttactcagattgctcaaaggacctggtttggaatgcatgcactgttactagcgcccgtttgcacatgtaaaatttctttatggaagctgcttaattgactatgaaggcctaacattaggtatttcattcattgccaacagcttatccatccctatctctatttgaagttcaatttacgagcagtgtagtttacagatgactatatagatgaactaatggatatggtttt

SEQ ID NO: 1828 - DNA, 1336 bp, Zea mays
accgtcccacgacccttgtgtgtgtgtgtgtgttttttggaccctcggcctccggccggtcttagaacccagttctttcatagtttcgttcttccgcgtttccacttattctttgaaggcagaggcagctatatcagtactcgagtgttctcgagtcctgctgcatcccagtttcccaacaagagcggcacggggatcctagagcagcagacattcgcgttgcaatggtgttctgcgcggatttcgctgccctccggccgtcgccggccgacgtccgtgtcgtcacgtccgacgggagcgccatccgtgcgcattgctccgttcttgccgcggcgtccccggtgctggagcggatgatcgagggcacgcgccgcgggtgggacgccggctgcaccgtccacgtcctcggcgcgcccgctgacgccgttgccgccttcctccgcttcctctactccagccccagggcggaggacgcggtgggcgcgcacggggcggcgctgctggcgctggcgcacgcgtaccgcgtcccgtggctgaagcggcgcgcggaggccgcggtggcggcgcgcctgaccgcggagcgcgcggtggacgcgctgaagctggccgcgctctgcgacgcgccgcggctgtacctggcgtgcgcgcgcctcgcgggcaaggacctggacgccgtggagcggtccgaggggtggcgtttcgcgggccgccacgacgccgcgctccagctgaacctgctccagctcgtccacgacgcccaccagagaaaggagaggtgggagagggagcgcgcgtcgcagcacgtgtacgggcagctcagcgacgccatggccttcctggaccgcatcttcgccggcgatggggagggatggtccgcgtgcgccagtgcagcctcgtcgcgcgaggacggcggcgtccgccgggggctcgagcagctcatgcgacacttggccgcgtgcggcggcaggaccaggaagcccgccgcctgcccgcgctgcaggcgcgcgctccagctcctccggctccacgcctcagtctgcgaccgcgccggcggcgagccttgcaacgttcccttgtgcagcaacctcaaggccaagatgcaggaggaaggagtgggcaagacatggaagcttctggtgaagaaagtgaccagggctagggtgatgtccgccctggccagcagcagcagcagggaggtgccagaggttgtcaagaagtcttgggcgaaatatagcagcagtagagcttcaagaattagataaaataaaaaagggggaaacatgaagcaaatactagttgttctgtacgaggccaacgcaatcttggtttacagttt

SEQ ID NO: 1829 - DNA, 2781 bp, Zea mays
tgaagtaatctgctgcttatatctcataattacaaatgtacacaagataagtaaggttaattgcaaaggcagagaagggccttcatatattcctatagactattcctcaagtgaacctcttttctctttgcctccgtagatttaactgcaccaaagtagtacctgacagtagcttagaataattgatacgtaaaaaaaagaaactaaaataattgataattgccaggtcaaggtctctgacccaaatatatgcaattgtttacagcaaaagaaacgggtaaatgagtggcatttcaaatgtcacatcaaaggcatatgctctcgtattcaccctaatctacttcaatacatatagattagggtgaatacaagaatatccaaacaaggttgaaaggggtctgcaaataaattatcttggttgaaaaggaaatacgtctaagagataaaaagatcttgagttacagtttttgagaccatcttgtgtctcctcaaagttcttactccgttattccatgcaccacgaatgtcaagccataacataaattaattgtccgcttcggattaaagctagttattcggactatattatagaagcagtagaagccagtatgtattaaagccaaacgaagtcgtaacatgtctttggaaatcagcatgtcctataataacacattttgtatggacatgtttgcctactgccctactcgatcacacatattctggcagcaaacagaagccttgtggcgctatgcacatcaataagaatagcaattactctgaagattctaactgtggtgtaaacaatacaaaattatgcataaaaaactcgtccgggagagtaatacataatcttttaggacatgtttggaagcaagtggaatagaggtggctaaaatccctcaatatttaaaaatgaatagtgaggtattatatcccctcaatctcctccattatccttactcccaaacaagccctttccattatccttactcccaaacaagcccttaagacaagtttaggagcaagaaaattggaaggaaacgaggggctaaaatcctctttctatttaattttgaataggaagatgattttaatcccttcaatcctacaattcacttgctctcaaattagctctcacttaaacagagaacaaaccacaaaactacaaaaactatgatgccagattaaataaaaaggaatgaaatggcagcgcaatgcaatgaccaccagttattcgaataaagactgcgtttggctgcccgcaataagactcttgaatattgttgaacccaaagatggctgctaacccaattttcagcatataacagaaaaagacatagctgctcagtatgctggtatactcctgagtgttagaatctatactgcctaggatcgattactaagtttctagaatactaattcgtaactgaaagtaaaacctcgatgacgagtagatctgatctactgagaggaatgagcaaacacacctctttgttgttgttgctatcttcataccgttgccctgcagagaagcagctggcatcgggatccgagccgctgtaggttgtcgcgtttccagacactacgacgcctagacgatgggggcctctggggactaaggttttggggcgaggtactagagttagtttttcctgcgaccccttagtcctatatttatagtgtcgtgtgactggggctccaaacgaggttatcgtgggccctcccaatcaagggcctatttaaagagatagatagttgggtttagaccagtccattcactaacgaccagctgtaaaggacacacccaacactgagcacaaaaagacatgtcctgaatgtgactcaccgccacaacaaactggaatctattcgaagggcatgacggcagcaagcaagatccgctaggcgtccaccccctaattccaatcaaaaccataatttctggagcaaggaagaaggaacttatccccactacccaagatacctctagctataccccccaaaatacgcaagcatcatctaatcagaaccacaaaatattaagatgccattaacaataagaaaacataaagcgacgctagatatctaatttatggttactgtgtaagcatcgactgtataataaaagaatacgtggaccaagcaaacgccagggtacatgaagacaaagacgacggtatttcgatggtcaaatcacgcgcagagtaatatcaagcataacttggagacactagacataataaactcagaaggagcaggaacccagaacgcaaagaagaagcagcagtcagtcagtcactgctgcctagctcatgcccttaaccgcagtgagagctggatgcagaggtttatcgaccgattcccgcgttgtttgcgagctgctgcaacaataaaacgcttgaaccaccactcccggccggaccagcacaaggcaaggaagagatcgataaaccactgcgcccagacaccacccgtagatgggtctgacaaaaaaaaaaaaaccttgacatcaatgcaaaataaggatggaacaacacaagaaacacctgcgagagatcacatggtgaggctggctgcctggctatacaaacaagagggaggtgggagatctggatctgggatttatatgccacattgggtggaggatgtgacgggagaggggagaagagaaaggggtggtggcgctggcgccgcgcgcggcctctgcccagcagtgggctgcgtggggcactctcaagtggaggaggagtggaggactaggaatctttctggtgctgtggc

SEQ ID NO: 1830 - DNA, 3389 bp, Zea mays
ccgcgaccccaggtcagtcgggactacccgctgagtttaagcatataaataagcggaggagaagaaacttacgaggattcccctagtaacggcgagcgaaccgggagcagcccagcttgagaatcgggcggcctcgccgcccgaattgtagtctggagaggcgtcctcagcgacggaccgggcccaagttctctggaaagggacgcctgggagggtgagagccccgtccggcccggaccctgtcgcaccacgaggcaccgtcaacgagtcgggttgtttgggaatgcagcccaaatcgggcggtaaactccgtccaaggctaaatacaggcgagagaccgatagcgaacaagtaccgcgagggaaagatgaaaaggactttgaaaagagagtcaaagagtgcttgaaattgccgggagggaaacggatgggggctggcgacgcgcaccggccgtatgcggaacggctcctgctggtccgccgatcggctcggggcgtggaccgttgtcgcccgcgccggcggccaaagcccgggggccctaggcgcccccggcagccgtcgtcggcgcggacggtatccgcgcgcctctggcgcgcccctcggggcgctgcgctgcaacggcctgcgagctccccatccgacccgtcttgaaacacggaccaaggagtctgacatgcgtgcgagtcgacgggttcagaaacctgagatgcgcaaggaagctgacgagcgggaggccctcacgggccgcaccgctggccgaccctgatcttctgtgaagggttcgagttggagcacgcctgtcgggacccgaaagatggtgaactatgcctgagcggggcgaagccagaggaaactctggtggaggctcgaagcgatactgacgtgcaaatcgttcgtctgacttgggtataggggcgaaagactaatcgaaccatctagtagctggttccctccgaagtttccctcaggatagctggagcccacacgagttctatcgggtaaagccaatgattagaggcatcgggggcgcaacgccctcgacctattctcaaactttaaataggtaggacggcgcggctgcttcggtgagccgtgccacggaatcgggagctccaagtgggccatttttggtaagcagaactggcgatgcgggatgaaccggaagccgggttacggtgccaaactgcgcgctaacctagaacccacaaagggtgttggtcgattaagacagcaggacggtggtcatggaagtcgaaatccgctaaggagtgtgtaacaactcacctgccgaatcaactagccccgaaaatggatggcgctgaagcgcgcgacccacacccggccatctgggcgagcgacatgccccgatgagtaggagggcgcggcggccgccgcaaaacccggggcgcgagcccgggcggagcggccgtcggtgcagatcttggtggtagtagcaaatattcaaatgagaactttgaaggccgaagaggagaaaggttccatgtgaacggcacttgcacatgggtaagccgatcctaagggacgggggaaacccggcagatagcgcgatcacgcgcgtcacccgaaagggaatcgggttaagatttcccgagccgggacgtggcggcagacggcgacgttaggaagtccggagacgccggcgggggcctcgggaagagttatcttttctgcttaacggcccgccaaccctggaatcggttcagccggaggtagggtccagcggccggaagagcaccgcacatcgcgcggtgtccggtgcgcccccggcggcccttgaaaatccggaggaccgaataccgtccacgcccggtcgtactcataaccgcatcaggtctccaaggtgaacagcctctggccaatggaacaatgtaggcaagggaagtcggcaaaacggatccgtaacttcgggaaaaggattggctctgagggttgggctcgggggtcccggccccgaacccgtcggctgctggcggaatgctcgagctgctcgcgcggcgagagcgggccgccgcgtgccggccgggggacggaccgggaacggccccctcgggggccttccccgggcgtcgaacaaccgactcagaactggtacggacaaggggaatccgactgtttaattaaaacaaagcattgcgacggtcctcgaggatgctgacgcaatgtgatttctgcccagtgctctgaatgtcaaagtgaagaaattcaaccaagcgcgggtaaacggcgggagtaactatgactctcttaaggtagccaaatgcctcgtcatctaattagtgacgcgcatgaatggattaacgagattcccactgtccctgtctactatccagcgaaaccacagccaagggaacgggcttggcggaatcagcggggaaagaagaccctgttgagcttgactctagtccgactttgtgaaatgacttgagaggtgtaggataagtgggagcctccgggcgcaagtgaaataccactacttttaacgttattttacttattccgtgggtcggaagcggggcaccgcccctccttttggctccaaggcccggcctcgccgggccgatccgggcggaagacattgtcaggtggggagtttggctggggcggcacatctgttaaaagataacgcaggtgtcctaagatgagctcaacgagaacagaaatctcgtgtggaacaaaagggtaaaagctcgtttgattctgatttccagtacgaatacgaaccgtgaaagcgtggcctatcgatcctttagaccttcggagtttgaagctagaggtgtcagaaaagttaccacagggataacctggcttgtggcagccaagcgttcatagcgacgttggctttttgatccttcgatgtcggctcttcctatcattgtgaagcaaaaattcaccaagtgttggattgttcacccaccaatagggaacgtgagctgggtttagaccgtcgtgagacaggttagttttaccctactgatgaccgcgccgcgatagtaattcaacctagtacgagaggaaccgttgattcacacaattggtcatcgcgcttggttgaaaagccagtggcgcgaagctaccgtgtgccggattatgactgaacgcctctaagtcagaatccaagctagcaaccggcgcctctgctcgccgcccgccccgacccacgttagggcgttcgcgccccaagggcccgtgccattggctcagcccgcccggccgacgcgccgcggcgggccgcctcgaagctcccttcccaacgggcggcgtgctgaatcctttgcagacgacttaaaacgcgacggggcattgtaagtggcagagtggccttgctgccacgatccactgagatccagccccgcgtcgcacggattcgt

SEQ ID NO: 1831 - DNA, 2389 bp, Zea mays
tctctgtactctctccgtctctctcgtcgtttatccgcctcccatccttgctaccctcctccgtgctctctgctcaccaattcctccaggattcggatttaggattgggattctggcgccggaaccgaagcggcgacgcgctggagccgcggccggatcggtgcgtgcttctcccgtacctattttttgatggccaatttttagcgtctgttgcggttgttgtatggaacgcgatccggttcagttggcgcaattccaaccggatttccgtttttcccaaccgcggatttcttcgagattgctttagcttcgtttgtttcccgccgtttattttttttctcgctttcattctcgggaaatcttgggtcttacttgcgactattcagtgccgttctgtatgcgtccttgattcgaattcgccgcaagttttcggttttctgcacatgcggtggttcctggacgagatctgtggccggagccgcaacaatcccgcctgaatttttaatctttcactgaggtagtttaagtgctacggtttctcaaatcttggggattttctctctctctcacacacaccgttttctgtcactgtttctctgtgcagtttgggtcaccacgccaacgccatgatggcgaacgggaggttccagaagcaggcgttgcttccgccgcggagcccgttcccggtggcggcgccgcacgccgagctcggcccaatcgcgcggccgcgggagacgccccaccggcacggccaccagcgcacgtcgtccgagagcttcctcgctgacgagcagccgtcgtggctggacgacctgctcgacgagcccgagactccggcgcgggcgcacggccggcctggccaccgcaggtcgtccagcgactcgttcgcgctcttcgaaggcggcagcgctgcggggggcatgtacgagtttgacaatgtgcttgatggcatgaggggaggagggcaggtggcttctttggccggtgcgcccgaattcttccctgagccagcctcatttgggcggccttgggagtccaggcagatgtaccggcagggtggtggcatgccaatgccaggcagggagaagaatggagggcgccatggtccgtccagctcatttggtgagcatgagcttggtcatgtgcccaatggggtgaataggaaggcccatggcgatgcggcttatgaccagaggattgtaatagagagaaaggagggcctgaggcactctcagtcggagactgacaccaaacgagccaaacaacaatatgctcagagatctcgtgtccggaagctccagtatattgcagagcttgagagaagagttcagtccttacagacagagggaatagaagtaactgctgaaatggattttctcggtcagcaaaatatcatgttagacttggaaaataaagccttgaagcaacggcttgagagtctatctcaggagcatctcattaaacgttatcagcaggagatgtttgagagggaaattggccgccttagaacattgttccagcagcagcaacagcaacaacatgtgccgcagcagcaggctcctacccatagccgcagtaacagtagagacctggattcgcaatttgcaaacctgtctctgaaacacagtgatcccagttcagggcgcgacgctatctctggcctccgcatttaagatccctttgttccagcttttggatccctgagctttgcagaacctgctgcccctttatgccactctttgtggttgttagtagcatcatgagaggagcagcaccggtgaaccgggaatctcatcccacggtgaataaagctggaaaggttaataactgtggatctggtccttagttctttcagaatgtgcacctggcggtcatcgttagcttctgtccattattgatgcttgaccagtcggaggtgtttaggatctgtttgcagattgatgacttccatggatccttgtatcagtttgaatctagaacactaaggttctaatccattcctttttagtcgattctctgtcgagtttaggcgccatggcccttgtattagtgtggcacacgaatggaatgtgagctggtcctctttaggttatgccacatcctggaaaaccgttgcgtgaggagttgtcgggccatgtccattgtcctaataagatggtgaggttgaagggctggtgcagttcagtttcattttatttgtgatgtgcacagcaagatattggatactttgggttcttacatttatttgagcactgtatttttatcgcattgtgatgacagtatattccaagttcattttagctgccaagatcctgcttgtgttcgtttcaacatgtcgttgtaggttatatgagatttaactgggtttatgtttatatgcagtgtgccg

SEQ ID NO: 1832 - DNA, 1852 bp, Zea mays
aaaataaaaaagctctggaagcgactggatccacacaatgacacacaaccatatagaaatatcacagccttcccccgctatcacactcacaccctgctctgtttccatataagtagcccactctgctcccgcctcacacaagcacatcgacaacacacggtccaagcacatcgacacacacgagcacagaagagaaacgggcacacgcaactgatcaaggcaaccaatattcaccgtcggcaatgggcgacctgatccctgggctgccggatgaagtggccagggagtgcctcgtccgggtgggcttcgaccagctgccggtggtgcgccgcatctcgcgccagtggaagtcggaggtggagtcgccggactaccaccgccagcgccgggcggaggggctggcgcgcccggtgctcgcgctggtccaggcgcagccgacagcgccgccggatgacgacgacgacgccggccccgcgcacaagcgctcgacggcggccaactcgtaccggctggtgctgctggaaccggccgagggacggtggacgccgctgccgcccccgcctgggccaagccagagcctgcctctgttctgccaggtggccgccgccgtggacggcggcgggcaggggaggaagaggctgctggtggtggtcggcggctgggacccggagacgtgggcgccgacggacgcggtgctcgtctacgacttcctgtcgggcgcgtggcggcgcggcgcgcccatgcccggcccgcgcaggtccttcttcgcctgcgcggccgtgggcggcgccgtgtacgtggccggcggccacgacgccgagaagaacgcgctgcgctcggcgctggcctacgacccgggcgccgacgcgtgggcggggctcccggacatggcggaggagcgcgacgagccgcgcgggctctgcgtcgccggacgcttcgtcgtcgtcggcgggtacccgacgcgggcgcagggccgcttcgtcgcctccgcggagtccttcgacccggcggcggcggcgtcgcccgcctggggctgggcgcccgtccacgaccgcctgctgcccgaggacggcgcgtgcccgaggacctgctgcgccgcgccgcggtccgtcggccgcatgtacatgctccgcgacgggcacctcgtggcgcgcgacggcgccgcggcgtggcgccccgtggcgcgggtgccagacgacgcgctcaccgcgccggccgtctccgccttccctgacggccgcgtcgtggtcgttgggtccgggtgccacggcggggaccagaccgtgtacgtgctccgcgaggagggcgggagacctgcgtcctggtcgcgcgcgccgccgccgccgccggagttcgccgggcacgtgcaggcctcctgcttccttgaactctgaactctgaagtggagggtgtgtacctacacgtacgtggtggctgtgcatacatgacggaactacgctaccgtacttgttgtgccactgctgcagtgctgctagtctgctactcatcacggttgtatatacttagcaaataaatcatcacggttgtatgtacttagcaaataaagcagcggaacgggaatgatgtttattaaagaacatttccaggctagtgtaattaattagcgatgtcttcgttggattggatcacaatttgtttgatccgatctgcatgtaggggactagggacaggaaactgctgctaccggcgcgcttgcaaatggctgctgaaaatgctgtgcactaacagcggaccccggccccagtttagctcagtggtttcagtttctagaaccttttgatggaactgttttggcgggacatgaaaggagagtttctgtttttgggacctc

SEQ ID NO: 1833 - DNA, 1565 bp, Zea mays
acggcgagtcagtctcagtgggggacggccgacgagccgaccgcctcagctctgcggctctgcctgctcacctcgttctcccggcgcggcccggcggggacggcaaccaccgcacggcgaataaaaaaacagaaccagcggcgccacgtccctgtcctcctcctctctctctccacatttcctctcccgataagagtgaggcctcggctcagcttgagcttcccctccctcccctcctgcgctccagctcccctccatcctcggccaaaaattctgcggcgagctccgatccggtgcgactactaacccacgccgcagaagccgcgcgtcctgatcgcgcgggggtcgaggagaggggaagcgcggcgccgcggttgcctgccaccgcaccgccgcaggagaaggaagaggagcccgtatccctccgccccgctgcccgccggaccgatggactccgagcactggatctcgcgcctggccgccgcgaagcgcttctacgcggcgcagctcggccacagcgatcgggccgggatggatgagctggagatggacgaggaggtcaggcccgagttcccctgcccctactgctacgaggaccacgacgtcggatccctctgcgcgcacctggaggaggagcacccgttcgaaccccaagccgcggcctgccctgtctgctcagagatggttacgaaggatatggttaaccatattactacgcaacatggatatttattcaagaatcgccgccggctgcgcagattcatcattccaggcagccaggccctctctttgctgagccgagatctacgggaagcccacttgcaggtgctcctcggaggaggcggacagagatccagcgacaacagcagcagcagcagcgccacgaacatttcggctgatcctcttctgtcgtcgttcggccttggcttccctacctcagacgcggagcaagcatccaagtcgactgtttccattcctgatgatgcaacgacggtgaaagaagcgcccgctcaggcacggaagctaagtatcgattcgtcgctcacaagtgaagaaagggagctgaagcggaagcaagcccgcgtcagagccacgttcgtgcaggacctgctgctctctactctattcggcgactgatgacgaaccagagcgagcctggtattatcactggaaggtgcagagttgatgtgggcgtgatgtatctttctaagttattgtaagccggtctctgtcttcacaactgacgatctgtgtgtggtacgcaccacgcacgcaagtcgcggttgtgcgtgtacgtctgaactctggagcattggtttgttgtaccaacataatgagtcacaacggcggatggctggctatacgtacactgcagtagtgcgtaggagcgattagaccagttccgaaactacagccatgaagcgcatggctgtacactgcactgtataggttacgatcagtgagttccgaaactgtgcttagaccggggctcctctgccttttctctttttttccccctttgatctctgatctggccttatcccaaacagaaagaaaattccacc

SEQ ID NO: 1834 - DNA, 1863 bp, Zea mays
ctcctccgtctccgttctcgtctccgaagacaagaagggaacacgaaccgccggagatgaacaccgccggcgagcctcctttggggcacaagtaagacggcgtatactgtagcgcttgtttggtcgtaataggcagggcacgccgcacgcgccattcatgttttggttgccgagtgaggacggtggttgtggttggttggagaggggaacgaagggggagggagggtgcggcggcggtgctgtaagtggcggtcatcgatgacgtttcggttcccggtgaagaaccagcagggcacgatcgacggcagtccgtttgcgccggcgacggcgagggtgtcgatgttccggaggctgatggtgcgggtgaccccggccgagcggctggcagctggggacggcaaggagagagagaaggacgagaggggaggggaggcggaggctgggtcggtggggctggacaagatggtgctcagcttcatggaggagtcctccgcggccgtggagcggccgtcgcgcgggcggtgcggcaactgctttaacggcaaccatcaggacggcagcgacgacgaggacttcgacttcctgccctccgcctccgcgcccgccgcggcgccggccgcgggcggcgacgccttggagctgctgaagggcctggtgcagtgcgcgagcacggcggagcggaacctcctggcggacgcgtcgcggatcgcggagcgctgcgggcggaagaaggcggacgcccggcgcgccgtggcggacgggctccgcgcgctcgggtacgacgcggcggtgtgcacgtcgcggtgggacaaggccccctcgcacccggccggcgagcacgagtacatcgacgcggtggtggcggaggcggagcccggggcgacggacggcgtccgcgtccgcctcgtggtggaggtggacttccgggcggagttcgaggtggcgcggcccaccaaggcgtaccgcgcggcgctgcaggcgctgccgccgctgttcgtgggcaccccggagcggctgggccgggtggtggccgtggtggcggacgcggcgcggcagagcctccgcaagcgcgggctccacctcccgccgtggcgcaagcacgagtacatgcgcgccaagtggctgtccccgcacgcccgcagcggcggcggcggcggcccggacgagacgccggcgctcgcgacgccggttcccgctttctccggcgtgttcgagccgcggttcggcgagaagccgaaggcgcccggcgacgacggcattcccgacggcggagatgacaagaaggccacggtcgtggtgccgccgtcgccgtggcggcccgaggcggctagcaagctgagcccgcagccgccgcaggcaaggaggaaggtggtgaccgggctggcgtccctgctgctgctcgccagctgatcaacccaaggagatacgctctccccggctccggctccggctccaaaacaaatttccaccttttttttttgttgcctcccttccctcgctcgcgttcgtcgatccgtccgagggccggctccaggtgttttagcggtttttttccggctcctcggaacagtgagagagaaagaaacgcctcccttttcccgtcgtttttttcttcttcttgttctttctgttcatgcgagaaaaaaaaaacaagagtttcagttgtccgcggccccgggggaacggaaggaatccggggcagttttggttgggtccccttgccctctgttcttgggaggaactgaagcctcggcctggcttgcagtgctgtaccgtgttcgtcaggtcatgtcaggcttgtgacttcaattgaaagaggtactactacagtagtagtaaagatactgtttctgttttgtttcc

SEQ ID NO: 1835 - DNA, 2336 bp, Zea mays
taataagatttatatcatatcaggagtaaatttctgagaacagggttcttatttcagggaaccgacgggtaggggaaattgcctgcaaatacgaagacgcgtagagctccgctgacggcaagtcacgctgcctgcactggcgtaaacgcgcgcctcgcagccccaaagcaagaacaactttggttagtttaactgccgcatctaccattcgtccattccaccccccatctgccctcaccagagcttccccttcctcactgtggtggcttggtgggggggatccgcgcctcccccatcgctggccagctcatggcgccccccgccgccggaggatctccaatgcgccgtgaacgtcaagtgcgccgcgccgccggcgctggccgcgggggacggcgagctccggtggctgcggcggtgcgtggaggcggcagcgaagggcttcgccatcggcgcaggcctcaagggcggcctcgcgctcttctccgtcctcgtccgcatccgcagccgccgctcccccagatcgaggaaggccggagctatgaccaacgaggaggccgtggtgctcgcggtcaaggagactgtgaggtatggcttgttcttggggacctttgccggcagctacgtctccgtcgatgagtacatcgccgccgtctggggacgtaagagaacagcaaggtggaggtcatttttagctgggttgattgctggtccttctatgctcctgacaggaccaggaactcagcatactagcttggctatatacattctgatgcgtgcagcagtgcttgcatcccgttgtggaataaagagcaagcgttttggaaagatctgtaaacctttgacttggtcacatggtgatgtcttccttatgtgcctctcatctgcacaaattttgtcagcatacattttaaagcaggacagtttgccatcatcatataaatcatttctaaacaagcatggtggaaaagatcttactattttgcaaggtgtgaaggatgtagtcaaccacactgctttcagtaacttagtgggtatcgagaagtactacaaatctgttggtgttgacataaagctagatccaaacatgaaagtgccttgctcaattgtgcatggtaaccagtcatgtacaggacatgtcttttcattcttgttacaagcatatggaagagcagttcctgtatatgttccagtctacttagtccctgcacttgtagttcataggcagcatctcatgaaaaggccttactcaattatagggaagagttttctaggagtagcaagatctagtctgtttctctcagtatactgtgcatctgcatgggcttggacctgcctgctttttaggatcttccggagagccaatacccctcttgtcatccttggcacgtttccaacaggtctggctttgctcatcgagaagaagagcaggaggattgagatatccctgtactgtcttgccagagctatcgagagttttttcacatggatgaccgatgcaggactctgccctccaatacttcagataaagcgagctgatgtggttgtgttcagcatagctacctctatcattatgcactgctatgcgcaggaaagagaagtcttccggtccaagtacctgaatgtgctggactgggtatttggtgtgccgccaccacccgacagtgaggataagaactgctatctaccagatgaagccaagaaatgccagtgacatactggcttgtagagttcattgcatgatttttgtatggtcacccatgtgatcctagcgcgagactagacccattagagggtttagtgaacgaaccttgtacaggactcttcggaaaatcgggactttagtggatatagcaagatagattttttaattaattgatttgtccaaacgatgccctggtcattaaatgaccatatgtggttgtaacttatgacctttattgttgttgttgtcatgcgaatataacttatggtccttgaaattgtttaaatggaatttctcattcttttgttttcttatagaccgttctggctgaagaacttggagatggagttcagagcttgcacaattgaccacatctcccgcccatagactcactttaccaagccatctccagcaggtcatgtaaatgactgtttataccgtttgcagagtgaagtttgaaataaggagtatgatatggagtatgatggagatagtctacgattttcttaattagagatgagggttaagggtagcaatgggctctaaaatttatactggcaatttaaggattgaactctatttatgtacatttttaactaaaattaattaaggactcgaatgaatcgtggatcca

SEQ ID NO: 1836 - DNA, 2771 bp, Zea mays
gcttcgcttccaggcttccacagtccacaccaccaccccactccgcccagctccctcgagcgcgcagcgcggcggtggcgatgccgagctcccggcggactacaggccgcggcggtgcaggcgcaggcgcaggcggcgcgggggcgggtgatgcaggaggcggcgacggcgaccgagtgccgcggttcatgggcaacaaccgcgaccacaacccgcgggagctgcgctcctgggcgcgccgcacggggttccacccctcggctttcttctcgggggagtccaactcctccttcgcctcctccgccgcgccgcagccaccgccgccgcctcccccggcctcctcgcgtcgcccgccgcgcccgccgccggagcgggaccccgatccggacgcggaggatgacctcgatcccgcgcccggccgcggacgcggcagacgcccgcgtcgacgcatcgacctccgcggcgagctccagatcccgccgggcttcggccgcgaggaggcggtgccggggtcggcggagccggacgcgcggaggggaggcgcgcgcggggacgccacccggaggaacggcggcgtcgagagaggccaggcgccggccaatgccggccggaacggcaacggagcgctcgcggacgcggacgcgaggaagaaggccgaggacgcagaggcgaagcggaaggcggaggaggccgaggcgaggaggaagaaggaggacgaggagagggatgccgagctggctgcgtactaccaggagcagtgggcgaatgaggatgaaggagctgcgggcgctgccgccgccgctgctgagacggccccgctgtatgaggcgtcgggactccggtgtggtgtaaccgagaaccccggatgggcacccctcatattttatggcatacaacattacctgtcaatagctggttcgcttgtctttgttcctttgatactggtacctacaatgggtggctctgatgaggatactgcaacagtcatctccaccatgttattaatctctggtcttactacaatactacatacttttttgggttctcggcttccactgattcaaggaagctcctttgtatatttggctccagcgttggtaattgcgaactcagaggagttcagaaatcttagtgacaataaattcaagcacataatgagagaactacagggggctatacttgttggttcagtatttcagataatattaggatacactggccttatgtcactgtttctgaggttaataaatccagtagtggtggcaccgactattgctgcagtgggtttggcattttttagttatggttttcctcaggctggcagctgtgtagaaatcagcatgccgctcattctgttggttcttctgtgcactctgtacttgagaaaaatatccctgtttggcaaccatatcttccttgtctatgcggtgcccctcagtgttgcaattgtatgggcatattcattcttcctaactgcgggtggagcatataacttcaaaggttgcagctcaaatatacccagttcaaacatattactggattcatgcagaaggcatttagaaaccatgagacgctgccgtactgatgtttctagtgcatggagaactgctgcctgggtgaggattccctatccgttccaatggggcccaccaacatttcattctaagacgggtatcatcatgataatagtgtcgctggttgcttcagttgattcgctttcatcgtaccatgctgcatcgctgctggtaaatttaagtccaccaacacgcggagttgtcagcagagcgattgggcttgaagggatttcaagttttattgctggagtgtggggtacaggtacaggatcgataacattaacagagaacatacacacccttgaaacgaccaaaatggccagcagaagggcattgcagcttggggcagccgttttagtcgtctgctccttctttggtaaaatcggagctctcctagcctctatacctcttgcattggccgcctctgttctgtgcttcacctgggcgctaatcgttgcacttggcttgtctacgttgcgatacacccaagcagcaagctccagaaacttgataatagttggatttaccctattcatctccctgtcaatccctgcatactttcagcagtacgaacccagctccaatcttatcttgccaagctatcttctcccttatgctgcagcgtcaagtggaccagttcgcacagccagcagtgggttgaattatgcagtgaatgcgctcctatccatcaacgttgtggtggctctccttgtcgcgttgatccttgacaacactgtgccaggcagccgacaagagcgcggtgtgtacgtttggacagatcccaaatctctcgaggtggatcctgctaccttggaaccctaccgattgccggaaaagatttcgtgctggttcaggtgggcaaagtgtgtcggcatgtaaaggttctcaaagtcaggggccgcgatgaaaatattctatttattccattggtaccttgttactgtaggatttactatatgagaatatataatatatatagatacagatgctacatagttaggggcctctcttgctgctgttaggttaggataagcacatgtaaagttttggtcatgttagaggggacacgttctatgagctatgctatgtaagtttgtagaaatgctacgttcaaatgaccagtcaccgagtttaaccgttacacacgtccgtgttgacgcttttatgccttgtttagataccgcgtattcacctgcc

SEQ ID NO: 1837 - DNA, 3062 bp, Zea mays
ggccagtcggcccaaccacgcgtaccccttcgccttcctcagcgcgtcctcgtccggcttcctccgctcgatgcagcagcagcgactgcaggcggcgctcgacagaaaacaacacggctgcgaccggatctcaccggaaaagttgaggagtggagggtcttagctgccggagttgggtaatacctccctatatcccctattggtaggtccgccgctgctccaacctccaggtccaggcaccaggtcgctcctcccttctcttcccgtcgggttcttgtccatcgtagatagcctctccttcgccgaggtcaccagttcctcctcgtgtccttctcgctagtcgctacagtcctcctactctgcttggctcgagtggaatggggatccatcctgacctgagtggtttcttctttgcttggtaaggaacccttgctttcttggatggatctttgttctgcggattgtctaaatctcaattttcttcttcctccacgcaggtagtcgcgcatatttggtagccgcgtccgcgtgacgtcgtcggtgcttgggtccattcagacattgttcttatttgatcagtacccctatttagcgcctgcaagatcgagatcgatcttacttgactccataagatgtattggggatttggagtgccttgtactccaacttaagactgggagtgaacccgcataccccaagcccgcccttccaccgaactgaactagacatcctcaagcgtcatcaattctaatggatgatgcagcagaaaatattcttgcatcacttggccgtgtgcatctcgttgatctaatggcctctgagggccttccttctgacagctataagatgtgtgtgtcgactctgatgcagtcactcgctcaatattcggcagccatcattcagctgtcaccagctgatggtgccttgttgaggtcaggtttggactcggctcgctttttcttccaccagcgagggtataattcaaatgaggctgtacactcggatgattcccgtgaatggtgcaagacctctggttactatgttgattctcagatgtgtctggaaatgtatgattacaggcctggtattactgcaactgatcccagcggtgaaatggaattacctccatcaggtttgcctgacatattttcggtgctgggtaaagtttctcgagatatattggacgcaatcagtttctcattgaatttacgtagctgtgcatttactgagatactcgacaacatacccttgagaagccaggaagtatcatcttctgttctttcagcatgttgtcattcaaggccatcgcttgaaggaggacatcagcatagcattgcttctcaagataatggtcacttgctcatgttttctgagcaggagcaacagattgataagactttgcttaccctagttaagtcagatatgtcaggtctatatattaaagacttacatggacactggattcttgttgatggagatattggtccacatgatgttattgtctattctggccttgcactttatcaggaaactgctggctatgtaaatccagctgtacataaaacagaggttggaatacatggatgtatgtttgggcgatgctctttgatgttcaagttcatgcctagatcagttgcaaggctgagtggttcagagatgagagctgctggccatggtgttgatgcccagtttcaggttcccatacaagttaatgatttcatgcagacagatcgtttttctgatcaactgtttcctaagactgaaccatcattacacacagaacaagattcagcatcattcaactccgtgatgaataaaaagaagggaaatacaagaacaaagccgctccctccttctaaaagacttcgccaagaagcacagagggtcctgaaggagcgtgttcaggacattgcagataagaaaggcgtcaagctgagattttgcaatctcaaggaatgtgaaagccacatcctgtcattggatagtccatgtgagaacacgagaactgaaattggatggccacaaggggttccgtttgtccatccacatgacctcccaaacaaggcaaagcttgggtttttggaagcttacgaacctggatggacggcctcccaacaagaaatggagttggacaactgcttgcgacattgtgaacctcatcctgatcattccagcctgttctcaaaccaaattgttctaccagtccattgcaccctagcaaagtctgaaatttgtgttgattcagccttgtgctctgccctggagtatcagtcactccaaaaaaaaactgacttggatggcacctagccttctaaatgacattcgtaaaagtgtgctgacccaagattgtctaattcaaggttagttttggaaccccattttcccaagggatttctattttcccaagaaaatttagttcaaaatgaaaatccattaagaaaatagagttcccaaactagtcctcagagtgattttgttctgcgctaatatatcgcagtgcgcagtggccctgagctttcccttgagttcaatattgtagcagcagctgttttaaagtcactctcgtggttgtgtttcatgtggagtcgcagtttgccacgatttcttaaacaatcaagccatcgagactctagaggagccagcctcagtaaattttgatgtattaccaaccttggatatgttttgaatttcggggctggtcatcaattcattccttcaacatgttgcagaagcagtaatgtatactgacgccaaataatttgtatacatagatgtagtatttgagaacgtgtaaatgcgactacccgctgcttagattgaaagttagattatataatctgggtagattataatcctaaacaaacaggcctttaatccataatgcattatacggaaatgtttgtaatatacttcgcaagttcgcatcaacaatgacaatgctgatgtggagatgtttagaaggagatggagaaaacacaattaaaagtcaagcaataagagcaacaagaaaagacacaagatcactctctcatgttactaatcattaataatcactagtcaca

SEQ ID NO: 1838 - DNA, 381 bp, Zea mays
atgtcctggccgacgtcgcctccatctgcacgcgcaggcgcgggcggccagccagccgctgccgcgggcggcgcacgcgcagccgtccagcctgctgccttggtcggccaggcaggcgttgccttgggcggctcacgcgcaagcagcagccaggcgctcgctgccttgggcggcgcaggcagccaggcgctcgctgccttgggcggctcacgcgcaggcagccaggcgctcgctgctgcgggcggctcacacgcaggcggccagcctggcgtccccgcggtcggcgcacgcccaggatttcagccagcggctggacagcgcgcggccgggtctggacgtgctgcatcgaccaaaaaagctagagatgatgatcaggtataa

SEQ ID NO: 1839 - DNA, 2021 bp, Zea mays
gcacagcaaaccatgcatactacagatctgcattctgcagtggagagctgctggatcggaacctccccggcgccgccatggccgcagcggtcactgctgctgtcttcgttctcttcgccgccatgagtactacgcgagcgcctgcggcactcgtcgagcaaaccttcgttgtgagccagatgagcatgacacacctgtgcagggagaccatggtcaccgtggtgaacgggcagctgccggggccggtgatagaagccaccgaaggtgactccgtggcagttcacgtcgtgaaccagtcgccccacaacctgacaatacactggcacggggtgaagcagcagcggaactgctgggccgatggcgtgccaatggtcacccagtgccccatcctgccgggccacaacttcacctaccggttcgacgtggccgggcaggaagggacgctgtggtggcacgcgcacgtcttcagcctccgcggcaccgtgcacggagccttcatcatccggccgagacgacgcgccgacgacgactcgtattacccgtttcccaagcctcacgcggaggtccccatcgtcataggggagtggtgggagacggacctggagcagatggacagggacttcgcgcacggccacctcgacgaccagcccagcgcggccaccatcaacggcaagcttggagacctattccgcgcctgcgagggggccggcgtggaggacgggtacgtgctggacgtcgagcctggcaagacgtacctgctacgggtcgtcaacgccgccctcttctccgagtactacctcaggatcgccggccacgtgttcacggtggtcgccggcgacgccaactacgtcaggccgtaccgcaccgacgtcctcgccgtctcgcccggcgagacggtggacgccctggtggtcgcatcagcgcgccccgcctcgtcgtactacatggtcgctaagcccatcctgacgccgccgccggacccccagatcccggcgttcgccaccagagccacggtgcggtacacgacggcgtacagcagcggcgcgccgaggtcgtcacgtcgtcgtcgtccgagatcgtcatcagatgatgacgctcctgtggcgcccgagatgccggacgactacgacatgatgacgtccttctacttccgcggcaacctgaccagcctgcgccggcaaccggttccgtcggcgcaggcggacgagcgtatgttcgtggcgctggcgctcgggtccgtctgccggcggcgaggccagcggtggtgcgagcgaggggacagcgacgagaccatcaccgtggcgaccatgaacaacgtctccttcgagctgccgcccgcggcggcgacgaccccgatgctggacgcgtactaccgcaacagaagcggcaacggcgtggacgacgacgacgacgacgtggcggtggtggtccggctccctgacgtgccaccgagggcgttcaacttcacggaccgcgcgctgcagccgacggggcccgaggaggaggagctggagccgacgagcagggcgacggcggtgcggcggttccggcacggggccgtggtggacttggtgttccagagcacggcgctgtggcagggcgactccaaccccatgcacctgcacgggcacgacatgttcgtgctcgcccaggggctcgggaactacgacgcggcgagggacgtggcgaggtacaacctggtggacccgccggtgaggaacaccgtcctcgtccccagcctcggttgggccgccgtcagattcgtcgccgacaatccagggatgtggttcatgcactgccactatgatttccatttgtccatgggcatggctgcagtgttcattgtggaggatgggacgacggctgacacttctctgcctccaccgccggcggtagtctcatcgtgtagccatggcaatgttctgatgcctggagaaattcttcctcaaagctaaatgaccacagctgttcatgcatacgcgtgtggcgagtctaactctcggcaccagcttgatgattag

SEQ ID NO: 1840 - DNA, 1108 bp, Zea mays
cggtccggcagtgcctagctaactagcaatggcgcgccagttgttcctccatccggtcctgctggccgccgcctgcttgttggtctcggtcgtcctctgcaacgccggcgtggcgcaggcggcgtggtggtggccgaggtgggacagcctgttcccgagccgcggccagcagcagcaccacggcggctacgactaccatgacaacggcgacggcagcagcaagagccgcgtggcgtctatcgtgacgcaggagctgtacggggagatgttcaagcacaaggacgacgcggcgtgccccgcgcacggattctacacctacgcctcgttcctcgccgcggccgcgcggttcccggagttcggcggcgacggcgacctggccacgcggaagcgcgaggtggcggcgttcctggcgcaggtctcgcacgagacgaccggagggtgggcgacggcgcccgacggacccttcgcgtggggcctctgtttcaaggaggagatcacgccgcccatcgactactgcgacgccagcagcacgcagtggccgtgcgtcgccggcaagtcgtaccacggccggggccccattcagctgtcctggaacttcaactacggaccggcggggcaggcgctgggcttcgacgggctgggcagccccgacgtggtggccgccgacccggaggtggcgttcaagacggcgctgtggttctggatgacgccccgggcgcccaagccgtcgtgccacgacgtcatggtggggcggtaccggcccagcgccgcggatgttgcggccaaccggaccgcgggctacgggctcaccaccaacatcatcaacggcggcatcgagtgcggcaagagcggcgtcccgcaggtggacgaccggatcggcttcttccgggagtactgcaagctgctccgcgtcgacgtcgggactaacttggactgtgctcagcagcagccttactcttcctaattaatcagtccatcgaacgattaattgtactcctcctcctgctgctgctgctgctgcttgtctttaatttcggattttcgattcgagtcgtacgcgctgagttatcattgacaacatacgtacaataatgatgagcatgaaggg

SEQ ID NO: 1841 - DNA, 507 bp, Zea mays
atgaccaagcagaggaccgagcaggggatagcggctgtcggaccggcgtgtctagcccgaggaagacgacggaaccaccccgagcgagagactagagccgacggcgttgggcatatgagccagggagagcgcgcaccacgcgtggctagaggaggaccaactgacagtcggcgcgagctcaatggcgcggacagagaggaactcggcgtactggagctggaggccaagcccgacgagatggggcgcgcgtttcagggcgggacttcgggtggcggtgcgttgggagatggcctaagcgagcttgagcaggctgggagtttgaaggcgagctccaccaccaggggtaaagaaaggggcggccatcaggggcgcgagcacaggaagcaagagcgagctccatggctggaagctgagagcgagcccgagcagccagggaaggagctgcgcacgaccaacagtgaggaaggatgcccggccaccaggacgtggcggtggtcgaccggatga

SEQ ID NO: 1842 - DNA, 1596 bp, Zea mays
ccagaacgtgtgttcgcgtgcatctccacgccgccattgcatagtagctgcatacaatccttgggccgctttctccctagcaagttgcggcagcagccacaaggttcaacaggcatcttttgttgagcttcttaaattcaacgacgcgcaaggcaattcttccccccccccccaaaaaaaacacacggtgcggcggaaggaagcagccatggcgctcacgcctgtcttgctcctcctgctggcctactgcctctcgggcgtgagctcatctgcaggcccgccgccacgcagcttcacctccctgttcgccctcggggactcgtacatcgacgccggcaacttcgtgaccatggccacgccggtcgctccggtgtgggtcgacaagcctccctacggcatgaccttcttcgaacgcccgacggggcgcttcagcgacggaagggtcatcgtagacttcgtagccgcggcgcttggcgtcccgttcctcccggcttcgctagccaacagctcggacgacgacgtcgcgcgccgcggcggcgtgaacttcgccgtcggcggcgcgacggcggtcgacgtcgccttcttcgagaggagacggctggtgccgttcaagctgctgaacaactcgctggacgtgcagctgggctggttcgaggaactcgagccgtccctttgcaacgccacggcggaaactgcaggttcttatggtggcggacggtgtttcagcagatcgcttttcttggtgggcgagtttggggtcaacgactacaccttcctatggacggcgaacaagacggagtccgaggtgatggcgttcgtgccaagagttgtgagaaccatcgcctcggccgtcgagaggctcatcgtccgcgacggcgcggcgcacgtcgtggtgacggggaacccgccgatcgggtgctcgcccacgctcctcaccctgctccgccggacgagccgccccaccagcgcggcggacgacgacgactacgaccacatcggctgcctgcgcggcgtcaacgacgtggccaggcaccacaacgcgctgctcggcgcggccgtggtcggcctcagggccaggcatccccgggccaccatcgtcttcgccgacttctacaccccgatccgtagaatcctggaaaaccccaaccagttcggggtggtggtcagtgacgtcctgaaggcgtgctgcggcaccggcggcgcctacaactggaacggcagcgccgtgtgcgggatgccgggggtgcccgcgtgcgccaacccgtcggcgtacgtgagctgggacggcgtacacttcacggaggccgtcaaccgctacgttgccgaggggtggctctacgggccctacgctcatccgccgatactcaaagccatgcgacggccctagccgccctacaagcagcagctcagctgctgacaacaaattaaaaagagatcaatataactggctgattaagggtctgtttgtctgtataagctatgtaacagctgttgcgctgagaaaactcaaagctatttggttgaaacaactttcaacaatcaattttgtaacaatatgatgcctgcttggtttctcaaataaaccgattcgacaac

SEQ ID NO: 1843 - DNA, 2094 bp, Zea mays
ggcgtgggggcaagccgagaaaccaaccaccgcctgccacccacgaggccacgaccacgagcagcaaccgccgcctgccagcagttctgcttcctcttccttccctctctctgccccagaggccagacacagcgtccccgaaatctagccagccaccgcccaccgcctccctcctccccgcctctctctctttctctctctgcgccaagaaagagaaggcgccacgttgacattgcggatgccgtagcgggggcgcgcgcgccagccatgcgctcgtgatgatccggccgttccagaagatcggccacggcctcgaaaaggttctcgtccaggcgccggaggtcgtcgtcgccgccgtcgttggcctcggacggcacgggcgcctgcctcctcgatggacgcgcaggcgcagcctttcaccaggcgggcgctgtccaggagctgcgggtccaaggggagccggctgtccgttgaccatccgccgccgccgctggccggcggcccttcggcggacaagggggtggcagggagctcgtcctcgctcgcggtgccgcccgagccggcccgtcgtgagggcccgccctcagacgcggagaaggtgagggagaagttctccaagctactgctgggggaggacatgtccggcaccggcaaaggggtgacctctgctctcgccctttccaacgccatcactaatcttgcagcttctgtgtttggtgagcagcgccgtctgcagcccatggccgacgaccagaaatcgcggtggaagaaggaggtcgactggcttttgtccgtcgccgaccacattgttgaatttgttccttcgcagcaggtcgccgagaatgggacctccgtggagataatgataacccagcaacgtcaagatctacagatgaacatccccgcgctgcgcaagctcgatgcgatgctccttgaatacctcgacagtttcgcgggtaagcaggagttctggtatgcgtcgaaagacgcagatggaccgggcaagggcagcacgccgaggcaggacgacaaatggtggctcccgactgtcagggtccctcctgacggtctgtcaggtgcatacagtaaatggcttcagaaccagaaggacctcgttgcgcaggtgctcaaggcagcaatggctatcaacgctaatgtccttatggagatggaggttcctgaatcgtacacggagtcgctaccgaagaatgggaagtccacccttggggattcagtgtacagacttataaccgacgatcatttcgaccctgaagaactgctacgctccgtggactcgtcggatgaacacagcattgttgatctgaagaacaggatcgaagcctcagcagtcatctggcagaagaaaatgacccacaacaaggacagcaaattgccctggggacatagtcacgagaagcggggaatgttcgaagggagggcggagaacgttcttctcctcatcaagcacaggtttcctggcattgcccagtcggcgctggacataagcaagatccaatgcaacaaggatgttggccttgccattttggagagctactccaggactctggagagcctggctttcacggtcatgtctcggatcgaggacgttctgagcgcggacttggccgctcgagatctcaggaacacggaatcgatgagaatcgccgccagcttagcttcggacgacaccgacaaggtcgtctcagacgctaaagccgaggtagagaagacggggagaatggagccggtttcgccggcgctatctgacttggtcggcccgaagctgacgaagatctcgccagttgcaaccaagaggttttcgtaccttgagaatctgggtggaacaagaagcccgatagcaagacactagctgctgtaggtagggggtgtagtgagggtagatggatcatgccgtcgcagagccttcggaagaagctttgtacatagcatagatgcccactgcgaacgtttgtctaacgataatgtgacatctaatcgactaatagaggcagaagttcttagagcgcaaacattatcaccaaaaccatgccctgccctggctttcataatcactttatttaacacttttatctt

SEQ ID NO: 1844 - DNA, 1871 bp, Zea mays
agcccctctcatcaatcagtcaccatgctcccctccccagtagacgccagcactgtcgtcagcaagccccatccgcccacccgcttttatttatatctacgagaacaacaaacacatagcggcgaccggcgacgagcggaagccttcctccatcttcaggctgctagtactcagtagtcagtacagtacagtggtgccgacgacatgacgaagatctcccgctcgttgctcgtcgtcatcgcgctggtcctcctcggccctcacctcccgccatccgaggcgctgacgcccaagcagggcgtcaggtccaagaccttcctgtccccgcccatcctgcttcgcccgggcgacgtggccgacaagttctactacgacatccccttcccccggggccacctggcgctcaagagcttcaacggcgaggtggtggacgagcgcggcgcccccgtgccgctccacgagacgtacctccaccactgggtcgtgcagccctactacgccctggtagtatcggcggagggcggcagcagccggccgcggaccatcccggcgcgcaacgccggcgtgtgcagcggccacacgctgggccagtactacgggctggggtccgagacccggcgcacggccacgtgggtgcccgacccgtacggcatcgagatcggcgacccggccgcggcgcccgccgagggctacgagcagcgctggctgctcaacgtgcacgccatcgacacgcgcggcgccgccgaccggacgatggcgtgcaccgagtgccgctgcgacgtgtacaacgtgacggcggactggcgcgggcacgccatcgagcccgggtacgccggcggcctgcgctgctgctacgacggcacgcggtgcggcgccgcggcggagggggctgaggggaaggccaggactgtgttcctgcgctacacggtgatgtggcgcgactggagccccgcggcggtgctgcccgtgcggatctacatcttcgacgtggccggctgcggcgtggagtacgacgtggaggagcagtgcagcggcggcgcgggcggggagtgcgtgcacgtgaagacggccacgcaggcgctgccgcggggcggcgacgtggtgttcggcgtggcgcaccagcacgcgggcggcgccggcgcgtcgctgcacggcgccgacggccgcctgctgtgcgagtccgcggccacgtacgggggcgggcgggaggccggggacgaggcgggctacatcgtcggcatgtccacgtgctacccgcgcccgggcgccgtcacggtgcgcgacggcgagccgctcaccgtcgtgtccaggtacagcagcgaccggcgccacacgggcgtcatgggcctcttctacatcctcgtggccgaccacgcccggcagctgccgccgcaggagggcctgtgcttcagcttcccggtcccatggtgcctaccgtcatggctgtcgagcaacctgtgagatcttttggtgttgaaagctggtgctatgttctaattagctgcttggttagggttcggttcggggctggtgatggtagggcaaagcaaggaaggccgcgtgggtccttgcgttactcatacagtagtagtaatgtaaaaatatagaagcagcggtcagtctactctgctgttgctgtattatacaataaccacgtcgctccctccgtttgacttctccacgtgctgccgttgttgctcaggagtcaggagtctggacatgttcggttacatcggaactattctgaaactattctaaatgatcaattattatataaactaaattatcattctgaatcgctgtcggtcaaactcagcatcgacgtcgttaccatgttgacatgacatccggtggatttctctgtaaatcca

SEQ ID NO: 1845 - DNA, 2509 bp, Zea mays
gtttgaagagaaggcggatgggtgatggtgctagcaaggggaggacgacaattgaaaacaatatgtcatgggatggtttcttgcttattttgcacatttgtgtgttgcgttttcttgcttattttgcacatccgtttcagtttgatgtaaaaaaggtaaccctagctaacgtggcagacctcaaagcatcactcacacaccatcgtcctctccttttgccagcaccgcgaacccgccaccagccttctcccacccacgaagtacggaaggctgccggaaggagctctcacctcacatccatctctgtcgcgcccgtcatcctcctcctcctcccctcctcaactgctatcggatttgcgctgcagtggagatcgacccgggctgggaatttctttcgttggtaaggaaccctaatttggtcggatgggattttcatcttcgacgaagcccgcgagattgatcgaccttagctgacgcgagggattggaaagcgaacgctcgggcgtagttaattttctaggaagattggggtttcagctcaaacccccatgctcgatgctgaggacgaccctggcgggagatgacgaggatcttcgtgcagcgcgggaccgccggctcctcgtccagctccggccgctcgggctcgcaatcagcgcagcagccggcagcagctgcccgggaggagttgccgttgcaacctcagccacagctaccagaactattggctatagatgatgtaactgagcatttaaatgagggcaacgagaacaacagtagcagaattaagtttttgaggacggatgacaccatttcagagagctcgagctacgcagaggagagggctgccagggagaagcctcctaaggatgactctaatgtaatcaaccccacttccttggtagaggaaccgatagtgctccatacccctgatcagattgaacatggaaattctgtgccgtcaggaactaattcatcacagatggtgggtgcagcatcgcacccgccgccaccgccagctccgcctccaaaatcattgttggggaatagtgggttgtggagaatgggacctggaagttccaacagtgtgcggattggatctccaagaagaccagtagcttggccaccagtggcagctcggacatctgcttcaggttctcgtccttcttcgcctaggtcactcgttgatggtgaaggttacaatagtgctgatgaacagggtccctgttacgcctcgagttatgatgattcggaaagagagcgtatgtttgagcatgacctaaggcgagtgaaagggttggaaatcagaaagacggccgaagatgggaactgtctattcagagctgttgctgatcaagtttatggagatgcagaagcttatgacatggctaggcagatgtgtgttgattatatggaaagggaacgggatcatttctctcagtttataactgaaagttttacattatactgcaagaggaaaaggagagacaaggtttatggcaacaatgttgagatccaagcatttgcagagatgtacaatcgtcccattcacatatattcctacagtacagagcccattaacatttttcaaggaagctacaacacagacactcctccaattaggttaagttaccatcatggtaatcattacaattcagtggttgatccccgccgacagactattggggcaggccttggatttagctcttttagagggactaatgttgacagggatcaggtgaaggctgcaataaaagctcagcaagaccagcaaattgataatgcactgatggcagaagggcgattctactctgatctggagttaacagagagggaaatagaacggatggtgatggaagcctcgcgttcagaatatctggccaaggagaaaaagcttaacataagggaatcatcgacatcaggggcagagccatcttcatccgctgcaattagtggttcctctcgatcagttgctggagcggacagaagcagcgaggactactttgtgcttccagacactgtgctgactcgcagcatgcagctgcttctcgcaatgggcttcggctacaaccaggtcatggaggcctacagcatattcggcgaggatgtggactcgatggtctgctacctggtggagaccggaggagcctcggcaggtggtagcaatcgccggaaaggaaaggctgctgagtgatgtgtgcaccttcattgctgtgaatgtaattgatggaaaacgttgggcacaactcataccagataatgacagccttatgagttgagatgtcgatatacctgctaccttatgggtgatgaataaatggaactcacaactcttctcgatgccttctggtgatcaagttaaataattaatgatagttggtggttgggattctgggaaaatttgtgggtcaccctggtgccctcattgtgatttttgtgggaactgcgaagctcgtggtgtatgtggggtgtgaacattctctatatcttttcatctttaacgtctcctaaa

SEQ ID NO: 1846 - DNA, 4440 bp, Zea mays
ttgttgccctgccccccccccccccccccccccccccccagttaactgccgcttcaaagcagcaggccagaaggcattgccggctgatggcctgacccactacaacgagcgaaacctatcgcctcctccgatcgccattaacgggtcggtggctctgcgccaccacggcaccacctgtgcccgcgcggacgagacgctgctggcaagctcaccgcccctacagtcgacagcgagcacggcagctagcaggctagcgcacaccgaaccaactcccttttggccgtttcaaactcttttaaagccccaccagctggtgcaggcaccgtcatcactcctaggctcgaccgctcgaggccgaaaggcacgaccttcggccagtcgagcagctgggcgcgtggcgcggccagggacgagggcgccatgagctcgccggagaatggcgccgccccggaggccagcgggaagaagaagaagaaggcggaagaggaggaggtggtggccaaggtgccgttcctgaagctgttctcgttcgcggaccggtgggactgcgtgctgatggcggtgggctcgctgggcgcgtgcgcgcacggcgcctccgtcccggtcttcttcatcttcttcggcaagctcatcaacatcatcggcctcgcctacctcttccccaccaccgtctccggccgcgtcgccaagtactcgctggacttcgtgtacctcggcatcgtcatattcttctcgtcgtggaccgaggtggcgtgctggatgcacacgggcgagcggcaggcggcgaagatgcggctggcctacctgcgcgcgatgctggaccaggacatcgccgtcttcgacacggaggcgtccaccggcgaggtcatcaacgccatcaccagcgacatcctcgtcgtccaggacgccatctccgagaaggtgggcaacttcatgcactacatcagccggttcctggccggcttcgccatcggcttctcgcaggtgtggcagatcagcctcgtcaccctcgccatcgttccgctcatcgccatcgccggcggcacctacgcctacgtcaccatcggcctcatggcccgcgtgcgcaagtcctacgtcaaggctggcgagatcgccgaggaggtgatcggcaacgtgcggacggtgcaggcgttcgtcggcgaggagaaggccgtgaggtcgtaccgggaggcgcttctgaggacgtacaagtacggcaagaggggcggcctcgccaagggcctcggcctcggctccatgcactctgtgcttttcctctcgtgggcgctgctcatctggttcaccagcgtcgtcgtccacaagcggatatccaatggcggcgagtccttcaccaccatgctcaacgtcgtcatcgctggcctgtcgctcggccaggcggcgccgaacatttcgacgttcctgcgggcgaggacggcggcgtaccccatcttccagatgatcgagaggagcaccgtgaacacggcgagctccaggacgggccgcacgctgccggtggtcgacgggcacatccagttccgcaacgtcgacttcagctacccgtcacggccggacgttgtcatcctcgataggttcagcctgaacttccctgccggcaagatcgtcgctctcgtcggcggcagcgggtccggcaagagcaccgttgtctcgctcatcgagcgcttctatgagccgctgtccggctccattctgctcgatgggcacgacatcaaagagctcgacgtcaagtggctccgccgccagatcgggctggtcaaccaggagccggccctgttcgcgacgagcatccgggagaacatactctacggcaaaggcgacgctaccgcggaggagatcaaccacgcggcgaagctgtcggaggcgatcacgttcatcaaccacctccctgatcggtacgagacgcaggtcggcgagcgcgggatacagctgtccggcggccagaagcagcgcatcgcgatctcgagggcgatactgaagaacccgtcgatactgctcctagacgaggcgacgagcgcgctggacgccgagtccgagaagagcgtgcaggaggcgctggaccgcgtcatggtcggccgcaccaccgtggtgatcgcgcaccgcctgtcgaccatccggaacgccgatacgatcgcggtcgtcgacggaggcaggatcgtcgagacaggcacgcacgagcagctcatggcgaacccgtacagtgcctactcctcgctgatccaactccaagaggctgcccagctccaacacaagccttctttgtctgacagcgcaagcattaccaggccactaagtttcaagtattcaagggagttgtccgggaggacgagcatgggcgccagcttccgctccgacaaggactcaatcagccggtacggcggcgccggagaggcgcatgacgaggtgcgcaaggggaagcccgtgtccatgaagaagctctactccatggtgcgcccggactggttcttcggcctgtcgggcaccatcagtgccttcgtggccggctcccagatgccgctcttcgcgcttggcgtcacgcaggcactggtgtcctactacatgggctgggagaccacgaagctggaggtgcgaaagattgccgtgctcttctgctgcggcgcggtgctgacggtcgtgttccacgtgatcgagcatctcagcttcggcatcatgggcgagcggctcaccctgcgcgtccgggagaagatgttctcggcgatactgcggaacgagatcggctggttcgatgataccagcaacacgagcgccatgctgtcgtcgcggctcgaggctgacgcgacgcttgtgcgcaccatcgtcgtcgaccgctccaccatcctgctccagaacgtcggtatgatcgtgacgtcgctcatcatcgctttcatactcaactggagaatcacgctggtcgtccttgccacctatcccctcatggtcagcggccacatcagcgagaaaatgttcatgaaaggctacggcggcaacctcggcaagtcctatctgaaggccaacatgctcgccgcggaggcagtgagcaacatccggacggtggctgccttctgctccgaggagaaggtgataaagctctacgcggacgagctcagggagccttctaagaggtccttccggcgaggccagggcgccggcctcttttacggagtctcccagttcttcctcttctcatcctacgcactggcgttatggtatggttcagtgctgatgagcaaggaattggccagcttcaagtccgtgatgaagtccttcatggtgctcatagtgacggcgctggccatgggggagacactggcaatggcacctgatatcatcaaagggaaccagatggcgtcctcggtgttcgagatcctggaccgtaagaccgacgtccggatcgacacaggtgaggacatcaagagggtcgaggggctgatcgagctgcgcggcatcgagttccggtacccgtcgaggcccgacgtgaccgtgttcaagggacttgacctgctgatgaaggctggcaagagcatggcgcttgtcggcatgagcggctccggcaagagtaccgtgctgtcgctcatcctccgcttctacgacccgatcgccggaagagtcttgatcgatgggaaggacgtcaagaagcttaagctcaagtgtctcaggaaacacatcggcctggtccagcaagagccggcgctgttcgcgacgacgatctacgacaacatcctgtatggcaaggacggggccacggaggccgaggtcgtcgaggcggccaagctggcgaacgcgcactcgttcatcagctcgctgccggaggggtacaagaccaaggtcggggagcgcggcgtgcagctgtcgggcgggcagaagcagcgcatcgcgatcgcgcgcgccatcgtgaaggacccggccatcctgctgctggacgaggcgacgagcgcgctggacgtggagtcggagcgcgtcgtgcagcaggcgctgaacagggtgatgaggaaccggaccaccgtgatggtggcgcaccggctgtccacggtcaagaacgccgacgtcatctcggtgctgcaggacggcaagatcatagagcagggggcgcaccagcacctgatcgaggacaagaacggcgcctaccacaagctcgtcagcttgcagcagcagcaacagatgcagacgcagcagagctcatcagaagacatttgaataagatcgtgcgtttctgtatcttgctgtggctttgtctttcttgggcttttgtaaaagatctgcgctggttatcttttcaatgaaagggagtgttcagaattacaggatgaagcattattgggttcttattcctgactcccgtaaaaaaatatatatattgtacatagaatcttgcaatgtaattctgctccatggatctcaatgtttagtgcctacttctgattctat

SEQ ID NO: 1847 - DNA, 2080 bp, Zea mays
gggaaatctcgtgtccattgtctcccaggcaacagttttgtccattattattacagaaaattgcgctaactaacctataatttccacgtggctggtcaaaaatcatccacagcccggggccctgcccctgcctccccccccctagcagtcgctgcacggcaacctcgggccgcgggctcaccattcacacctcatgtgcccagacgcaccctcctcaccttcgcccgcggccccgggcggtaccctcaccgccgggcccaccgcgccccctcgctgcctcgcccccacaaacagccgaccgccccgcgcccagacacacacacacgagcgcagcgcacgcagcatgcaggcagaggactgctctcctctgcgcgaagcgaggcgcggtggccggtgctggggcgagtgaagcgaggcgggttagggtcggcggccgcctccgctgtctcagtcggcgggagcaggaggtgcgcggcgcggggagctgacggtcccgaccgaccggcaccacggcggccgcggcggaggccatcggcgggggcggggaccccgaggccgcggcgaggcggcgctgggatctgcccggcaaggtggccgggaacattgcaatggggaaaattgatatgtctactgacgaagaatcagattgtgtagctatatgtccacctaacagaaatgctggtcacgaggaagttgtgagtggcagccatgatgaagattcttcaggaaagcaagagaacccttatgctgtgaactcacatatggacagcaatggccaggaagatgtgtctgtaaacctagacctgctcaagctgattcatcagcaggaatcttctgtcagcaattcaccaacaaagcctgcagtagctagacagcaagggtctggccatactgtccttgagccatgcgctgttgcacctgaaagaagatcatctggagcagggaatattgctcgaattcctcatcccaccagcagcggggaaaaactttcggataaaagtagctcctcaccaagaagcatggcaaagaagagtccatcattcacacccaggaagcctctccaatctgacaacacttctcacagtcaagatgatgactcatattctgtcacttcttcaactgtaacttcagcaagagctgggaaaactaagaagacaactgttgctgttgcacctacattcgtctgtgctaatcgtgctgagaagagaggagagttttacacaaaattagaagaaaaacgcaaggctttggaagaggagaaactccaagcagaggccagaaagagggaagaggaagaagaagctctaagacaactgaggaagaacttggtcgtccgagcaaaacccatgccaagcttctaccaagagggacccccaccaaaggttgaacttaagaaggtgcctccaactcgtgccaagtcaccaaaattgacacggagaaagagctgcagtgaaacccctcatacaccagagggaggaaatggcagtgcagtatgctgccggttgcatcgccacagcattgggaacgccagagatgttagcagcaaggcacaatgttctccaaagagcgcctcaaaggctggatcagctactagatccagggtcaccaaatccagggaagacctgaaggcttccgtgaagaaagtgggactgccaagcgccgcgaacttcgctgtacaaacctaactcatcaggcattcactcccatatgccatttttcattttaatttatacctcacatcaccaaaaagatggcctcgtgttatttttgcattgtccttgtaagaacctggctaccagagacctgcgctgttcccgtcctgtaaatttgttgaaggttttgtaagggggtaaccgagtcagtcctgtgagaaccaagcgggtgggcagctgatgggatattggagtgacatattgtcgttgtgtggcggcattcgcgcgttctatgtattgtatctgagctgtaacttattgtggacattggcaaagcgattctgattgttgtcgcaaaatttgatcaggtcgtgtttcgaacttttaatcaggtatccttatgaattggaaactgggttgtgtttttt

SEQ ID NO: 1848 - DNA, 1824 bp, Zea mays
catcgtccatttttctcgctctctcgatcactactatcatttgccgtcttccaccctccttccattccgttcggatacaccgtctcgtttctctctcctcccctcgcccgtcttccctcctgtgcgagctcagctcacggtcctcccacccccacgagcgcctccgcggcgaggaagagataatcagcaggcggagcggggggcgcgccgatggatctggagaggccgccgccggcgtcggcggcggaggcggccggggccgcggcgtgctccatctgcctggatccggtgctcgcctgcgtcgcgggccggtccgtcgccaagctgcaatgcggacacgagttccacctagattgtattgggtctgcattcaatgcaaaaggagcgatgcaatgccctaactgtcggaagattgagaaaggtcgctggctttatgcaagtggacgtcacccccctgctgatattgatatgggtggatgggtgactagcgacaactatgatatcacctccgagcttccttttggatttcaatggtgtccctttagtggattcacccagctagcatcaatgttaggggtgcgtgaagctgagccaacttaccacacaactggagatcactcaagtgctgcaagcagttcacttgtttgcccatatcttgccctgcgtggttttctccatcctgttaatgtgccttctacttctaattctggtgctgaaagcacttcatttcatcggcactcaactggcttggaaggacatgtcactcctgatttgaacaatgctccagttttccatgctaccgagtcaagaaatcatgacagtgagcacagacatttgagtaatcttcctgtatcaggaactcctgaatattctatgactccatttgggataggagtaccaagatatgacagtggcagccaacagggattccgatcatatgcacatcatcatcccctaatccataggctgacccctcgcagcggaagcaatctggtggcaccattagggtcagttccagccgtcgtggcagagactagaggccatggccatggtgcaccgggccatatgtaccagcactcatctgtgcagggcagcccgttccctcctaccaccagaagggttaggcccagagccttgacgattacgtctttcatcgcagcgacttcctcagctgagattgcagggccccttggccacgggtttcccgctcctggagccgtgaacaggagcgtttctgatgccgagggcatcgaccgagcgtacacatggggccgggagggatatgatctgttcccttggacccctgctgaatggggcaccttcaatcccatgcagaaccatgcgcatggaagctttaccagaaggcctgctggggagcggatgccgcagagtcgccccgagaacggataccagccgcctgtgcccacttcacagaggatgccaccgttcttgtgatcagacgaggctgcctctccaattgctgtgtataaaattatttgattcggggtttggcagagaacaacgagcgaatatcgaccgcacggcagcatcgaaactggtcggctatgagacctgtgtgtgtgtgatgtttatgatgatgccgctcgtatttttagcgctttcggtccagcggcgctcaggtttcgtcgagcgctgtcgtttgtcctgactgatatggtgttgcgttgagaaggactgtttgagctaaactgcatctctggtcccgggattcgaaagcaccgcgtgcagctatggatttgttcgtcacatcacgttcgtgtatggctggccctggccgtttcatgaccgctcgattcctctgcc

SEQ ID NO: 1849 - DNA, 2260 bp, Zea mays
gaggaggatggggtatgcatgtatagagagtgagagagagagagaaagaaagtttccggaggaaagcgagggaaagttcacaaataaaggagtgaagcaaaaggaaacggaaaacaaaacaaaacaaagcccagattcctctctccgaacagcgcctatgttttttttttcttcagccccccccccccccccccccccccccccctcacctcttcttcttctgctggtatctatcgttgttgttcccttcgttctctctccatctatctccctcagattacttgcgaccagcgacgctctggctggcccctttgagattgacctggggcttccatacaccaagagtgcagcaagaggatagatagcatttgttgcagcgctctctaggtcgtctctctctctctctagctagctagcgtcgtctcctccggtgaggtgatgaacagaggagaattccagacctcccttgtccagcagatgatctggagcggcggcggcggcggcaataccacagcggcaggcagcagcaacatcatgagcagcggcttcaagcagtcttgccatgaggatcaacaagaggcctcccgcaacctgcagctgctgccctccctatcgtctccgtcgtcgctgctcttctccaatgcccagcagttcccgcacaccacctcttcgggccagcagctagcccacaccaacgccggcggcgcagcagctggttctctcccaagtctggacgacgacggcggcagcggtcaggacagccacatgccggaatcgtggagccagatgcttctaggggagttcgctggagagcgctacgccgccaccgcatgtctgctgtcaaagggcgtagaggactggggggatcacgctgcggcagctgcaagcgcgtgcatggtgggtggcggcggcggcgtggaggaggagggctcggccgccatgcctctgtacagcttatatggtggtggtagtcacagtcacagccacctcgctgcagctggtgaccatgagatgccgccggcgccagcagcagcagcagcaggggccaataagtctcagctgagccagatgctcctcgcctcgtcgcctaggtcctgcgtcaccaccagcctcggcagcaacatgctcgacttctccaacaacggcgtgcccccggcgcccgatcagctgaagagccaccaccaccatcaatccgataactcatccgagtgcaacagcaccgtaacaggttcggccatcaagaagcctagggttcaggcctcctcttcagcacaatctactctaaaggtgaggaaggagagactgggtgacagaataactgccctacaccagatcgtttctccgtttggcaagactgacacggcgtccgtcctgcaagagaccattggctatatcagattcctactgggacaaattgaggctctcagctacccctacatgggccacggcaatgggacctccattcaaaatggaccaacaactggagaaaggaaccatgcagggctcctaccagatcaataccccggccagttgctgaaccataataacaacactggagcacggcagcctgcagcagtcggccagcctgatgagcagcagcagcagcagggtggtgctaataataatgacgagacgaagaaggacctgaggagccgggggctgtgcctcgtcccggtgtcatgcacgtcgcacttcggaggggacaacgccgctgactactgggctccggcgccgctcggtgggatcctccgctagagcgagcgcgccattgaagcatgcatatgcgttttctcgtttagatgtggcgagctagctgctgttcgttccgtacaagtatatgttcgtcaggctgctgcagggtagctagctagagagagctgtgtctaattaagaatcatcgcaagggtggcgtgcatgcatatatatgctgctggttgctgtgggaaacataccatcatgagcagtcattcttggtaggggagaagctgcgtgcgtcgtatacctgtaaggctgattgctcttgatgctatgcgagtaagtatgacgaccctttttgtgggcgcgcaaggcttcattaattattttgtatcttcaagggagggcgcttcaagtagaagatctagatcttctctggtcccctgtcgcaaatttatttcgttggtcatgtatatgtaattaaaatctagcaataagttattagtgaacatgtttatttactcaaacatatatatagtatagtgcgatgggttaatgatatata

SEQ ID NO: 1850 - DNA, 1981 bp, Zea mays
atttcgcaaaagcacactaagccatgactgatcagagctaaacataggggaaagcagatctgtcgcaaactcgcaacccaatacgccatctattcccgtcgctgtcgtccacctgtttttttcgttgatccgcagccgccccttccttctcccatttcggcgtctcgaagccagtagattattcatttctcgatccacaaatccctccacactctccatcccgaaccctgaaatcgaggagcgcgggaggacgccgcaaagcgcgttggctcttagggtttgccggtagggttgggaggctccgatccgggcgcgcaggcatgaggattcgggagctccgagatgggctggaggtggaggacgacgagcgggaggagcagggatcggaggttggcagtggttacggggaggttgtcgcggttgtgcgactgcgggcgaagcgcgctatcgttggtgccggcgcgagggtcctgttctatccgacgcttctctacaacgtgctccgcaaccggttcgatggcgagttccgctggtgggatcgcatcgacaagtatgttttgctaggtgctgttccgttctctagcgatgttctgcgcctgaagcaacttggtgtaagaggagttgttacactcaatgaaccctatgaaactctggttccgacatccttataccaggctcatggaatcaatcatctcaaaattcctacaagagactacctgtttgccccatccctggagcatatttgtcgtgcagtggattttatccattgtaatgaagtgcaaggtggtagcacctatgtccactgtaaggctggaaggggacgaagcaccactatagttttgtgttttttgatcaagtacagaaatatgactcctgaagtagctttggatcatgcgaggtctgtgaggcctagagtgcttttagcgcccgcacagtggcaggccgttaaaatgttcagcaagctcaacgctagatgcctttccatacagagctcgaacccaacttgctcagcactatcttatgaggaatccagtgaactgtcaagcacgctgagcagcagatgccttcggattcagagctcaaatgaggtctcgataacttgtgaagaatccaatgaagcatcctttggagaccctgaagttgatggctacaccaccactgagtttgacaccgagcattttgttttacctcgttgtcgaagtatgctgtccagaccaacgagccccactgggtgtagtgatgcagtcttcataaccgaagaagatctagagggctatgagacctacgccgatgacgggaaggacgttgtcgaagtgcaagtagtggttcgccacaagcccatcatgaggaaactctcctgcttccttgggtccttgaagcttaccggcaattgcgagccaccacctggccgtttgaccgaggttcgagcctgctaggtggatcagctatggtttccgcatctgtttttcgctctttgtacatcggcagagtgtaattaccggcataagtttgcacagcctgcggaattccctcgggacagaactgtatgttgtggcatgtgggtggcgagataaatttggctatcgggagccgggagacctgtgggttgttgcagggagtgcgagagatctgtgtgcatatctggtatgaatgttttccttgtaataaaaagatgtttccttcttgtaataaaaaagatgtactccctccattaataaagctgcacttcccccccccccccccaaaaactaaacaacttgtaatttaaacaatactgccatttatagtacaacataagtgttactgtattaaagtaaccataatatgctctctttagaactcttacctaaatcataaaccgttgtggctttttaagatacactccttccgtcatctcaaaatataattcgtttatactaatatacattcattacttaatggtgtatttgtttctctcctaaattatataagttggattata

SEQ ID NO: 1851 - DNA, 3437 bp, Zea mays
gagagacgagacggggaggcaaaggcaccacgagccactctagagacgcctcctccgtttgttcgagctgcctgggcgggaaagagaaagcgagaccgagaccgcagggattgaaaaaagagggtgcaaaagcaaggctcggattcttgcggggcgagcgactcgtttctcgtctctgcgctgcgagcgaggctcctgctcctcgcggtctcgcttccctccaagttccaatccagcaccgggcgccaccgctaatcagtgctgatatatgaaccccgcatttggacatttggtggtggcaaggcaacgccaaccttccctgttgctgctttgaatgttctggtggttgtcggatggatcgccgcagttggctctggaagcgcaagtcattggataagagccctggggagagcgatagctctggctctgcttcatcacactctgagccttccttcgatgatcaggaacctaaacctgtgtctagtaattcttctccaaatcatagtcattcgcctgatgtttcttctagaataatttataatgagaatcaagaagctgaaagagcagaatcattgaatgagaagctggtgttagcaactagctcgaatgattcttctccacaacatgatcaatcgatgaagccagatatataccaatcacctctgctattcccaaatatcaggaatgatgatgttccagattctgtaaagaatttgaatgagaaggtgtccccaaagtttaaggtcgatgatgtccaggattctgtaaagagtttgaatgagaaactttctgctgcccttttgactatcaatgataaagatgacttggtaaagcagcacactagagttgcagaagaggctgttgcaggttgggaacaagctgaagctgaagttgcttctctgaagcaactacttgaaactgcatcaaagaagaatacctctctggaggatcaggtcagccacctagatgacgcccttaaagaatgtgtaaggcagcttcgccaagcacgtgaagaacaagagaataaaatccatgagacagttgctaagaagtctaaagaattggagtctgagaagtttgagctccagcaccatattgctgaactcagtaagcagttgcaagccacgaaactagaagctactacggtgcgtgtccagcgtgatctgcaggaaaagcttcagatagtggagaaagaaaacaaagacctcaaggtagaattactcgcactgtccaaggacctgaagatacttgcacgggaaagagacctgagcaaccaagcagcagaaacagcaagcaaacttcacctggaaagtgtgaaaaagataacaagagttgaggcagaatgccttaagttgcgtcatttaacgcggcgtacgtccttgaccaatgattcaaggctgataactaacagtgcttgcatggaatctcagactgacagtcagtctgacagtggggagcacatgctagttgatgagatgaaaaattctgattcatgggcaacagctctgatagctgaacttgatcagttcaagaatgccaacaacgacacaagaaatcttgtgaataattcggttgaaattgacctgatggatgatttcctcgagatggaaaagctggctgcactgcctgaagtagactgtgtaagctctagctttggagctgaaactgattctgaccaaggtgtgagtagagataaatcatcaaaagttaaaactgaaccattgcagtgtcaggtgacagatttgcacgcaaagatcgagaagattgaaggtgagaaaagggagcttgaaatggcccttgcagatgccagagttcagcttggcacatcatgtgatgctctaatggtggccaacaacaggttgattgatttgcagatgcagttggacttggcaaatgagtccaaacatgctgctttcggagaagctgagcgactgaatggtgagaggaaagatttggcattgcaactggagtccaggtcttcacaagttgatgagcttcagctgatggtggcatcgctggaaaagaatgtagacaggaaggtgttggaattgcagttagagttagtttctgtggaggctgcagatctgcgcaagacagtggcttccctggaagagaagattgatgcagagataactctctctatgcagcacaaaacaaatgcagacctggcagaggcgtccaaagaatcattagaggcgcagctgcagtctgcaaacacagagatagggaaactgaacgggattgtgcaaactttagagaatgaggtgaggaaagagacagattctcgtgaagaactactgaaacagatagaggctatgaaaattgagtcagagagatcactatctgtggtgtctaccaaagagtcattagaggtgcagctccaggtggcgaattcagaagttgcaaagttgcgtgggatggtgaatgctctggagtgtgatgcggcgaacgagaaggcatattcttcagatctccagatgcaacttgaggcagtggaaggtatcaggaaggtgttggaatctgagcttgagtcttcacaccaggaggtgatgaggctgaaggagaaagtttcgtccttggaagcaaggatcaaggaccagacctcgttgcttgtagaatatacagctaaatcagaggatgcagtgtcccggaaaaaggcaatggagggtcaactagaagcagcaaatctggaagttacaaaactgagaaacaaggtgagcctgatacaaggcaaggtggagcaggagaagcttctgtcagaagagtacgaagcaaaatgccgcaagctggaggcgcaggtgttgagggacagccgagaggcgaaactttggcgcctcacgaactcaaacggagacctgaaggtgaagcaggagaaagaactagtcagtgctgccgggaagcttgcggagtgccagaagactattgctaaccttggccgccagctgaaatcgctaacagatcttgatggcgtggtggccgatcctgaaaagctggaatcgagggacacgcacctggacttcagagatggcggagacgtggctgatggactgtatgaactgggtcttcctaagaggaacggtagctgcctctcaccccttcggtcggatccgtcgccgaggggtttgccgtcccttagtagctacctgagcaaaacaaaaaggtgaaaagtctgatgggatcattcaccattgtgcttgtgcataaattatttgacagtctatggatgatgccagttgtgacctggtggtagatcggtgtacatttacagaacttgatggttgctcacatgtgtactttctccttttgttttgctctcattttgcgagactgcagggtttgtgacaaatttactagatcttgtgagactgtagtgcgttattctcgcgttggaattcaactcgtctacaacaaaaatagaagaaaaaaaacaaattcaa

SEQ ID NO: 1852 - DNA, 1731 bp, Zea mays
ctgcaactcaccaaacaaacactcgagcaaagctcagcctcacacagcctctcctctcgagctagagtgctactagcttagaagaagcagaagcttacagctgaagctgcagcaatggcgaaatcttacaccttactgttcgtcgcactggtcgttctggcccttctagtgagccccattgcttgctcccgcaagctcgccaagccgaacaagcccaagccgacccacaagccggcggccagggtcacgcccggcagcaaccacaccgatatccctgcagtgtccgccgcctacggctccggcggctggttgtctgccggcgcgacgtactacggcgccccaaacggcgacggcagtgacggcggtgcgtgcgggtaccagaccgccgtcgggcagcgccccttctcgtcgatgatcgcggccgggagcccgtccctgttcaagggaggcaagggctgcggcgcctgctacgaggttaaatgcgacagcaacccggcatgctccggccagccggccaccgtggtcatcaccgacgagtgccccggcggtgtctgcctcgcagaggcggctcacttcgacatgagcggcacctccatgggcgccatggcgaagcccggcatggccgacaggcttcgctccgccggcatcctcaagatccagtacaagagggtgccgtgcaagtacagcggcgtgaacatcgccttccgggtggaccagggatccaacccgttctacttggaggtgctcatcgagttcgaggacggcgacggcgacctcagcgccgtccacctcatggaggccgggtgcggcacgtggaccccgatggtgcagaactggggcgcgctctggcgctacaactccaacaccggcaaggcgctgaaggcgcccttctcgctccggctgacctccgactccggcagggtgctcgttgccaacaacgtcatccccgccggctggaaccccggagccacgtaccgctccttggtgaactactcctgattgatgaactgcggcagcggttcggttctccgccccccattgcatgcgcttggctggattattatgcgtggccaagaagtgctttccagggtgcgtggtgtttaaagaacgagtctcgagtttgttttctgagaagaagaagaaaatgtctgttcgggtgtccgcgagaggcggtgtaagaagaggaggaggaggacaagaaggttaaggagccgtgcgttcttcactccctccacggtctctgcagtcacctagtgatgtgtgtagtggtcggtgtcggtttctttttcgttgtgatggctcaggacaggagttgggcgttgtatcagtctctgtgtgtgtgcgtagttttctgtaccacgcaatcctttcagagaattgagttcctgctttcttgtttcaccgtgagcgcactccaaataagctccaatgactactgaaccagcaccagctattagctgcatactagctctactcttgggaaaactgaatcgttggagacaataaaacgtatagtctgccactgccatgtatgtactccgatcatttggtaatctggcccaccaagtttgcagacgcaatagactgactgcaccagttttcccctgaacttgctaactgaagcaccatgtttcgttcacaaaaaacggcactgcaatctactactctgttctcgaatatctgatactcactagttaatttttaaactaaaacacaacaaataaaaaagaa

SEQ ID NO: 1853 - DNA, 2209 bp, Zea mays
aaaatatgcaaaaaaaaaaatctattgcctgactccttcaaaccctgcacaccccacctgccttgtaccaaattcccctgacccgtcggtctgctatcccatctgagctcacggcgatcctctttctcctcatcggcatgagcggcttcttggcggtggtcggcaaggtcggcacctttctgctgtgggtgctgttcctggtcttgcagaccgccaccaggatcgtcggcagcctccttgccagctcagctgagcagcaggatgaccaccatcaggaatcggcggcggcacggcgcaggtcgccgccagcctccccacatcccgaactttacgagccggcgtctgcgtctctggcgcagctgtgggacccaccgcctcttccgcaccttgcttttgctcccgctgcggatgagagctcttcgtcctccagcttacggcggcgtgccagtgcgccgctgccccgagcggatgaagactttgtggtgccatcgagcgcttactcgcgtccaacagtgggggtggctcatacacactctgtgtcagcaccaccactgagggcaatcgagacgcgggcggtgccatctaggctggtgacagccgggggtaagcggccaaggctggagaggaagtactccaagattgttgaccagtaccgatccttggatgaggttattgaagcattagcacaggctggtcttgagtcttctaatttgatcataggaattgatttcacaaagagtaatgaatggacaggaaagaattgcttcaatggtatgagcctgcataatatcagtgacaacccaaatccttatgaacaggcaatatccatcattgggaaaaccttatctgcttttgatgaggataatttaattccttgctttggttttggagacgcatctactcatgaccaagatgtatttgccttctatcctgatgaaagaccatgcaatggttttcaagaagctttagctcgatacagagagattgtacctcatcttcgcctttcgggtcctacgtcattcgccccaataattgacatggccacaaccattgtggagcaaagtggtggccaataccatgttttagtaattattgctgacgggcaggtcacaagaagtgtagatactgaatttggtcagttaagcacccaggagcaaatgacagttgatgctattgtacaagcaagccaattcccattgtctataattcttgttggagttggagatggtccatgggatatgatgaaggaatttgatgacaatataccagctaggtcttttgacaatttccagtttgtcaacttcactgcgatcatgtcaaaaaagataagtcaaagcaaaaaggagacagagttcgccctttcagcactaatggaaattccattgcaatacaaggcaacattagagcttggaattttaggacgtcgaattggagagtcacctgagcggattccacttcctcctccttttgcaagttatagcacagtttcaagagcagaaccatctcgggcaaatagttatcgaagtgtgccttcacatccaagggaggagccagctgtaaattcaactatcacagcatcagttacatccccatcagctgccgaaagtagagttttagaaccccagatgtgcccagtttgcctttccaaaccccgggacatggcatttggttgtggccaccagacatgttcagaatgtggaccgcaagtcacagattgccccatctgtcgaaggcccattgacacgagagtaaaattgtactaattatttttgggtggaactaggtttaactgaagcacatgccaggagtagaatccactaaaataaatctctatttgactgttaacgatgtagtgtgaattaatttaataaatcagacgtagagaaaaggaggatacttgttctttgcttgtatcctgttcctacattgtgcgttgatagatgtgaggctacttccattatctgatactggacaggcgccctacttcgctgcggcgattacatataatgttgaagtatggttatggtttgtctgtaaactggatggtatttggcttgttagtatggataacctagcttgtatataaagagacaatcattagtagatgatgtggtttgctaatatgaataactaaacactccctctattcccgtttataattcgtaccattccgtcttattcatcttttttttttgcaaaaaataaaaaa

SEQ ID NO: 1854 - DNA, 726 bp, Zea mays
atggccggagacgtacaggtgacgggtgcagcagggccgggcgcggtcggcctggcggctgcggcctggtccggtcggagaggcgaggggcggcgtcggggcgccgggtcggcaggcggcgcggcggcctgggccggtcgcgggcgcctgggcaggagcggtggcgctgctcggtcgcgggccgctgggcgtcggggaggcgaggcgggcgcgaccctgggcgcggggctgcgcggccctgaacgggcggctcggcagggcgccggggcgtgcggccggacggggtgcagagcacggcgcgcgggcgtcgggtcctcggcggcaggtggcgacgaggcggtgcggcggcctgggcgggtcgcgtcctgctcggctgggcgctcggtgcaggtgggcggggcaggtcctggtcgcggggaggccggggctcggcgcgcctggccgggtcctcggcggcagtcggcgacgagcggcggctacgggagcgcggctccggaggcagcgggcggcctggagcaggcgggcgtgcgagcgcaggcggcgggcggcctggcgcaggcgcggcctagcgcacggcgtcgcgggagtgcgacggatgcgcgggtacgggaaacaggggagggcggcgcgccggggagggaggctggcggccggaggtgggagggggaggagacggcggcgcgccggggacagggaggaggtcggtcgtttgggaccgacggctga

SEQ ID NO: 1855 - DNA, 3533 bp, Zea mays
attcaaatgccgatgccgtccagatcattcaagcacagctttacctgtgaccgtgaggttcctgccgtccggatttttctgaaataaaattggatggaggaaaatatatctagagccgagtgccccgacgatcgaccgaccgacgtacaccccctttctcttcgctcttcgcccttccttcctacctgtgctgccttcctggcaacctgtctcagcaattaagctaattccttggcccggcaatggctagggttgagctcctcgcgctgctgtgcctcgcgggcaccctgggcgcgcaggccaccgccggcccccgccccgatgcgagggtcggcgtgtacgagctcaagctgggggatttctccgtcaaggtcaccaactggggcgcccgattaatgtccgtcgtccttcccgactgcaaagggaacttggctgatatcgtcctgggcagagataccgtcgctgaatactttaacgacacttcttactttggaccgataaccggccgcgtggctcagcggatatcgaggggccggttcgtcctcgacgggaaagtctaccacctgcaacgaaacgacggcaggaacacgattcacggtggtggcacagcgttcagcaaaagcgtctggacggtgaaggagtatgtcggcggcggcgactccccatacgtcaccctgtactaccacagcttcgacggagagcaaggtttccccgggaacctcgacgcgtacgtgacgtaccgggtgtcgggcccgtacacgctgggcgtgcacatgagcgcgacggcgctggacagggcgacgccggtgaacctgctgctgcacgcgtactggaacctgggcgggcagggcagcggggacgtcctgggccacgagctccggctgcacgcgtcgcggtacgccgtgctggacgaggagctcctgccttcgtcggggcgcgtcgcgcccgtcgccggcacgccgctggacttccggacgcccacgcccatcggcgcgcgcatccgccaggtcacgggcgggaaggtcgtcgggtacgacgccaactacgtcgtcgacggggaagggatgcggcccgtggcgcaggtccgggacggcgcgtccggcagggcggtggagctgtgggcgaaccaggccaccgtgcagctctacaccgggaactggctcaaccacacccaggggaagggcggcggggtgtacgaccagtacgccgggttcacgctggagaccatggggtacgtggacgcagtgaaccaccccgagttcccgtctcagaccctgttgcccggacaggagtacaagcacgacatggtcttcaagttctcgttctagcaggtgcatggtttggtttgatgtacaacgttcgttattggtgtttgagacgtacctaggcgaatactgagggtttgatcagctgccctgcaacaacagagtcagtggatttttttaaaacacacaaactatgcattaatcaatgacgcaacagatcactgtccaaaatatttttcgtttcctgaaaattttcaccaagagaaacaaccaaaggaatcaaaaagaaaagaaaaaaagggtaaaggtacaaacgttagccctcctgtcctgcgacacctcaggtacaaacatgtatgtaccacctccctagcgtgtgctgtatataccatgccatgcatgcggtctttagaacttgaacccgaggatgtgcggcgtgccggtgaacttgagccacaacccgccgtcgatgaacggcccggcggtgaactgctcggcgtccttccggccgatgacgtggaacccaggccaggtgaccctcttgctggtgccggcgccggggccgcggttgttgtactcggcgtagtagagcgtcttgatgccgaagtcgccgttccagggcatgtagccctcgggcttgatgaagtcggcgatggtgctctccatgatgacgaggcgcgagaactccttccagggtcggcccaggtacgaggggatcttgaagcggtcggggaagagcttctggtcgggcaccaggcggcagttctggatgacgagccccgacttcatgttggggtccgtgcggccgtgcgcggtcaccgagttctgctggttgtccatgggccgccgcgtgacgatgaggcagttctggaacaccgccgccgagttgccgaagatgaagtcaatggtgccggagatgacgcagttgcggaagaactggcgccgggcgtgcacgtacagcgtgtcctggaacgcgtcgaaccggcagttgtagaacgccgcgaggtctccctgaacgcggagcgccaccgcctggtgcctctccgcgccggccgtgttgtggaagcccatgttcttgcagatgaacccggacgcctcgacggctgccaatccatatccataaagttcctggcacgtctatgtacatataaaatggtggtgaagaagaaggctcgctcacagaatgtggcggtcttcatggtggtgatgccgtcagcgaagctcttgcggccggtcacgcggctttgcttgggcccgtcgccgtacatgaagacgttgaccttgtccttggggaccatgacgatctcgtcgtagaggccggccttcacgtagatgacgtacctcccctgctggcccttgggcatggcgtccacagcctgctggatggtcttgaactggccgctgccgtccttggccaccaccgcgttcggcttaggctggttgcccgccgccaggagctttctctccggcgacctcatccacactggccagcctttttcgtcctgctccgacaggagccggcgacgcgagtccttcttgaacatgccgaggtccagcttcttcaggatcccgccgaggctgttggtgatggcgagcgcgttgctgctgagctcggtggcgttgcgcagcacggtgtgcatgtcggccttgagcttctcgtcgacgaagccgtcgatgcaggtgtccatgaacgtcatgacgcccgtgagccatgtctcgaggtcgtcggaccggctgataagcaccttgatgtcgccgccggccatctcgagcatgcccctgaggtcgtcaacggcgtcctcgaggagcttcttgcagtcctctcgcgcgctctcggtcatggagtcgctggccttagcctcgccgatcgtcttggactgctcgaccgctgttttcaccgactccagcgccaccttggcaacgctgtggaacacctccttggggttctcggtgccattggtggcctgggagagcgtcttctcacacgactccttgtacaacgtgggcgcgcacagggactcgaccgacttgccggacgtggcaatggaggcttcccccgggacggtgaagtcgtcgccggccttcttgccggagtgggtgacggtggcgacaacgccgacgaccaccgcgacgacgacgatcgcccacaggccacctaggagagcatttgccatcttgggccacaagcttgttgttgaatcggacggggagcaaatttatagcgaccatgacgatcaaatggctgcgtacggacgtggatgcatggtt

SEQ ID NO: 1856 - DNA, 3261 bp, Zea mays
cgcatccttttaccaccaacctttgcctttgacccgtcccaccctcccgcaccctttgtctcctctgcacttcgcctcgccgcctgaatccccccacaagcacccccacaccaatcactggaggcggagggagggagggctctcactcactctcggtcccagtagccgcccgcaatgcagctctggtccgcgtcgcgccgtcgccatggctcagtcatgtgagtctcctacaggcacaggaggcgccatctctcacctctccgcagtcagcatcggcagtgccatggccgctcctcggtcctactagcaaaggtacctctccatcctcctccagtcctccaccgctcgccggctgactggtcgaatgaccgccggctgactgactgactgattgattcgggtgtcattttccccaggtggggatgaccattcctgatctgttgcttgctttaatgcctccctccccatcactttccagatccagcccacctcttcccttcctcctcctcctcctcctcctcctcccccgcgtctttataaatctcccgctgccgcattcactggccaccggagttagtgcccccatgtcctgacgcggacgcgcggggagcacaccacatgccgacgtgctgtgctgttgcctcatatgatttcggtgtgctccatcatacctgcctctcttcttttttttttcccggtggggagaaaagcgggggcagcgagttgtgcgccttgtgagcttgcagctgttccaggttgcaatgcctgtgctgctcgtgctttagtctaggctgccccctttttcttcccgttcgctttgggaacataaaagattttttctccctttctttgctaatctctctggcgctggcccacttcgcccccctatttttgtggggaatgccggggtgggggcttgtgatttttgagccctcgttctagtgcttggccttttggggagtgttgatgcggcgttatggggcgatggatctgttgtgaaacgcgagctcgtagcactagcactagcttgtccgggaccgggagcctgcgagatcaggagctggggattgccctgccactctgctgaaagttttggagaagttgtggtgtttccctgcctattagagtctgcgcttctgtgttcctgatcaactgctactacgcgattgttgtcttctcaatctgtctggccaagcatggctggccagacgtcaaaggcaaaggaagcaggaaaagatgacagagaagaacccggagctgaggcggcgaaagagaagttagtgccgtctcaccagcagcaagagtctccagcttctgtggtggacaaggattcttcaggtgtgtcttcagttcctggtgatgagtcaccggtcctagaaggggattctgttgagttgaaagtggaggaaaacttggatggtaatgggaataaggaaaataaaacgtcccagaagagcagtacaagtgatggctttgcttctgctaaagtgagtgatgggacaagtagtttgaggaagaccagtggtagtgtggccatgagtactcgggctgatttcactgagagtgggaagagcagcatgtgccgtgcgagcaccgccagtgacattagcgatgagagctcctgcagcagcatgagcagtgccaccacgaagccacacaaggggaatgattcaaggtgggaggctatccatgtggtgaagtccagggataaagttcttggactgaatcatttcaggctgcttaagaagttgggctctggtgatataggaagtgtgtacctatctgaattgagtggtacacggagttactttgccatgaaggttatggataagacttctttggcaagtcggaagaagctgcttcgagctcagaccgagcgggagatcctgcagtccctggaccatccatttctaccaaccctgtatactcactttgagacagataagttttcatgcttggttatggaattctgccctggaggggaccttcacactcttcgccaaaggcagcctggaaaatatttttcagagcaagcagcaaagttctacgtagctgaggtgctccttgcattggaatacctgcatatgcttgggattatataccgtgatctcaaaccagaaaatgtcctcgttcgggaagatggccacatcatgctgtcggacttcgatctatctcttcgctgttcagtgagcctaacggtgatcaagtccgcaaatcctggcctagatgcattgcagaggaacaatgcagcgtactgtgcccagcctgcttgcatcgaaccatcctgcattcagccctcctgtgtagctccaaccacttgctttggcccccggttcttctccaaatccaagtccaagtctaagtccaagcccaagaaggagaagtcgaagcctgatggtccaaaccaagagaacctcttcccggagctgattgctgagccaactgatgctcgctcgatgtcctttgttggcactcatgagtacttggccccagaaataataaaaggggagggccatggaagtgctgtggattggtggacctttggcatattcttgtacgagctgttgttcggcaagacccctttcaaaggttccggcaaccgggctacactcttcaacgtcgtgggccagcccttgaggttcccggagtccccgatagtgagcttctctgcgagggacatgataaggggattgctcgtcaaggacccgcagcaccggctcgggtacaagcgtggtgctaccgagataaagcagcaccctttcttcgagggcgtgaactgggctctcataaggtgcgcgagccctccggacataccaaagcccctcgagctcgagtgtcgcccaaagcaagtgccatcagcaaacggaaaggtcgcgccggtcgctaaccaaaagggcccagataattatctagagttcgaattcttctagttttttgttttgtttttgtttttgtgatttctgaactgcaagagtgcgtctgggctgatgctgtgaaagaaagtgaaagatgataacctactctaggcatgcgcttcgctggatttttttcttcttctgccattagactgtactacgctcgtttcaggatatccgagttatttttttttctctgttgaactgcttaactctaaggtgtactcaatccatcatgtatgttgcaattttcagaacctgcctatggtacttgaaatgtatttcagggctgtgttattgctattgtaactttgtaattgatgcctcctcttagaacatgtcttcc

SEQ ID NO: 1857 - DNA, 2506 bp, Zea mays
gttaaacgacaaatataatttcagccaatatgtggcgctttatgctatctgtaaccttgatgatgaggcacacaagctgctaaaaatgctgttggtggtgtaaatcttttctccatcgcaaatcccccactccccctccgatcccccctgcgaccctgcccaccctcctctcctcctgcatccaccgcgccatgtctcaggaaggagccaacctgccgcaagaagtggtggggagccatgatcaggccaccgccccccacggcagcatccctgcaccggctgattccaaccccagctctgtcagcaacctggccagcgccgtcaacaacggcgggtcgtctgagtgtgccagcccagcggtgctctctgccggcgaggacaacaacgcggcgtcgtccaagaccgccagcccggcggtgctctctgccggcgaggacaacaacgcggcgtcgtccaagaccgccagcccggcggtgctccatgctgccgacgacaacaacgcggcgtccaagatcgcaggcccggcggtgctccttgccggcgaggaaaacaaggccaagctcaagctcgcgagcccggcatcgctccttgccggcgaggagaagggcaacaacgctgatgagttcaagctcgctagcccaaggatgctccatgactgcgacgacaacaatgccgggtcccatgctggcgtgcgcaactgcaacgccgcccagtccaagctcgccaacccggcggttctccatgccggcgatgacaagaagggcggatccaagatcgccggcccggaagtgccccacgccagtgtgaccagcaccaccggatccaagctcaacggcccggcggcgctccatgccggcaatgacaacgacagcggcggatccaggctcccaaaccccgcagtgctccatgccagcaaagacatggacaacaacgccgggcggcccaagttcgccagcccggtgttgctccatgctggcgaggacaacaaagccaggaccaagctcgcaatccaggcgggcggtggcggtaacgccggagccggatcgtccaggctcaccagatcggcggcgctccatgccgggaaggacaacggcgccggatccaagcccgccatccaggtggtgccacgcctccatgccggcggcaaggacaacaacgctgggtcgttcaaggctgccagaccgtcggcggccgactccggcgagagcaacgccaaggagggaaagagcaacgtagctggagaacaacgtgcccgtgaggccggcgtgggctgtggcggcgggaagggcaacgccgccgcggtggaggatgtggaccacgacttgcacatctttacggagagggagcggaggaagaagatgaagaacatgttcagcaccctacacgcgctcctcccgcagctccccgacaaggctgacaaggccaccatagtcggggaggctgtaacctacatcaagactctggaaggcaccgtccagaagctggagaagctgaagctggagcgcaagcgcgcgctggcagcgcagcagcagctgatggctggtgccggcagcaaccgcgcgtcgtccgcgcgccatcccgcaccagcgccgtcgtcaccgtcgtcgtcgtcgagggaggcgaacgtggcggacatggtccacggttggcatgcgcagcaggccgccgcgaacaaggccctggcagcggaggccggggcgggcggctcctcctctgccgccgcctcgctgccccgtggagcggtgcccttccccgcgcccgcggcggggttccagacgtggtccgggcagaacgtcgtggtgagcgtggccagcaacgaggcgtacatcaacctgcactccccgcggcagccggcgggcaccctgaccaaggcgctgttcgtgctggagaggcaccgcatcgacgtcgtcacgacgaccatctccacccaggacggcttccacatgtacggcatccatgcacgcgttaattcggcttccgcttcggctcgctttccggagaatctgtgtgctgaagacaggttcaagctggcggtgtcggagatgctgcagctgatcaacatctgagctaggccaacgcgctcatgctcgccaatgcatctgagctatgctgctgccgtcgtcgtttcgtgttaagtttggtcgtcgtccaactcttttagtttgtttctcttgttcgtgccaagtttggtcgtcgtcggttgaactcttttatgtctcaagacagctggttagtggttcctagcgtatggtaagtactgtttgaggtttaacccgtcgtggatgtagttgtatgatcgggtttcatgtgtgagagttctaaccaatcactagacatcgtagaacatgatgaaggtctactttgagactgagtggagcggccatgagaatgagagttcgggcctgttaggcacggctccgactccttcaaaaacgattctggctctgagccaattgttttagctccggcttctctctataaaaatagctccagctcgtcagcgctc

SEQ ID NO: 1858 - DNA, 903 bp, Zea mays
atgggtgagattttgggtttagttcaggttgatcagtcaactgtagccatcaaagaaaattttggcaaattcagcgaggtcctggagcctggttgccacttcctgccctggtgcatagggcagcagattgctggttacctctccttgcgtgtgcgccagctggatgtccgctgtgaaacaaagacaaaggacaatgtctttgtcactgttgttgcatctgtccaatatcgcgctcttgctgataaggcatctgacgccttctacaagctgagcaacaccagggaacaaatccagtcatacgtatttgatgctctagccgctactctgctcttcccccaccgtggctgttttgcacttttgcggtcatcagtgcgggagtggacaaagctaaagacttgggggctggttcagacggggatcgacatgtgtctagggttaaggtttgagagcagtcacggacgggcggtggggggagctagatctgaaccgagggccatgagacggcggaggatctcctctgcaaacacgcacggcggtgggatgggcaggaacttacctcgcgcggcggcggacggtgagaaagcatcacggcgcgcgcggcaagggaggagctcggcggcaccttggttcgggcgagacatgggcggggcatcacaaaagcagggatggtgggtattaggaggcgggcgtagtgggtggggcatggaggtaggagagcgggacaggggcacggacgccgatctggggatggggcacgagattgccgtggaggacgccgagattgcagctggggagggcaagcgccgagattgccgcgggggagggcgaggcgggcgcgacgcggggcggggttgcaccagcggcggcagaacgtgcaccacggtttgtgaacgcctacaatag

SEQ ID NO: 1859 - DNA, 1675 bp, Zea mays
cgccgatcacgagttcaaatcaaaccaacacaactgtcgccccctcggcccctcccaccccaacccctccccggcccccctcaaccagtgcagcgcctcgccatcgccacaagccatgtcggagattgaattggtgcagtgctcgcgtgccggcaaggaagcgttgcaggagccagagtcggagccgcagcgcaagtggctgccagagtcggagccgcagcgcaagtgggtggccctcgtctccgatgccgtcctcctcggcaacgaggacgatcgggcccaggagatcgtccacggcaccgacatgctgctcgagctcaaagacccgccgctaccctcgtacctgttgctgcacccccgcgtctccaccaacaccaggcgtacgtcctcgccgctgtccgcctacgtcctcgccgccaataaccgctccgcctgcatcctcctccagatcgtcgaaggcaatcgcccggacatcttcctctgcgacacgcaccgttgtaccgtaaccatcctgcccccgctgccctcctatctttggagtaggccgggcatctacatccgcccccacctcagcatcggcctcatcgccgacccgtaccaccgcggccactacgtggtagcccagcttcaacccaccacctccttccacaaccccaacaggctcctctgctactccaccgccaaacaccagtggttcgccttgcaaatcacccggcaaacggcccacttgtacaaccccttatccgagaatggcgtgctcgcccacgacggccgcctctggtgggtcgccctcgcccatggcatattcttctgtgaccccttcacgcccgtcctccaagagctgcgcctgcgctacctccggcttccagccgactgccacggctacgtcgccttggagccccgcatcaggaccctcatccaccagcggcgctgtgtcaggcccagcgagggccagctgcgattcgtcgagatccacgggctcgcctacgacgacgtgctcgtcgacgcaccggctaaccccaccgtcaggatgtggacgctcgaagacccggagcgcccggacccctggacataagagtacgaagtgccctttgccgaaatctgggacaatgagacctacgcccacgccgccctgccgcggggcgaggtgccccacgtcgccctcgtcgaccccaacgatcactgcgttgtctacttcttccagggctccaagctcttcggcttggacgtgcgaaagaagcaggtcatcgcctgcaaggaatgccttatagaccgtgatcaagtaacgttacaatcctcccgccccatcgttcatgcctgggagctgccaccgccacctacgctcttgggtgacctttcaccagacgataatgtttggccgagacgggcctaacgatgaagaaaagaagcaccaggtgaatgagggacacgaacacgatggacgagagctcgaggagatggtagctggagaccaattaagctgatgatgagatagagatacaactcctctcctccctagggcgggacaggggagctaagggcagcttgttagattctatggtgcctaggattgattcctgtgtccctaaaataccaatctgtaactagaaggaaaacctcgatgatgagtagatctgttctactgagagaaatagggaaacacaccttcgttgtt

SEQ ID NO: 1860 - DNA, 180 bp, Zea mays
atggagacaaacagggcagggagccagggacgcgatgtgactgggaacaaacagggctcatccgctgcctggatcttcggtctcgcacgcgcagggagccagggactcactggctcgcgctcgctggctcgcgggtgggcgagggctttggctggccaccagactctggtggcgtggtga

SEQ ID NO: 1861 - DNA, 3964 bp, Zea mays
tgaaaaatccgctgtggtctgtgggcttgttacagctccgatccacgcaatttcaagaatcaagaccatcaaaatcgtgaagtttctctctcttcgtatactgtacacacgcgcgcgcgctctctctctctcctccccttctcctttctcccgcgccccagatccgagccccggcgcctgaggccatggcgagcgacagcgacgtcgacgaggacgagctcctccagattgcgctgcaggagcaggcggcgcgggacctcagccaccagcgcccgcccgccgccaacaagcccgtcgtcaacctcgtccgcccacccgcccccaacgcccgcggcggcaacggcagagccgggggcgccgcagcgaaggcgcgccagcccagccgcggcggagacgaggacgaagactcagatgttgagctgctctctatctcctctggcgaagaggacgacaatccccgcgctcgtggcccgccgccgccccgcgggggtgggggtgggcgcgctggggcgcggagggccgtggcacgggacgatggggacttcgacgatgaggagcccaggagctggaagcgcgtcgacgaggcagagcttgctcgtagggttcgagaaatgcgtgaagcaaaggtggctcctaacattcaagaacttgatcagaaagcagcagcagcagctgctgctgctcgaaaggccctcacgtctgtacagactttaccaaaaggagttgaggttttggatccattgggccttggtgtcatagataataaatccctgcgattgatcactgatgcttcagtaagttctccaatttcaagggagaagtctcaaggtttagatcccaatatgcgagacaaagttatctattcatctccaagttttgatcccaaagttttcctttcgtgggtccacaaagacacaagcgctgctgatttagaggctggtgctctcactttgaaaactgatctcaaagggagaacacagcagaaaaaacagttagtcaaggagaactttgattgttttgtctcgtgcaaaactacaatagatgacattgagtcaaaattgagacagatagaggaagatcctgaaggtgcaggtactgctcacttgtattcagtgacacaaaaaattagtggtgtggcgaatcgtgcatttgagcctctatttgagaggcaggcccaagctgaaaagatcagatctgttcagggaatgcttcaaagatttcggacactatttaacctcccaagtgcaatccgtgggaacattagaaaaggagaatatgatcttgctgtcagagagtaccaaaaagcaaagtcaattgttcttccttcccatgtggggatactaaaacgtgtactcgaagaggtcgaaaaggtgatgcaggaattcagaggcatgctttataagtccatggaggatcctcaccttgactttgctgagcttgagaacattgttcgtctactgttggagctggaacctgaaacagatccagtgtggcattatctaaatattcagaatagcaggattcatggattgtttgaaaagtgtactcaagatcatgaattgcgaatggaagttttgcaaaataaaattcgtgaaaaagtgctctctgattcaaagtggaggcagctgcaacaagattcaaataaatctctggaagttgattctgccatttgtgattctcctcgagctgatcagttgtcaacaaactttatggctgaggaagctgatagtttaagggccacctacactcgtaggctaacttctgtgcttatacagcatgttccagctttctggagattagctttatctgttttcagtggaaagtttgccaagacagcttctggtaatgtagtttctgattctgacatgaatgcaaagccgtctgcaaataagaacgatgacaaaggtggagatgtgaagtacacaaaccacactctcgatgaagttgctagtatggttcgggatactatatcggcttttgacactaaggttcagagtaccttccgtgatttcgaggaatgcaacattctttgtccatacatgagtgacactataaaagaaatagctaaggcctgtcagactcttgaagggaaggattcatctccaactgctgtaaaattgttgcgcacccttcattttcaaatgacgaagctttacgttctacggctttgttcatggatgcgggcaacaactaaggagatatcaaaagatgatacttgggttattttatccacccttgagagaaacaagtctccatatgcaatttcatgcatgcccctggaattccgtgacataataatttcagcaatggaccggattgatactatgattcttaatctgatgagcgagactgcgaagtcatatgacatttctcaaccacttcaggaaattaatgagtctgtcagacttgcatttttgaattcctttctggattttgctggttatctggagaggtttggaggtgaactaactgagaacaggccaaacaatgaaaacaattatgttcaaaatggatacataaatggtactagagaaacatctgctaacacagatggagatttgcacaaaaagctgctggttgttttgagtaacattggatattgtaaagctgaactttcagaagaactgtacaccacatatagacacatttggtctccagtcaggaataatgatgagcgaagttctgacatgcgagatctgatgacttctttctctgcgcttgaagagaaagtcctggaccaatatacttttgcaaagtcaaacttgatcagaagttctgcacaaagttatcttttggatcctgggatttattggggagcagcaccaatggtaaagagcattcgagatgcaactcttgacttgctgcacatccttgtagcagtacatgcagagatatactctggtgctcggcctttgttggagaagacaatgaaaattttggttgagggtttggtcgacatctttcttagtgtttttcatgagaataagaccaaaggtattaggttgttggatgcaaatggtttttgtcaactcatgcttgagcttgagtattttgagactgtgctacacacatacttctcacccgaggcacagcaggctatgaaatccttacaagagaatttgttggaaaaggcctgtgaaagtattgcagaagccatggaaaatcctggacaccaacggcgaccaacccgtggcagtgaagatgcatcgtcagatgatagacagccatcagtatcacctgatgatttgcttttgcttgctcaacagtacagtagtgatctgctgcaaggggagctggagaggactcgattgaacatagcctgcttcatggagtcagcccttcaatcaacgtctgcgccagcaggctcaaagcctgctgcatattcttcttaccatgcgcaagtaccacagcacgcccccattcaaacgtcctcgcctagttttagaaggcagcagactggtacaagctctcctgtagtctccagacggcgacggtgagcgtagtgcatcttccctggaatttcctaccacccctcatgtttttttttatttcttgtaattatcatcctgttgtcatgtgttatgaattttgatccattcttttggtgtcgtaagataaaaatggtggtcaagtgcttctgcacgggaacataaaattgtataatatgcccacgaatcaaatactgccttgctgactgaagatagcaccacagctgtatctgctgcgccagtctccttcggtcctcactgcttgtttgtatattcatttggacagtttatgtatcccgacatttgttaatgttgtatcaggtggttcaactagcatcgggataattttcttatatcgaaagcggctgaagtgattgagattcaactagcatcgggataattttcttatatcgaactgttattaaatgcacgcgggcatgttttctgtctccagtagcagcccatgttacctgcac

SEQ ID NO: 1862 - DNA, 1074 bp, Zea mays
atggggaccggcggcagctgcgcggcggccgtgcgcggcgcgaggccggcggtgggcatggttgcggtggagctcgccttctcggcgctgcagatcttcatcaagctcgcgctcgacgatggcatggacgaacgggtcctcgtcgcctaccgcctcatgttcgccaccgccttcctctgcccgctcgccttcctcgtcgagagaatcgcaataaaccagaacttgatagtgcttgccatgaagctgacgaactccacgaccatcgtcacagctctcagcaacctcacgcctcagtccacattcatcgtcgcgatcttgacaaggcaggagacggtgaagcttggcaaggccagtgggcgtgcgaagctggtgggcaccctggtcggcctcggcggcgcgatgctagtcaccttctacaggggcccggagatcgggttcatgcaccggctcgcgcgcacggccgggctcagagacgccggccggctcagcggcggcggtggccatgggacgtcgtctgccgccgcccgggtcgtgggctccttcctcgccatcaccagctgcttcagctacgcgatctggctgtccatccaggcgcgagtcggggaggtgttcccgtgccactactccatcgcggcgctggtgtgcctcttcggcgcggtccagtccgcgctgctcgcgctctgcttccacagggacatggcgcactggaggctcggcctcaacgtcaggctctactcgtcagcctacgcgggcatcgtggcgtccggtttcgccttcccgctcatgtcgtggtgcctgcgggagcgggggcccctctacgtggccatgttcggcccgctcatcatcgtcttcgtcgcggtgctcagctcagtcttcctcgacgagaccttgcacctcgggatcgcgctcggcgccgtcctcatcgtggctgggctgtacatagtgctctggggcaaagcgagagaagcgcaggagaaagctgctgctgctgtgctcacagatgaagagcttggcaacgactcgtccatggctcctgctgctgccaataccaaatataacggtgaaacaaaatga

SEQ ID NO: 1863 - DNA, 1017 bp, Zea mays
atggcggctgtgcaagctcaggaggccctgcacattgaagaggagtacaacagcatgatacgctcacaatccaatgtgtgcttcctgtcgaagaaacaacggtccagggagatgagagctcttcttgaggcacaagaggacctcaccatctctccagtgcttcataacatgatggtgcaccgaagaacatcttcagagattgagctcgcaatggcggattatttcgacgccagcgtggaggccttagagatgtgcaggcagctcctccagaatatcaaagacgcccagagcaactaccaatgcatggacagcttcgtcgctagcatctcagcagcaggatgtgcaggtgctccccctgcgctcaacttcccttactgcagaagcaaccctttctccaccacaacacgaagcaacttgaggtcgatccacgacaggtacttctgcgtacttcagagcatcaggtcgagccacaggagagtggggaggaagctcaagatggtgaaggccgtcaagaagctctcgcgtgccttgctcgtcgtggcgggcggggcagctgcggcggctgccctcggcaccggggcgcacctgctgttcttcggcctcatcctcatcgggacggcgaccgcgggcgcgctcaagacgtggatcgcgccgaggggtcgtggtacaaagaagccgtccggcagcaagaccatgtcgtcgtcgttgctgcggctgcatgagcagctcgacgcagcggccaagggcacgtacgtccttggccaggacctcgacaccgtcagcaacctcgtggcgcggctctccgatgccatcgagcgggacaacgccatggcgaggtggtgcgcggagagagcggacgaggggagctcggtgctggagatggctaacgagctgaggcggagctgctcgagctctagatcgctcaccgacgaactggaggagcacgtgtccatgttccttgccaccatacacagggctagacttttagtcattagagagttctccaagaaggcatga

SEQ ID NO: 1864 - DNA, 1466 bp, Zea mays
gtcccgtgcagcgtttcccccctcaccctcaccctcacctagtcacccccgtgcgccgcgccggttcccataaaaaccaaaccccccgacgcctcgccctctctttcgttcccgaccaattcgcctggcttgccctcgcccgcccaccgctcggagccgatacaagacgagggcaatcgatctgttccgaatccgcatgcgcccgcggccgccgccgcccgtcgccacctgaactcgaacccctggccggagcgtgcggcccgcgcccgcctatggacgagtaccagacgcgccggtcgccggcgggcgagcggttcatcggcatgttctcgtcgccgtctacgccctcgtcgtccccgaccgagccttcgttcgtcgctggggacgaactccacgaggacgacttcctcttctcgtcgccggacgccgcggcgccgcagcccgacgggcctaggagcccgggccggggagcgccgcaggggcatctcggtcttcttgccgccctggcgctacacgagggggacaggaggctcctggttcgcggtggccacggcgggggagtggcggccgcggccagcgcggggacgctgctccggcgcaaggcgaccatcgcggcggccgccgcatctgcctcggccacggtggcgtcggggaacgggggcgcgttgtcgcccacccagtccccgacctcctccgcgcgggccatcccggcgaccgcgaagccccagaacgccgggcccgcccggccgtaccaccagtcggcgcccgtgaaggtgcccgtgcgtccactccgaaagccagctacgggccggtgggacgaattcgatgacgacgcggacttcgggcgcggcgacgccgccatgctgcccccgcatgagatggtcgcccgcgcatccgctggtggggctgggcccgccgctccgttctcgatgctcgagggcgccgggcgcacgctcaaaggccgagacctgcggcgtgtgcgcgacgctgtgctcaggcaaaccggattcctcgattgaatccggcaaggtgacgtggttcttgccttttgttcagcaaccgtgtgctcagtcagagtcgaagatgcgttacattaggtatgtgtagtgggttctactgtgtgagcactgagcaaagcgggaaggtaagataacaagattgaatttcccggcttgcaattttggtgttcttggatgtctgcgtgtcatattaccgcaagcttcagcagtaataagaactggtgtcctgtgtgggtctttctctgcgagctctctgtaatccaggagggaagagattttttttgtttccgtcaaggttgtctgttaggcgtagtacatatgaattatcgttatgttagtcgagactaatgctttcagctcttagtgaaagttttgttagttttgtttcttactcttttgttgatggtactgaattacctatggtgatgaaaatatgcattgtttcta

SEQ ID NO: 1865 - DNA, 1708 bp, Zea mays
cttgcgattcccaaatcccgatgcgccctcacaactagcacctccgcctcgcggctcgctccatcccttccaccaccaccgcctcaccactcaccagtcaccactcccctatcacgggacgggaccaccgccgccgcgtcctatgacgtcgccgtcctcgcaccacccggactccacctcggcgtcctcgacccctcgcgccggtgtcgggaacggcggcatccaccacctccatccgccatctctgcacccggcgcccgcgcctaccccggctgctccccccgcgcaggcgcaggcggcgcacgggggcccgcaagtgcgcctcatgtgcagcttcggcggccgcatcttaccgcgccctggggaccgccagctgcgctacgtcggcggggagacccgcatcgtctccttcccgcgcgccgtgacttccttcgccgccctcgtcgccgcgctcgccaaggtcgcgcccgtgctcttcgccccgggggcgcccaggccgtcgctcaagtaccagctgccccaggacgacctcgactcgctcgtctccatcacctccgacgacgacgtcgaccacctcatggacgagcttgaccgcatccaagacctctccgccaacgtcgccaggccaccccgcctccgcgtcttcctcttcgcgcccgcgcctgacgccgccttcggctccgtcttctccggcaccaccagtgaggccgcctccaccgaccagtggtttgtcgacgcgctaaacgcccccgcgccgcagccgcaccccaccgagcgcggccgatccgaggcctcctcgatcgtctccgaggttcccgactacctcttcggcctcgaaaccacgtccggtgagcccagccccggccccgcggcggcccgcgccaagtccgacgccacggagactccgcgccaccacgacgacgacgaatgcgacgtgccaccttccgcgcgccagatgccctacgtcgtagagggagcgtcatcgtggcccgccccgccgccgccgtacatggcgcagcctgtgtactacttccccgtgccgccgccggtccactatctcgaaccgtctgcgcagggcggctacatgcctcgcccggtctaccacattgtcggtggcggaggaagcgaggcgcctggcggagatcttcacgcggccggcggcgtctacggcgtcccgcagcacatgcaggcgttcccgccgatgatgtacgcgccgccgcgcgcggtcgtctacaactacaactcggaggggatgccatcgctgcctcccgaaggtggggcacactcttcctaggcgcatcggcttcacatctctggttcctgattattattgcagatgcctgagttctgcgtgcgtattagatttttatcgattcgtcttggttggtgtatagatgagggaggcggatgatggatagatattattgcagttttcgtctagtggaaatatattcgtgaaatggatctatgagcatgatataatactaagtagtatagtatttggtgtgattaatcagtaccgagttaatgtaatgttggattcatatattctaggtggctctggtcttcttcctctggaagccaattttgggtattttatatttacataaactggatgttgggtgaatgttctaagcagcatgtgctgtaaaactgtcgattacttgggatcttcaaaagttacgtggaacctcaatagtggtttact

SEQ ID NO: 1866 - DNA, 2081 bp, Zea mays
atggcaaagcgtcgccaacactccagctgattgttcgaccctctgtttcccatcgcacggctgagatctcactcttgtagtctcgatccgacggcagccgagcccacaaggaatcatacttcgctgtcgaaagcagtgggcccggatggacagtcacacccacagtaaccaaccgagcaacaagatccccatatcctctcctccctaccgcaaagctcccacaacctgtcccatctccatcctctgcctcccgccctcccctcccctgcatctccggccgggcgggcatggccatgtccatggcgatgtcaaaggtcttcacctcgcgccattcggaacatttgcaccaccgccttgtggcggcgagctcccaggcagcggcgccgcggctgccacttctcccgcggagtccgggcctagcggcggtaacagtcgcctaccgtccgcggctgcggccggcgagccccaggtcgacatcgagtgagtcggacctttcgcctaccccgccttcggaacgtaccatgacggcctgggacctcgccagcctctgggtcgggctcgtcgtcggcgtgccgtcctactacctcgcgggcagcctcgtggacctcggcatgtccgcgctccagggcgtcgccaccgtcgcctttgccaacctcatcgtcctcgtcacgctcgtgctcacggctgcgccggcggtcacgcacggcctgccgttcccggtgctcgcgcgcgccgccttcggcgtccgcggcgcgcacgtcccggcagtcatccgcgccctcatcggctgcggctggttcggcatcgagtcctggatcgggggccgcgccatatttttgctcctcccgtcccggctcaagtcctaccagccgctgctcgcgccggtgcccggcctcggcgtggcgccgctcgagttcgcgtgcttcctcgcgttctgggccgcgcagctcggcgtcatcatgcacggcatggagggcatccgcaagctcgagaagctctcggcgccggtgctcatcgtgctcacctcagcgctgctggcctgggcctacacgtcggccggtgggtttggccgcatcctctcgctgccgccgaggctgacaggcgcagagttctggaaggtcttcttcccgtcgctcacagccaacatcagcttctgggcgacggtggccatcaacataccggacttcgcgcggtacgcgcggagccaggcggaccaggtgctcggccaggcggggctgccagttttcatgggcatgttcaccttcgccgggctcgccatcacctcggccaccgaggccatcttcggccacgtcatatccgacccaatcgagctcctcggccgcattggagggccggcgacgacgtttcttgccatcttcggcatcggcctcgcaaccatcacgaccaacatcgccgccaacgttgtcgcaccggcgaacgcgctggttagcatgagcccgcggaggttcacgttcgccaagggggcgttcgtcaccgcgttgctcggcattgccttccagccttggcggctgctcagctccagtgagagcttcgtctacacctggcttctcggttactcggcgctcatgggtcccatcggaggggttgttctcgccgaccactacattgtccggcgcaccgctttggacgtcgacgcgctctactccgaagacagcggcagcccttactacttccagggcggtttcaacgtcgcctcgatggttgcaatggcggccggagttgcgcctatcgtgccgggatttctgcacaaggttggagttctgccgagtgtgcccagtgcgtttgtcacgtcttacaacaatgcctggttcgtcagctttttcgtcgccggagccgtctactgtctgctctgcaacaggagggggaagcaagagagagaacattacagttgatactatactaggcatataagcatgtgtgtggagattgttactattcttgtactgtagaaaagattgctactattgaccgcatcctaatcttctataagttggttatattctatcgaaaggattgttactattgaccgtgttctaatgtgtcctaatctaataaacttc

SEQ ID NO: 1867 - DNA, 2996 bp, Zea mays
tccgcttcctccgtcccctggcggcctggcccctgcggtttctggttgtccctcacgccaatgtagcttgcccctgttttgttgctttgaccaccttaaaaacctcagggccttcaaatatactcaccgaatcacatcctgtcacgcctcctgctcaaattcctaacgcccgagaaaccaagaaccggggtgaggccgctgtgcgacgccgtcaccttcacctaatcccaacttccccactagtcctcaagtgtctctcttcttctcttcggttacaagagcagaccggagttaccgggcggtggaggccgcgatgaagagccctcctgtcatggatcccgaggcgccgccatcgccgccgctgccgggcactcctcccgatgacgaggaggagaagcggggaggacggaacggggtgccatggcggatgacgctgagcctggcgtaccagagccttggcgtggtttacggcgacctcagcacgtcgccgctgtacgtgtacaaggcggcgttcgcggaggacatccagcacacggagagcaacgaggagatcctcggcgtgctctccttcgtcttctggacgctcacgctcgtcccgctcctcaagtacgtctgcgtcgtcctccgcgccgacgaccacggcgaaggaggcaccttcgcgctctactccctcctctgccgccacgcgcgcgccgcgctcctcccgccaggacgaaccgccgccggggacgaggaccagttcttggacggagccgacggtggcaccaagaaggctacggcgcagaacggcaatgcagtgacgctgggcgggggcgctgctgccagcgtcaggaggctgctggagcggcacaaggtgctgcagcgtgtgctgctcgtgctggcgctggtgggcacctgcatggtgatcggcgacggtgtgctcacgccggccatctccgtgttctctgcagtttccgggctggagctgtccatggagaaggaacatcataagtatgtggaacttcctattgcctgtatcatactggtttgcctgtttgcactgcaacactatggtacacaccgggttggcttcatttttgctccagtagtggtcacatggctcctatgtataagcgttattggtgtttacaatattattcactgggaacccactgtatatcgagcattatctccgtattacatgtacaagttcttgaggaagacacagagaggaggttggatgtccctgggaggaatactgttatgcgtaactggttctgaagcaatgtttgccgatctagggcattttaaccagttgtcaatacagattgcttttacatgcatggtgtatccagcattgatccttgcatacatgggacaagctgcttatctgtgtaagcatcataccatggaaagtgactataggattggattctatgtgtctgtgccagagaaaattaggtggcccgttatggcaattgctattcttgcagcagttgtgggaagccaagctgtcatcactggtacattctcaatgatcaagcagtgcacttctctgggctgctttcctcgggtgaagataattcatacatctgccaaagtacacgggcaaatatacatccctgagatcaattggattctgatgatactgtgcttagctgtaaccattggtttcaggaacacaaaacacttggggaatgcatcaggattggctgttataaccgtcatgctggtgacaacgtgtctgatgtccctggtgatagtcttgtgctggcataagagcatatttctggcaattggcttcattgtgttctttggaaccattgaggcactgtacttctcagcggcactcatcaagttcagggagggggcctgggtcccaatcgtccttgcttttatcttcattttgataatgtgcatctggcactatggcaccatcaagaggtatgagtttgacgtccagagcaaggtttccatcaactggctccttggtctcagcccgaacctcggcatagttcgtgtccgcggcattggcctcatccacaccgagctcgaaactggcgtcccggcaatcttctcgcattttgtcaccaacttaccagccttccaccaggtactcatattcatgtgcatcaagaacgtaccaataccacatgtccgtcctgaagagaggttcctcgttgggaggatcggcccgaagcagtacagaatgtaccggtgcatcgtcaggtacggctaccacgacttccacaaggacgacattgagttcgagaaggagctggtgtgcagcgtcgcggagttcatccggtcagggtcgtccaagttgaacggcatgcccgaggagttcgacgaggaggagcagcgcatggcggtagtccgctccaacagcatccgcatgctcgaggaagaggctacagtggagaagaccgtcggcccgtcccaggccagcagggagatacggtcgccgtcgcccactcctcccccggtggttggccccaagaagcgggtgcggttcgtgctgccggcagcgagcccgaagccgaatgccggcgtgcaggaggagctgcaggagctgtccgacgcgcgggaggccggcatggcgttcatcctgggccactcgcacgtgaaggcgaagagcgggtccagcttcctccgccggttcgtgatcaacttctgctacgacttcctgcggaggaacagccggggtcccaactacgccgtctccatcccgcacgcctccacgctggaggtgggtatgatgtactatatctgatctgatgactgaacccctgaaactgagggggagaaatataggagcaggaaaagatgaagaggaaatggaacaaaaagttttcagctgtatatgctagatcttgtaagtaactgctggtgagttccgttgtaaatgcagcttagttttcttgttaggccttcggcttctctcgtgaataggagtaccaaaattgccttcgccggtggagaaaatttcatactccctccgttttgttttagttgtc

SEQ ID NO: 1868 - DNA, 3129 bp, Zea mays
ccgcgtcagaagcaccaaccgagccatggttcacgggctgcgggctgcgggctgcgggctgcggcggccgacgggaccggtgtgagcaggcgaccacgaaggggcccacccgtcggtggctgcctgcccccgctcgtcaacaactaccccgaaagccgccaagcggctgctgcgcaaggtgcgaaaggcaccttccctgcccgattggcgatttaagtggtgggggagggaaggccgatggtcagtgaaagagaggtaggtggccggacggtggtggcatcgccaattcaactccgcatctgaatcggcactcggcagcgcgccagctccataggtgaggcttcggatcccgatctccgcaccctgtccgattccagctccgtcctccccggatttcagttccaccgcgttgaggttttctttttttgtctcctttgggtcctcttgttcccgaagcatggggactgggggttgaattcgtgtagagatccagatgattgcgctgctagctccgatcgccgattttactctgctgcctgccggtccagatccatggaagcaagtcgatgaacttagagggcttccgctctggattttctttgaaaataagttagagtcctgtcaaacacctcttttctctgccaaacgatctacaaaatggctttagcttagaaaactgtttagttagaaaactgtttagcttagaaaactgtttactcggccaggggacagagagacgcattaccttgccttcttgctcttttcgcctctagcggtgctgtgtattcagttacttcgtctcaaagaaattcagttggtttcatcctatacacctatatgtagccggccctgtgactcgcagggcagcgtatgatctttgatcctcggcttatgtattcacctcatcggccgcttaaccttgatttttttttctcagtgtaggaggagatggcgctcacaagaatcggtcttgctggccttgcggtcatggggcagaaccttgccctcaacattgcagagaaagggttccccatctctgtgtacaacaggacaacctccaaggtggacgagaccgtgcagcgtgccaaggcagaaggaaaccttcccgtctacggcttccatgaccccgcgtcctttgtgaagtccattcagaagccacgggtggtgatcatgctcgtcaaggccggcgcgccagttgaccagaccatcgcgacgctcgcagctcacttggagcagggcgactgcatcatcgatggggggaacgagtggtacgagaacacggagaggagggagaaggccatggaggagcgcggcctcctgtatcttggcatgggtgtctctggaggagaggagggtgcccgcaacggcccgtccttgatgcccggaggctcgttcgaggcttacaagtacgtcgaagacattgtcctcaaggtggctgctcaggtccctgacagtggcccgtgtgtcacgtacattggcaaaggtggatcgggcaactttgtcaagatggttcacaacggaatcgagtatggcgatatgcagctgatttccgaggcatacgacgttctcaagtcggtcggtaagctcaccaacagtgagctgcaccaggtgttctccgagtggaacaagggcgagctcctgagcttcttgatcgagatcacggccgacatctttggcatcaaggacgagcatggcgatggctacctggtggacaaggtccttgacaagaccgggatgaaagggacagggaagtggacggtgcagcaggccgccgagctgtcggtggccgctcctacgatcgaggcgtccttggactcgaggttcctgagcgggctgaaggacgagcgggtggaggcctccaagatcttccagggtgactactactccaccggctcgccggtggacaaggcgcagctggtggaggacgtgaggcaggccctgtacgcgtccaagatctgcagctacgcgcagggcatgaacatcatcaaggccaagagcgcggagaaaggctgggggctcaacctcggcgagctggccaggatctggaagggcgggtgcatcatccgcgccatcttcctggaccgcatcaagaaggcctacgacaggaacccgggcctcgccagcctgctcgtagaccccgagttcgcgcaggagatcatggacaggcaggcggcgtggcgcagggtggtgtgcctcgccatcaacaacggcgtcagcaccccgggaatgtccgctagcctggcctacttcgactcctaccgcagggacaggctgcctgccaacctggtgcaggcccagagggactacttcggggctcacacctacgagagggtcgacatgcctggctctttccacaccgagtggttcaagattgcgcgcaacatctccaacaactgatgagctgctcaacggatggcatgcccggtgttgactactccagtcggtaatgagatttcctgcaggaacttgtctattgatctttgtaagttaattatttatatgaataaaataagagcagacatgcttgtgtttgggcaccctctgttttctcctccctgttaatcaatgcaccatgctccaaaggtgatgtacataattcagacaagtctcgatgatgtacatgttacagaactagcgaaagagttcagcttggtcgccgcagaaaacctccattgcctcgatgtgcgtccacattggagaggtcttcacgaaaggaggaggatgagttgagaagccatcaggtgttgtgattgaaacaaacttggacattggtctaccctcacaagcttttgggtgcagccagcagtgcaatctttgagctagtctccataactttgcttgcatggatgaagcacggtgatcatctcctgtgttaggggtccatgttcctcttctggtgcagccagcagtgttatctttgagctagtctccatagctttacttggcatagatgaagcacgatgatcatccctctgtattagggggtccatgttcctcttctggtgcagccaacagtgttatccttgagctagtcttcatagttttgcttgccgtggatgaagcacgatgatcatctcgatcctgtattaggagtccatgttcctcctccccctccaacgcagaaaatgg

SEQ ID NO: 1869 - DNA, 2435 bp, Zea mays
aacgattcttaaaatttccaataagtactcatgaaactgcgggggacaatagcaaaaacgaaacggcgaccacatacaaaacagcgactcccttgttgccggctatagcttttgcctccgtttcgctttgataaataaaagccataactcccggccgtccatcgctcgcctcccctccctccctccccgccgctgtctccggcgacagccagcctcatcgtccatggcctctacatgcctagcccccgcctccctctccacgcccctgctctccgactccatcgcgcgcgcgcccgccgccaacgggcacgccaccaaccaccgacaccaccaccacgacgacagcgacggtgctgcggcggtctccgtttgcgacgacggcggcggggacccgttcgcgttcctctcggaggaccggccgccgagggaccgagggccgtccccggccgacccgttccgcaacggcacgccggcgtggggcggcggcgtgtacgcgtggtcgaggacgctgctgctcctgccggtcgcgttggtgcggctggcactgttcgggctctccatcgcgatcggctacgcggccacgtgggtggctctccgcgggtgggcggacacgcacgggaggccgcgggtgggcggcgggcctatgccggcgtggcgccgccggctcatgtggatcacgcggatctcagctcgctgcatcctcttctctttcgggtaccattggatcagaaagaaaggaaggcccgctcgtagggagctcgcacctattgttgtttccaatcatatctcgtacatagaacccatattcttcttctatgaattgttcccaaccattgtttcgtcagagtctcatgatgccctaccatttgttggaacaattattcgagcgatgcaggttatatatgttgacagattctcaccagcttctcggaaggctgctgtaaatgaaataaagagaaaggcagcttgcaatagcttcccgcgggtcctgttattccctgaaggtaccacaacaaatgggagattcctgatttcgttccaacatggtgcattcatacctggctaccctgttcaacctgttgttgtccgttatccacatgtgcactttgatcaatcatgggggaatatatcgttattaaagctcatgtttaagatgttcacccaatttcataatttcatggaggtagagtaccttcctgttgtctaccctcctgagatcaagcaagagaatgcccttcattttgcggaggataccagctatgctatggcacgtgccctcaatgtcttgccaacttcctattcatatggtgattctatgattatggcacgggcaatagaagctggaaaggtgaatggctcaaattacatggtagaaatggcttgggtaaaagatatttatggtgtgagcacagcagaagcaatggacctattggaacatttcctggcaatgaatccagataacgatggacgtgtgaaagcacaagatttttgggctcattttggtctggattgcagtcctctgtgtaagaagatatttcactactttgatttaggcattaaggaatcgattacgttccgtcagttcttggttgggtgcgcgcacctgaggaagcaaccgttgttccagggtgcctgtgagaccgcctttgagaagtgccgggatcctgaaacatctgagatctccagggcacagctagccgatgtcctgcggttaagcatgctgctgccgtctggtgatagaatgctggacctgttcaagacgtttgacatagatggcgacgaaaagatcagcaaggacgacttcatgacgtgtcttgggaggttcccgttcctgattgcgttctttgcagccccgatcaatggggaagtgtacatcgagatagtctgaaggcaaggcgatgccgtgtaagagtaaccaggcgcaggtagggccggggatccctccgtttatgcaatgggatacccacctgtatttgggttgcatcgagtggctgaccaatatagtgcgtcaattttgtttcgttgcttctttcaaatgctcacttcgttcttttttatttgttgcgttttagttcaaagatgaactagcaggcgacaaatatttgagaagggagttagtattatattgtcattacggaatctgctgtgagatacgcgctggactgatagattgtcgatggaactgagaatgcacatagaaagcatttctaatgtactcctgtaagaaaacttttttggacaaacaatgaccctgtaacctcaagttgtgtttattcttgctagatggattacataacaaagcccaacgtaggtatatccagatacataaccttttgaacattgtaacctcatgttcggcgagttgaacatttgtttagaccatttagatgtaatgtatatttagatacataacaaagcgcagcaaatattcagac

SEQ ID NO: 1870 - DNA, 1512 bp, Zea mays
atggcggttgtcgacgccatggccctctccacgcccacgccagcgcgagcagagcagcctgacatcaccagatgtcatcgagggggcgaggtgcgggagggcgacctggtgcagttcaactacgtgtgccgccgcgcgaacgactacttcgtgcacaggtgcgtggtggagttcccagacgccatagcgttgctgttcgacgcgtgcactggagacgcgtgctacacagctccagactttgagtcagatcgagtccagattcaccaaatgtgtcagggtgcccaaatggttcaaggatactgcgtccgtctcatggtggggaaattgttcgtagttgagaacgccgctgtgggcagcgaggtggagcaggaggagccaaagaaggaggcaatggcaggagtaggggagactctctgcagcttcatggaggggtttggggatcaaggagaggactccattatcttgtcaccgcggctgaaggagattagtactcctgaccgccccgctgccctccgtttcctaggcgaacggttttctgagatttttggaagtccttattacatggctccagaggtgctaaagagaaactatggcccaaaggttgatgtttggagtgcaggagtgattctgtacattcttctttgtggtgtccccccattctgggcagaaacggaacagggtgttgctcaggcaatcattcgatttgtcattgatttcaaaagagatccatggccaagggtgtctgataacgccaaagaccttgtcagaggaatgctgaatccggaccaaaaacgacgattgacagctcaccaagtgcttggtcacccatggttgcagaacattaagaaggctccaaatgttaatttgggtgaaaccgttaaggccagactcaaacaattctctgtgatgaacaagttcaagaagcatgcacttagggttatagctgagcatctttgggtagaagaggctgctgacataaaggatatgtttgagaagatggatcttaacaaggatcaaatgcttagtttcgaggagctgaagcttggtctgcataagtttggtcagcaaatgcctgatgcagatgttcaaacactaatggaagcggcggatgctgatggaaatgggtccttgaattatggagaatttgttacattatttgttcatctaagaaagatcggaaatgatgagcatatgcataaggcatttgcatacttcgaccggaaccagagcgattatattgaaattgatgaactccgtgagtcattagctgatgaccttggacaaaaccgtgaagagattatcaatgccatcatccgtgatgtagacaccgataaggatggcaagataagctacgatgagtttgcgacgatgatgaaggccggaacatacgagaggaaagcatccagacagtactcgagaaagcatccagacagtactcgagagagctgcaagaacagagtattctgaggagcctttgttgaagtaaatgtaatcaagtttcctagcaatctt

SEQ ID NO: 1871 - DNA, 3727 bp, Zea mays
ctacgcactcctcccccctccccccccgcagctacatctcccctcccgcttcgccagtcgccaccgcgcggcgggagctcgctgaagagcttcccccctctccccccaggcccgcggcggcgccggctcggcccccgtcatcgcgctatcgtaggctcgcgggctcagctgatctggtcagcgaggcgaggttgccggggggccagattccgctcccgcccgcgcgtggtctggggtgtgggcggtggatcggctgcgcgggtcattagatctatgcccgagatctaaggcgccagcgccaggtgcggaggcggaggccgtgagccggtggcggtcggaggccggggacagggatggcgtggtggtccgggaaggtgtcgctcagcggcctgcaggacatcgccggagccgtcaacaagatcagcgagagcgtgaagaacatcgagaagaacttcgacagcgcgctcggcctagaggagaagcgcgacgatgaagaagcatcaggatcgcggacatccaactctgatggaataggattcttcaatcctgtcatggctttcatgggacacaatggtgaagaagatggcactgaagtatcagaaaagccacaatttccaaaggatctgtcagtagaggaagaaaatcatagcaccccaactaagaaacagacatccgaggtagatcattcagaagtatcagtaacaacatttccagaacagccttcaaaatcagaagaagctcatagtatctccaatgagtcacctgtttctaaggcagatgtttctgagcagtccataacaccacaaactccagcacatccttcagtagcagaagaaaagcttgatggctgcactgaggcacttgcatctaaggtgggtgatgatgaagcatcagaaacatcacaatctccaggacatccttcaacagttgaagaaaaccaggaccatcaatatagtaaacattcttgtcctagtgatgaagcagagccaaatcagcttagagagtctgctggagacttacctgatggtagtgcattttcttcgcctatcaaaatagataaatcaggtgacaccgaaacaggtgaatctattgatacaggaaaggaagacacatctgatgggaatgcctctcagtcacaaccagcagaatccatgctagctagttccgataatataactgaagttgaggacaagattgctcaagaatacaatgtcccaaaagaacttagtagcccacaggagaattgcgatacagtagacaaagttactcgtcttgaagtcaaattacatgatggcaatattgataccaaaaaaagtgaggaagaaagcaataagatggaggcaggggaagtatctgttgttgtacaggaggataatgtaatggagcaacctgaagatttaatgtcaaagtccataactgcagctcatgattcacattcgcagaatgagtcagtggtcagtttgaccgatgtacctgctggactagggggagtaggccccgcagataattttacagaagaagaaaagattgctagaatcacagattttcagattgtggactctgttgtttctgttggtgagctagagaaattaagacgtgaaatgaagatgatggaagctgcattgcaaggtgctgcaagacagtcacagtccaaagctgatgaaattgcaaggttgatgaatgagaatgaacaactaaaatcaacgatcgatgatctcaagagtaagtcttctgaagccgaaatggatgcacttaaagatgaatatcaccaaagagtagcaactcttgaaaggaaggtgtatgcattaaccaaagagcgtgatacactaaggagagaacagaataaaaaaagtgacgcagctgcccttttgaaagaaaaggatgagatcatcaatcaggtcatggctgaaggtgaagaactatccaaaaaacaagctgcccaagaagctacaatacgaaaactgagagcacagattcgtgagtttgaagaagagaaacaacgtctgaactcaaagatccaggttgaggaggctaaggtcgaaagcattaagagagacaagatggcaaccgagaagttgcttcaagaaacaatagaaagaaatcagactgaacttgcagctcagaaggagttctacaccaatgctcttaatgcagctaaagaggctgaggcattggctgaagcaagagtcaacagcgaagccaaagttgaactggagaaccttttaagagaagctggcgaaaaagaaaatatgctgattaagacaatcgaggagttgaggctttctctcacccgacaagaacaagaggctgctttcagggaagaaagactaaaaagggactatgacgatcttcaaaagcggtatcaagctagtgaacttcgttataatgaactggtgacacaagttcccgagtctaccagacccctcctaaggcaaattgaagccatgcaggagacatctgctcaaagggaagaagcttgggctggcgtggagagaaccttaaactctcgccttcaggaagcagaagctaaagctgctgcttcagaagaaaaggagcggtctgtaaatgaacgactgtcgcaaagtttatcccgcataactgttcttgagacccagattacaattcttaggacagagcaaacacagctgagccgatctcttgaaaaggagaggcagagagcatctgaaagtagacaggagtacctagcaattaaagaggaggcagcaatgcaagaagggcgggctaagcagctcgaagaagagataaaggatcttagagttaagcacaaggaggagctgcaagaagcagcagaacacagggaacttcttgagaaggaccttgaaagggaaaaggctgccagggcagaaattgagaaaacatcttcccgtgaagcgcctaaagtcccacttcccgatcagacaagaaatgcccctctcagaaagctgcctagttctggcagtataaatagtctagaagaaagccatttccttcaggcttcgttggatttatctgacaatgcttcattagagaggcgaatgtcttcagaaagtaatatgtcatattatctgaggaccatgactccaagtgcttttgagtcagcacttcgtcaaaaggatggagagcttgcttcttacatgtctcgcttggcctcattggaatctattcggaattcactggcagaggagttggtgaaactgacagaacaatgtgaaaagttacggactgaagccgctgctgtgcctggcttaagggctgaattggaagctctgaaacaaaggcacttccaagctctagagttaatgggggaacgtgatgaagagttggaggagctaagaaatgatattgttgacctaaaagagatgtacagggagcaggtggatcttcttgttagccagctccaggcattgggtgctcgtgtatagtgccggtatggatttgtcgtgccatcgggcaaggcaagacaggtctgagacttgagcatgttttcctttttattttgtaaccgtacaacggcactgaaaatattcgtctgtacacatcaaaaacaccttcggcgttgggtttaggaggatacgttgttgtatactagatcaagtagtttcacagttttacgtgcattcttttttatctgtgttcattgaaatgtatcaaatttgaatccatttgcatgtgtacctcagaggaatgcaatcaatcaataatatcgagagctctttttatgtcctaa

SEQ ID NO: 1872 - DNA, 3272 bp, Zea mays
atgctgcagatgctgggcttccgcgggggaagccccagcaccggcgacgcgtcccccgccatcagcggggacggcggcgcggccgcgcggccgctccgcctggtgtactgcgacgacaagggcaagttcgtgatggaccccgaggcggtggccgcgctgcagctcgtcaagggccccgtcggggtcgtctccgtctgcggccgcgcgcgccagggcaagagcttcatcctcaaccagcttcttgggcgaagcggcgggtttcaagtggcttcaacacatcggccttgcaccaaaggactttggatgtggagtgcgcctttgaagagaactggtctggatggaactgaatacagtcttgtgttgttggatactgaaggaattgatgcttatgatcaaaccgggacctatagcatccaaatattttccttggctgttttgctgtcgagcatgttcatctacaaccagatgggaggtatagatgaatctgcgttggatcgtctctcgctggtcacagagatgacaaagcacatacgtgtccgggcctcaggtggaagctgcacatcatcttataaaccgtcaaacataaacctcaggccctgttatgcatcagacacctttggtgtgcgacgagccgatgacaccgtgcttcctttactacaggacttttatctggatttggcagaagacaacagaaaaattactccacgggattacctagagctagcattgaggcctgttcaaggtggaggaagggacatatctgcaaagaatgcgatacgggactccatccgtgcactttttccggacagggaatgttttacacttgtgcgacctgtgaacaatgagaaagatctccaacgtcttgatcaacttcctattgctcttgaaacatatttacactttaaacagtttgatggcatttacaaattatgtctgtcccttcatgacctgagtaatttccgtccagagttcagatccggtctggatgctttcacgaaatttgttcttgaccgaacaagaccaaaacaacttggagctactacaatgacaggtcccatccttgctggattgacacaatcgtttcttgatgctattaataatggtgctgtccctacaatctcttcatcatggcagagtgtggaggaggcagaatgccagagggcatttgattctgctgtgggcacttacaattcttcttttgaccataaaaaacatatagaagaggattctttgagagaagcacatgaagatgccatgaggaaggctatcagtgcttttaatgtttctgctgttggtgctggaagacagttagagcatatagatgctgaaaggaacgccctgagattgaaatgcaattcaagcgatgataagttggcattgctgaggaagcagcttgaagcaagcgagagtcacagagctgagtatgtgaggcgctatgaggaagttctgaatgataaacagaaaatttccaaggattactctattcgtataactgaacttcaggccaagagtagcaagttggaacaacggtgcttgagcttgtcttcttctcttgaaactgcaaaacgagaatccaatgattggaagagcaaatatgatcatggtattttgcagcaaaaggcagatgagagtaagttaaaatctcaaattgcttccctagagtctagggtgagtatcagtgagggtagattatcggcaacacgtgaacaggctgattctgctcaagaggaagcatccgaatggaaacgcaaatatgaagttgctgttagtgaggccaaaacagctctgcagagagcggcggtagcacaggaacgcacaaataagaaagtgcaagagagggaagatgctttgagggtagagcttgctaaccaactatctgagaaggaagaggaaattgcaagattacatgcaaaacgtagtcaaatggaaattcatgctacaagtttgatctcgaggcttgaggccactgaagcgaagtcgaagagccatgagtctgattcgttggctttgagggaggagatcagattactgactgataacctggagtctattagaagtgaagctctgtcacgtgagaaggaagttgggatcctggaacaggaaaagaaccatcttgaggagaagtatttgtcacagtgcaaaaagtttgatgagacagatattagatgcaaggaagctgaaagggaagcaaaacgagcaacagaattagctgatgtagctcgtgtagaagcttctgctgctcaaaaggataagggggaagctcaacggctcgcaatggagaggtttgcactgatagaaagaatggagcgacaggttgaagctctagaaagggacaaggctaagttggtagaagagattgagagacttcatcagtcagagaaggatgctgtgtccaaggtcgcattgcttgaaagaaatgtaggtgagcgggaaaaagaaattgatgagatgttgaagcagaacaaccagcaaaggtccagcacagttcaagtgcttgagagtctgctggcaacagaacgtgaagcacgtgctgaagccaataagagggcagaggaactgtcgttgatgttgcaagcaactcaaggcaaactggacatgctccaacaagaaaccacacttgatagcaagctcaagacctctgcaaggcgcttaaggggtgatgctacagagtctgtacatgatatggatatcgatggggacaatgggaggcgtcggaaacggtcaaaaagcacaacaagcccgttcaagaacaatcacacagaggatggcggttccgtatttattggcgaagatacttacaacgggagtcagcaagggacagaaagcgaagactatactaaattcactgtgctgaagctgaagcaggagctcaccaagcacgggtttggtgctcaactactccagttgaaaaatcccaacaagaaggatatcgttgccttatatgaaaagcatgtcatcggcaagtagttcctcggcaatacttgtatttatgctttatagacttccctctgtagcgttgaaactttaattgacacgatcggattgaagcaaacaatgcatgtaacttagtttaaatctctggtctgtgtattgcaacaatggtgcagttcattttagcatgcatcgtcggcaagtttgtagttaggagtcgtgattgaaatgtttgtctttccaatcccggcacaggttttcttgtaatgctatgacgacaatctattcggattccatggttttgtggtgtaattttatgccatcgatcttttcagattcta

SEQ ID NO: 1873 - DNA, 2350 bp, Zea mays
ccgcgaacccgacggggattaaatttcccccatttagatcccgcggggactaaattagttccatacccgtcccctaatagtggaattcctcgcggggaatcggggatcggtccctattgccatctctaaacagatatagtaaaactgtgtgacctttatgcggcctgtatatgggctaaataaaacagtgtatcagacgcgttagcccattgctctttgtctactctatatatatgcgtctccttgagcaaatcacaacaccccacgccttgtctctgaactctgatcagagatcaaagaggtagccgttaagttaacgatggcttccgccgacctcgcagaggccatggagcccgggaagaagagcaacgtcaagtatgcttccgtctgtgccatcatggcctccatggcctgcgtcatccttggctacgacattggtgtgatgagtggagcggcgatttacatcaagaaggacctgaagatcacggacgtgcagctggagatcctgataggcatcatcagtctctactcgctcatcggatccttcgctggcgcgcggacgtccgacaggatcggccgccgcttgaccgtcgtcttcgccgcggtcatctttttcgtgggcgcgttgctcatgggcttctccgtcaactacggcatgctcatggtgggccgcttcgtggccggagttggcgtgggctacgggggcatgatcgcgcccgtgtacaccgccgagatctcgccggcggcgtcccgcggcttcctcacgtccttccctgaagtcttcatcaacctcggcatcctgctcggctacctgtcgaactacgcatttgcgggcctcccgctccacctcggctggcgtgttatgctcggcatcggcgcggcgccgtccgccctgctcgcgctcctggttttctgcatgcccgagtcgcctcggtggcttgtcatgaagggccgcctcgcggacgccagggcggtgctagagaagacctccgcctcgccagaggaggccgcagagcggctggctgacatcaaggttgccgcggggattccgaaggacctcgacggagacgtggtcaccgtacccaaggagcgaaacagcggtgagatgcaggtgtggaaggacctcatcttgtccccgaccccggcgatccgacgcatattgctatcggccgtcggcctgcacttcttccagcaggcttctggctgcgattctgtcgtgctgtacagccctagcgtgttcaggagcgcgggaatcaccggcgacaacaagctcctgggcgtcacctgcgccgtgggcgtcaccaagacgctcttcatcctggtggccacgttcctgttggaccgcgtggggcgtcggcctctgctactgaccagcacgggtggaatggtcatctcgctcatcagcctcgggacggcgctcaccgtcgtggggcatcacccggacgccaagatcccgtcggtcgtcgctctgtgcatcgcgtccaccctggccttcgtcgccttcttctctatcggcctcgggcccatcacgggagtgtacaactcggagatattcccactgcagctgcgcgcgctgggctttgcggtcggcgtggcgtgcaaccgcgtaaccagcgccgttatctccatgaccttcctgtccctctccaaggctattaccatcggcggcagcttctttctctactccggcatcgccgcggtcgggtgggtttttttcttcacgtgccttccggagacccgtggtcgtacgctggaggagatgggcaagctgttcggcatgccagacacggacatggctgaagcagacgacaccgcagccaaggagaaggtggtggaaatgtccaccaagtaggcaagtagatggaacgaaaatacaatattcggcggtgctcgggcagataggcaatgattggtgcagcgtcgcttacaagagcagagctcaacccaacacaaacaaaataaggaaaaaaaaactgaagcagcgtggcaagattggcctctgagaatcagagatgtcgtggtgcactagtgctgcaggacagagacggcgtggtccagcaagagacttccgcgagacaggctgccaagtgacagctatgagtcattgttgtcagagtcgcgtgtgctttgtcatgatcgatgatgttttcgtccttattttacaagaaaattccctctcaacgaatgtaaccaacaaaccattctatgtttttttgacccgtcttgtttctttctttgtttttgatatagttcattgcaggaaaaaaaatcctcttaataccaactcttacaacaaagagaactagcactaaattgagaggtttgaaaacaatttcatatcgagaaacct

SEQ ID NO: 1874 - DNA, 2055 bp, Zea mays
tcccacccacgtgtctttctccgccgccgaactcgaacgcggcacgcctcttgcctcaccacaggccagacgaagaagcggaccacacgccaccagctccacctccacggaatcagacggtctcctcctccttttctttctcccgtggactgcagcgccgccgggtagagatcccaaatctgcgcctcgaccaattcctccttcctccgagaatggtgatcctctatccagggtgtgttgctccaacagttcaccgtgattttctgcccagatgggtgctgctgaacaacagctcgagaatgtactgccatgtctttccagatagaacgaaaccgaaaaggcaatacaggcatcagtgggtgccttgcttctccaagggatcttcgttccaagatccactgccctctgtaaagccttcacgccttcttccagcagaggaactaaagacatatcccaacactgttcctgaggagatatttaacacgatcatactagatgactccgatgcattctatgtgctagaactgagcacgagtagagaatttagttcctctttggataaaaattctgcaatcttaatctgcctatttgatgtcgatggtgactccctattacaaagagtaccggcaatctatttgggtcaacctacacatggatttaagacagagcagcagatacccttccaaagtggttcagttgatatcgttactttcaaggggtcaaaactgaaaacgattaaagaagtctggatcggtcttgaatcaggttcatggagattagatggtttgagcttgaaagtaatacatggaccagttggtcagcctaaagaaataaatggaactccagaacagaagttcagcggtttgcagtacacttttgagaacgtaaatgtgttccttggagatgatggagcttcagtagctgaagcaaggccgacggctatcactgacctctcaggagtcggcctttctgatcttcaacaagggatgttatcctcaagaagcaaagcttcaagcattcaggaagtaagagaggatgggttgagagagtacgccgaccttaaacaatctctgctgctctatgacgcatctatagtgataaccggcttctctaccttcatcttggcttcaaatgacagcgctgcctattcgttcctgataggtggcattggagggttcctgtacctgttgctgctccaaagatcggttgatggtttgcctgtgatcggttcaccttcagaagctggcggtgcacagccttcggtaaaaagtttcagcggtgtaaggaggccatggttgatactatcactagtactggttgcaggtgcagttgcactgaagtatggtgctggaggcgacagctttgcgctcacacccaccgacctctttgttggcactgcagggttcctagcaaacaaggttgctgttcttcttgcagcgttcatgcctatgctaagtgactcaaagagtgaagatggatctggtgacagcagttaattggacttctttaaaaatatgttagtaatagtttcctatagaagatctgtattcaagactggaacggaattagctgaagtgcaaaggacaagtcctagtttctgaactggaaaaaagaaccctctcatcttggtgactgtgtcatccttgcaagggttcaattcacagcaagagttcaagtgttgtggcagtttgaagtcagaaacttaagttgtatttttcagacatgcaggacagctgtgtatcattatatcaagaagaagaagaacaaaagtctaggatactttgaagcacccttagaaaggcatgaccagtacagcagaagaaaaacagagacacaaaaactaaggacatggccataaactacggagcgttttggcttttgccatacagcacaacttgatttcatcttagaaacttgagttgtagtatagtatactcacctatcggacactgaactgttaagatgatataccgactacagctttgttgtatgtaaaaatatgacatttgtgaggttaaatacacagtaactatcgaaacaaaatgcttggcgttg

SEQ ID NO: 1875 - DNA, 355 bp, Zea mays
ggtctcaccctatttgcttcgtagctgccacgtcccccccccccccccccccgacgttgcgttctcctattcgaaaaggcggagtacggtaggcgaggtggttcggtagtaggctagtagcagtaggagtactgttactggctgctcgttagtcaatcattgatgcgtttggaccagccctaccggagcacgacacgtgtcccaccgagccccccgaccgcgcgccgcctggtggcgacggctctcacgtgcggtgccgtcctggggtttggatctggatcggatcggatcggatcgcccgagggtcacgcacgcttcttctctttcacgttgcgcagtatacgagtcgtgtacg

SEQ ID NO: 1876 - DNA, 1276 bp, Zea mays
caaccgcccaagagcttcaagacacacgacggtagtagctacagtacgtttcacatcaatgcatgaaaggatgcgcggtcgtcggatgcgtgttcacgtgtaggataggcatcggcgcgcgccattcgtgtggttactacacacaggaataataggacgcggccccggccgcctccgatctcagctctccgttacacgcaaacgcaagctcccaagcagctaccaaccagccgggagagggagcgcacgcactgcgagaatggccacggccggcggaggggccgggcatctgaagctgctgggcgcgtggccgagccccttcgtgaaccgtgtacgcatggcgctgcacctcaaggggctggagtacgagaacgtggaggaggacctcaccaacaagagcgacctgctcctcgcctccaaccccgtccacaagctcgttcccgtcctcctccacggcgacaagcccatctccgagtcactcgtcatcgtggagtacctcgacgacgccttccccggcgctggccaggccgtcctccccgccgacccctatgaacgcgccgtcgctcgcttctgggccaaatacgtcgacggcaagttgcacggcatgatggtgaaggcgctcatgggggcaacggaggaggagagggcgacggcgacggtggacgcgctggccgctatggacacgctggagggcgcgttcgccgagtgctccggcgggaaaaagttcttcgccggcgacgcgcccgggtacctggacgtcgcgctgggaggcttcatcggctggctgcgcgcctgggacaaggtggggggcgtcaagctgctggacgccggccgggtcccgcgcctggccacgtgggcggagcgcttcgccgcgctcgacgtagccaaggaggtcatcccggaccccgaccacatcgccgagtttgccaaggtgctgcaggcacgctccgcggcagctgccaccagcaactgagctcgcaagtgaatgctgctgctctgccttcctgataaaatcatatcatggtacccggtttgttcgtttaatctggcgcggaaaaaacatggtttgttgtcgtaccaaactaagagtatgcatgcatgcttgttcttaattatatgtacattcgttcaagaaaaaacagattgttcatgtaacggttaggacttgctgtatatccatatgttgttgtttggttcctgcacaacttaattaagatgcgcagtttagcatttgttggggacttgttttcaactgctatgaattaagaacaaggca

SEQ ID NO: 1877 - DNA, 1814 bp, Zea mays
cccacttttcagtcacgcagactgactcaaatctgggcccagcaaaaaagtccccccccccctctctccgacgattccctctctaccggatcccccccctccctcctcagcttccattccctctcctccgttaattctccgctctccatttattcctttccagttccgccgctccattcccagctcccaccaccaagggcaatccctctccgacatccaatccaatacaatcacgcctgcgcacacgcaaccccagctcaagccccaagtccaaaccctaacccggcggcggaagatatggccgacacggggcgcgacgccttccctgacgaggcggagcccgcgttcaccctcgacgagtacatggaggacatcgaggccgtggagctggaggcggatttggtgctgggcggggacgagggcaaggagtgcacctacgccggcggatacctcaagcgccaggccgtcttctcctgcctcacctgcgtgccggatggagtcgccggggtctgtaccgcctgcagcctcgcctgccacgacgggcatgagattgttgaactttggacaaagcggaagtttcgttgtgattgtggcaactcaaagtttggtggtcacctttgcaaactctgccctgagaaagattatgagaattcagcaaatacttataaccataacttcaaaggttcctattgcacatgtgggcggccttatcctgacccagaagctaaggagcaagttgaaatgatacaatgctctatatgtgaggactggtttcatggggatcatattggtcttaactctattgaagagataccaagagatgaggaaggggagccactctatgaggaattgatatgccacaaatgctcatctgtctgccatttcttgaaattgtatccagatacaatttgggcttctggtaagccaaatctggcagtggaaactgatgcaagtgactcgaatgtgatgaaaaaaccttcagggcatgctgaccctgagaaacatgaaaatggtgctcttgttgataatacggttggcgagaagacctctgttgagaatgattctacaaaagctattgcagttcctgaggaggccaatttgggtagcagttctggcaacaactgcaagttaggagtggatgtgaatacaatgccagctattacagataaaagtgagccttttttcatgtctaaaggttggagggagacactatgcaggtgtgaaacatgcttcaacttctatgcacaacgaggtattgcatatcttattgacaaggaggattctattgaggaatacgagaagattgccaagcagaagagggagatgaaactggagcagcagcaaggagctgagacaaattttctgaattcacttaatcatgttcagaagatagagatgataagtggcatcaatgacatgaagaatgagtttcagtcctttctggagtccttcgatgcatcaaaaccggtaacatctgatgatatacattcattcttcgagaatcttgctaagaagaagaaacagaggttatcttagcttttgtgaccgcatcggaccctacccgaggcaaccgttctgctggacagaggtcctagtttgttgggctagtaaatgtaatgttatcttaggtggtacttactaatcgggccagtaatgttgaattctagctggaacgcggtaatgtttgatgcaccgaagtcgcttgcagtaggttccgatggcccaagccaccaaaaacctgtttgctccatgaacctcaatcctgttaggtgataatataatatacattgtgttgccaccgtgctttttttctt

SEQ ID NO: 1878 - DNA, 1733 bp, Zea mays
ctccgagtcaaatgcgtagttaaagttcccttgtttttttttctgcgagccattttgacgcgcaaatgccaaccctctcctctcctctactctccctacctgggtaatcgcaggaacctcgaagtctctgatatcgaggggaacatgcacactccatttatcatcagtataaatgaagaagggaaccgagcatcgcttgctccgtttcatacgcctggctctcggctgctggccttctgatcaacccaggaagatacatgcacgtgctttatgtcttctgaacagtgtactgtcctgatggagagcaatgcagcagcacaagatctcgaggggaggcgtcttgcggtgcttctctgctggcttttcggaaacggatgcgttctcgcatggaatagcatgctcacgatcgaagactactatgccttcctcttcaatagctaccacccaaccagggtgctcaccctagtgtaccagccgttcgctgtcgggacggctctggtcctggcgcaccgtggggcgaggatcaacacgagagctcgtaatctggcgggctacacgctgttcttcctcagctccctggccctgatcctactggatgctgcaacatcaggaagaggcgggatggcggcgtttgccggcgtctgcgtcgtcagtgcggcgtttggggttgccgatgcgcatgtccagggcggcatggtcggtgacctgtccctcatgtgtcctgaatttgttcagtcgttcttggcaggttttggtgcttcaggggcgttgacgtcggctctgaggttcacgacgaaggccgccttcgagagcacgaggggcggctttcgcaagggagcaatgctgttcctcgccgtgtcatgcatctttgagctactgtgcgtcctggcgtacgccttcgtcttcccgcggctgccgatcgtgaagcactaccgcgcgagagccgcctccgaggggtccctgaccgtcgcggccgaccttgccgctgcaggaatcacaggccctgctggaccaggttcaggacaagggcacacagcccggctcagcaacaaggagctgctcctgcagaacaaggacttggcggccgacgtgttcctgatctacgtcctcaccctgtcggtgttccccggcttcctgtccgaggacaccggctcacacggcttgggctcatggtacgtgcttgttctgatcgcggcgtacaacaccggggacctcgtcgggaggtgcctgcccttggcgcggcgcctcaggctggcctgccgggcgcggatcacggccgcggcggcggcgcgcttcctgctcgtcccggcgttctacctcgctgggcggtggggaggcgggcaagggtacacgatcctcctgacggccgtgctgggcctcagcaacgggtacctcagtacctcaccgtgtgcgtcctcacggaggcgcccagaggatacgagggccccgagcagaacgcgctggggaacgtgctcgtcgcctgcctcctcgccggcatttccaccggcgtcgcgctcgactggctgtggctcatcggcaagggctggtgattggtgaaacgttctcgatggttgccgacgtgcgctgtagtcgacttgtagcagtccagagagtcgtggcaggctggcaagtgtgccatgctcgcagcaagttcaaggcttcaatattttttattaaaattaagaagaaaacaaaagaaaaacggcggtcttgttcatgggcctttcgtcgtt

SEQ ID NO: 1879 - DNA, 1435 bp, Zea mays
atggcaggctcttcatcatacagcgttctccctgaccagaccatggacaacgatgatgcacaaattggagttgctaaaactcagggaaagtattggggcattttcatctgctggcttcttggaaatggatgtctatttgggttcaatgggatgcttactattgaagattactacgtgtacctcttcccgaagtaccatccaacaaggattattactctcacctatcagccctttgttctcgccacaaccgccatattcacatatcacgaggccaaggtcaatactagggtgcgcaacctggcaggatacacgttgttcttcttgagctcatttggagtgatcatcctggatgttttgtcttcaggaagtggtggaatcgccccattcgttggtatctgtaccattgctgctgcttttggcatagcagacggtcatgttcaaggcggaatgactggtgatctgtccctgatgtgcccagaattcgtccagtccttctttggcggcgttgctgcatcaggtgcaataaccgcggcgttaaggttcttcacaaaagcggtgtttgagaattccagagatggcctgcggaaaggagctatgctgttctcttcgatctcgtgcttctttgagcttctatgcgttctactttatgctctggtgttcccgaagttgccaatcgtgaaattctaccgttcaaaagctgcctctgaggggtctcagacagtcaccgctgaccttgctgctggaggcatcaaaagcctgccgaatccattggctgaggaagatggtgtggtcgaacggttgaacaacaagcagttgctgcatgagaacatggactacgctctggacatgttcctggtctatgtcctgacactgtcgattttcccagggtttttggcggaagacactggatcgcacagcttgggttcttggtacgtgcttgtgttgatcgcgagctttaacgtgtcggacctgatcggaagatacctgcctctggtcgagcaaatgaagctgacatccaggacggggctactaaccgcagccatctctaggttcctgctcgtcccggcgttctacttcacggcaaagtacggtgaccagggctggatgatcatgttaacgtcgctccttggactgagcaacggccatctcaccgtctccgtcctcaccgaggcgccgaaaggctacaaggggccagaacagaatgctctggggaacctgctggtgcttttcctcttggcaggcatatttgttggcgccgtttctgattggctgtggctcataggcaaagggtggtgaccgaacttaacttgttctccccaggtgtatatttattatgcaagctagcagatcatgcaatcaataaatcatttctaaagttgactcgtatctttttttttaatcatcataaccaatatgatccaaccattcacatgct

SEQ ID NO: 1880 - DNA, 1314 bp, Zea mays
gccgcgcgtccccatccgtcctaaaacaattttctcgtcaatgttgatggcgggcgcgggcgcgggtgcggtgcattatcactgaatacatctgtgcttaacagtataattatgtgtggttccatacttccatcctcgcatgcatgtgagggccatagctcactgtcgcatgccctgctctgcttcagcaccacacacacacaacaatcagtgtggccataacaagcagctagcgagagctccccgcgtccagccatggcaaccacgacgacggctggtaggaacaatggagaaggagaacagaagaggtggagggagaaaggaggcttcaagaccatgccattcatacttgggaacgacatctgcgaccggttcgccacggccggcttcggcgccaacatgatcacgtacctgacgcagcagctgcacctgccgctggtggaggcgtccaacctgctgaccaacttcggcggcacgtccagcctcacgcccatcctgggcgcgctcgccgccgactccttcgcgggccgcttcgggaccatcgtcgccggctccgtcttctaccagctcggcatgctcggcctcgtcgtgtccgcgctcctcccttcgctccgccccgcgccgtgccccggcgccccggccgcgtgccagcgcgcctccgggtggcagctcgccgcgctgtacctctccctcctctgcacgtccgtcggctccggcgggctgcggccctgcgtcgtggcgttcggcaccgaccagttcgaccgcgagcccggggagcagcaggtcaccgcggaggcggccggggaggtggcggagcgcaagcggcgctacttcaacctctacttcttcacgatgggggtggcggcgctgctggcgctgacggtggtggtgtacatccaggacaacgtgggctggggctgggggttcgggatccccgccgtcgccatgttcgtctccatcgtcgtgttcgtggtcgggtacccgctgtacgtccgcctcaagcccgggggcagcccgttcacgcgtctcgcgcaggtcgccgccgccgcctttaagaagcgccacgtcgccgtgccggaggacgcagggatgctgtaccaggacaaggagctcgacgccttcatctccaccaacggcaggctgctgcacaccgatcagctcacgtaagtccgtgtctctatctaatttgtcgtgctttgtaatatgtttcaacgtgttctctgcacacacacacaacacaacacaatccgtaagcgtaaggtagcgtccacgtgatgtgctttctgcattgggaattgggattgggattgggac

SEQ ID NO: 1881 - DNA, 2102 bp, Zea mays
gccaaaagcgggcggctaattaatccgccatccaccaatggaaaaccacacctcacactctccgacactcccgctccgcttcacccagtcccataccccagccgaccagcccggcgcgcggtggcactgtggcagcgctcacacggcaatgcggaaggacgctgccgccgccggcattgcgccgggttcggcgcccgcgtttctctgcttcgaccttaagcccttcctcgccgcgctcaccgtgctcacgctcctcgccgccgcctggcagctccggccttaccaatccctcctcgcttccccattctccgctgcgtgcccgcaacccaccgccggcgtctcgcttccccgcgcgctggccgtccacgccaagaaggcctcctccgccaccaactccaccgtttcgtcctcgccgtcgccgccgcccggccccgagcggcgggagttccacgccgtgggcagcgcggcggcgctgttcgtgcagatgggcgcgtaccgcgggggtccctacaccttcgcggtcgtggggctggcgtccaagcccacgcacgtctacggcaagccgtggttccgctgcgagtgggagcccagcgacgcctcgtcgccgccgatgcgcgcggccaagacgtaccacatgctcccggactggggctacggccgcgtctacaccgtggtggtcgtgaactgcacgttcccgcgcgtccccaacgccgacagcgcgggcggcaggctcgtcctgtacgcgcactacgggccgtcgcggtccccggcctcccgccgcgagcggatcgtggcgctggaggagagccccggcgcctacgacgaggccgcgttccggactacgccgccgcaccggtacgactacctctactgcgggtcctcgctgtacggcaacctgagcgcggcgcgggtgcgggagtggatggcgtaccacgcgcgcttcttcggcgcccgctcccacttcgtgttccacgacgccggcggcgtgggccccgccgtgcgcgccgcgctcgagccgtgggtgcgcgccggccgcgccacgctgcaggacgtgcgcgcgcaggccgagtacgatgggtggtaccacaaccagttcctcgtcgtcaacgactgcctgcaccggtaccggcacgcggccaagtggaccttcttcttcgacgtcgacgagtacatgttcctgcccgacggccgcgcgctcgaggatgtgctcgccgagcttgagccgtacacgcagttcaccatcgaacagaacccaatgtcgagcaagctgtgcgtcgatgatccggcggccgactattccaaccaatggggattcgagaagctggttttccggaactcgatcaccggggtgaggagggacaggaagtacgcgatccaggcgaagaacgcgtacgccacaggcgtccacatgtccgagaacgtgatcggcaacaccacgcacaagacggagcacctcatccggtactaccactaccacaacaccatcaacgtcctcggcgaggtgtgccgcgagttcgtctccgttccaccgaagaagggcggcggcctgacgtggtccgagaagacgccctggtactacgacggcagcatgaagcgcgtcgccggcgctgtgcgcgagttcgagagggagaccatcggcgacgtgcggctatgacggaccagcaggagtgctgctgatgtacagtttttgtggtatggctgtgagccattcaggaaggagctaggctgccttggcttactgcgttacctgttgggttcggagctatctgagctgacagagatgcagcgaaagcgaagctgctgcaaccttgtgtgccggtggtgttgtgttggcccgtgattctgatgtgatgatgatgagaggcaaagatgacgttcttgtaaaacatatatatgtctgcagtgtaaattccattgcatttttttgttgttgctgttgttgttttattgttcaaatatacacattgtattctgttcttggaagtttcagcaatgtagaaaccattcagaaccgtgttctgttttatggcttttattttgaacttggtcattttttgttggagccataagatggtcttgggataataaactgtatagaggtc

SEQ ID NO: 1882 - DNA, 1743 bp, Zea mays
tctcgtacacagagtatatacatggagccagccaatcgaggcaccgcatgtccactcagatctgaaatgtcaatggaatccgttgccgttgccgtcgtggcggtgccgttcccggcgcagggccacctcaacggcatgctgcacttgtctctgctactcgcgtcccgagggctttccgtgcactacgcggcgccggggccgcacgtccgccaggcgcgcgcgcgcgtgcacggctggggcgacgacgcccaccgccgcatcgagttccacgagctcgaggtccccgcgtacgccaccccgccgccggacccggtcgcgccctcgccgttcccgacccacctcatccccatgagcgaggccttcctcgcgggcgcgcgcgccccagtcgccagcctcatcgggagggtctccgcgcgccaccgccgcgtggtggtcctgtacgatcgcctcagctccttcgccgcccccgaggcggcgcggatccccaacggcgaagcgttctgcctgcagtgcgtggccgcgtgcttcgacgccgcgtggacggacgccgggcagcggctcctgcgcaagcacggcctcgacgccccgcaccccggcgcctgcatgccgagggagttcgtggagtacattgtcaggacgcaggaggacagccggagtccggcgttcgctggggtagtggcgaacacgtgccgcgcgatcgagagcgagttcatcgacgtggtggccggggaccctgagaaccgaggaaagagagtcttcgcagtcgggccgatgaatccgctgcttaacgtgaccgcgccgacagcgggacagagtgcacggcacgagtgcttggactggctcgacaagcaaccgccggcgtcggtgctgtacgtgtcgttcggcacgacgtcgtcgctgcgggcggagcagatcgcggaactcgccgcggcgctgcgcgacagcaaacagcggttcgtctgggttctgcgcgacgctgatcgcggtgtggtacacgaggaggaagccgtggagagtaggcacgccaggttcctatccgagttcaccgaggaaactcaaggcatcgggttggtgatcaccgggtgggcgccgcagctggagatcctggcccacggcgccacggcagcgttcatgagtcactgcggctggaactcgaccatggagagcctgagccacgggaagccgatgctcgcctggcccatgcactccgaccagccgctggtggcggagctcgtgtgcaagtgcctcaaggccgggctcctcgtaaggccatgggagcaacacagtgctgtgacacctgcggaaaccatccgcgaggtgatcgagaaggtgatggcacgcgatgaaggtttggcggtgcgggagagggccaaggagctcatggagtttattcgccgctctgtggccgagggcgggtcttcgcgcaaggaccttgacgacttcgttgcttacatagcaagatgaaatgcgtcctgtatttgactatttctactagtttcaattttgagttctcgtgatgaaaaccatatctatactatacttaaagcatcagtttcaacggtcgtcgtgcgtcatttttttgcaaaaaaacccttatacctctttcaaattaacccgccgagcatctcaacagtcgccgcacaaatccgagcgcgcggcatccgcgtccggctgttgcgggcggcgccgtccccggcaatcccgcgccatctcgtccccgccgatctcgcgcaacagctgccg

SEQ ID NO: 1883 - DNA, 1459 bp, Zea mays
tatcctcagaagaatcgcccacgcgagcttggaagcttagctcgcggtagcccggcccggtacgtgcttgcaagatgaagaggcagtggagccatccgtcggtcgtgctcccgctgctcgccgccgtcttcctgctcctcacgttccggtgctccctgcgccacgcgcagcagcaggcgtctagcctccgcgccgacgacgcgggaacaagcacaagctacgccgtcgacgccacgctcgcggagctcgcggccgtggacccggccgcgtcggcggtgctgcgggccgccgaggcgctgctggaggccaacctgacgagggctcccccggagcgccggaacgccgcggtgcgcggcctccgcgactggctcggcaagcagcggttcgagccgcaggtgatggccgagctcgtggacctcatcaagcgccccatggaccggtacgccgccggggcgaggggcggcgacggcgacggcgacgccccccggccgtacgcgtcgtgcgccgtggtcggcaacagcggcgtcctgctggcgcgggagcacggcgcgctcatcgacgcccacgacctggtgatccggctcaacaacgcgcccgcgggcgacggcaggtacgcgcggcacgtgggcaccaagaccggcctcgcgttcgtcaacagcaacgtgctgagccggtgcgcggcgcgcgcgacccccggctgccggcgctgccgcacctacggcgaccgcgtgcccatcctcacctacatgtgcagcgccgcgcacttcgtggagcacgcggtgtgcgccggcggcggcggcggccccgacgccgcggcgccggtcatcgtgacggacccgcgcctggacgcgctgtgcgcgcgcctcgtcaagtactactcgctgcgccggttcgtgcgcgacacgggccgccccgcggaggagtgggggacgcggcacgaggaggccatgttccactactcgtcggggatgcaggccgtggtggccgccgccggcgtgtgcgcccgggtgtccgtgttcggcttcggcaaggcccccggcgcgcggcaccattaccacacgctgcagcggggcgagctggacctgcacgactacgaggccgagtacgagttctaccgggacctccaggagcggccgggggcgataccgttcctgcgggactccggcttcaggctgccgccggtcgtcgtctaccgctgaccgtccattcagatcaaccggccgtgtcgatgccgacgtacatactccattgagttcttttttttttgacaatttttggtgctgaaatacaaaatcgtaaatttgcatgttcatgggctcgcggtctagatcgtcaagtcacgaactcttgcaatccggctcaggtcgttattactggagccggtcgtcaactgaatactatgacccatggttgacaagcaagcctccaaagcctggcaagtgccaccgtggcgtgttcc

SEQ ID NO: 1884 - DNA, 2829 bp, Zea mays
gctcgacgccgcgtcgccctctcgccggcctcccgtttcacgaatcttcggatgcccagatccggctctcctcttcccacctcctcttcactgtctactactgccgctagccgcgcctgcttgctgcttccccctctctttttctctcgtctccattccagcatcgccaccaccagtccaccattccagcatcatcaccaccacccgagacaaaaaaataaaaaaaacccaacaacactgtaacgagaatatacggcaaaaccctagatctctctctcctctcggcattgctggctggggtgtgcggcggcccgcagtggtgagggacgcacggcgatggcctccgccgccgccgtcatcgcctcgccggcccccggcgccgccgcggccgagcccgccgcctggctcgtcgacgagcgcgacggcttcatcacctggctgcgcggcgagttcgccgccgccaacgccatcgtcgaccacctcatcttccacctccgctccatcagcgagccgggcgagtacgaccacgtcttctctctcgtccagcagcgccgccaccactggccgcacgtgatccacatgcagcagttcttccccgtcagcgacatcgccttcgcgctccagcaagccagctggcgccgccacgcgccgccggcccaggcgctcggggctggcgcgtcgccggccgcgctcccgccgccgcctcctcgccgcgcctcgttctcgcagtcccatcactcccaccagcaccatcgccacggcgcccactaccgccccgatccagcgcgcggcgccgccactgcggcgactggatccgagaaagatggacgtgaagttcataataacaaggaagggagggggctgaaagaagcggggaatgtcgtcgatactaaaagtttgcggttggattctcctataactgatgaaggtgaggaaaaatcaaagctgcaagctgtttctgaagaaagtagcaaaatggttgcaacccctgtagagtattcaaccaatgagatcattgatggcagcatggttaatactgttgaagggctcaaggtttatgaaggattactaaatgtaaccgaggcaaataagatcctttccttagtcaatgaaacaagagcctcttaccggcgaggggggcttgaagctagacagaaggttattattgctaaaagaccaatgaagggtcatggacgggaaattgttcagctgggtgttcctattattgatggccctcctgatgatgaaaatctaagagagacaagggtggaggcgattcctgggctgctgaatgatctgtttgatcgcttgtctcagcaggaaattatacccttcaagccagattattgtgtcattgacatcttcaatgagggagactattctcatcctcaccaatccccttcttggtatggtagacctctttgtaccctctgcttaacagattgtgatatggtgtttggccgttatatatcaggagaaaaaggcgatcatagaggtcctctgaagctctcgctcgcaactgggtcacttctactcatgcaagggagaagtattgactgtgcaaagcgagctattcctgctacacgcaagcagagagtcatactgaattttggaaagtccgtagcaagaaagcacatcccagctgaaagtgcctggtctactccattaacacctcctatgccctggggtcagtcatcaaggccagttaacggctcccgccatccccaaagtcctaaacactatgggtatgctccaatcagcggtgtacttccagcaccaccagttggagctcatcacgtcccaccgtctgatgggatgcagccactatttgtagcccctgctcctatttctgctgcagccatacctttcacgccaactgttcccttgcaaaatacatcagctgcttggatacaagaagttactccaaggcctgctccgccacgattccctggtcctggtacgggggtcttccttcctccgggatcaggccaccctctgcctcatcagatgatgccggcttctcatggccatggcgaacccaactctccacaaggttcatccgcttacctgcatagtaaggtcaatggcaaggagacatctaatggcaatctttctcctaagaactcgccgagaaagacatcttgcacagccgaggagaaaccagaatgcaatgggagcttaaatggtggtggcggctctgcggatgagaagtcaactgtaggtatggagcagcagaatggtgttcagaagaatgttgggagtagcaaggtccagccacatggacatgcaactgaatagagtgggacttatagtacatagacaacagaaaactgaagagacgaggagttgaattttgggccgtgaatttgcggtagtgcgcagagctcagcagaggtctttgctggcactctcttgtccctgacaagaatcatcgtgtcaagttctcgagacggaaaacatttgtcctaaactttgtagctgcactgttgcaaatctagattatcgacattgcctcgggttatcatctgctatcagagtcgtgggcagtgaaaaccatttctgatggtttatgttgcccaaatattatcgacctagtacatctgaaatgggaaaaaatgtggacgaaatttcttgcatcgaactctcttgtgatcgactggcctttgatgcatctgtagcagactacttatggtagactgttacttgctgatagatggttctgctacaggtgtttgctgtggatgtcaattataacctagactgtgaacttatcactcttttgggtcctgaacgttttgcaagtgttcttattcaggacgtgggcaaagc

SEQ ID NO: 1885 - DNA, 1746 bp, Zea mays
gggagtagatcgaggaccatcctcgctaccctgcaggccggcactgcactgcagtcttcagaactcgtcagtcacagatcggtgcaggcggtctgcacctgcatcacctaaccaattcctcgattagtctgctgttgcgatttgcgaggcaggtcaggtactgacgtattgcatttgcatgcctagctagctgatagatgatcttgtttcttctctgctttgctctgtgtatgtgttcactgcaggagaatttgtaattgcaaaccgcctcacaaattggtactgactgaaagatgatcttgtgtttcttcattctgtttgcacgaagctgcaatctttttgcagcagccactaaacctgtaccaagtcttcttgcctgagggcagaggcaggctccgtcagtcacgccggcggcgtacagatcatggaggactttggcggctggaatatgcagtatgcagcagagctatgcctgccaagccgccgggacgacgacgacgacggcctcctcggtgatttcctaggcggcggcggtttggacatccgttctgaccatggcggcctcaacctgccctcgtcgcaccctgctgtccagaaccttgtgccctgccacggcggcgtgagtctttccgtttccgacgccttcatgggcctggacacggcggatatgctcgctagcgtcaccggcgcactggactgcagcctcctcgacacgtttgcttgcggttcggacgccgtcgtcgtcgccgaggagcccgccgcgcagcccaccgcgtcgagcaacgccttctccggatacagcagcaccacgggcggcaattacggcaacatctcctccggcgagtccaacacgtacggcggcagcggcggaggccatgacacggaggttgcgtcgccgacctgcgcctcgaagcggaagctggccggcaagtaccctgcaatagccgcggcgtcggccacagccacgacgaaaacggcggaggggcaggttgcagccccgcggcgtggcacgaagcgcgactccgcgacgtcgtcttcgtcgaccagcgccacggtcgccgggcatggcggcggcaaccatgcggccggaggaggcgggtcgtcgtcggtcggcgacgggaacgggtacgagccggactcggaggcaatagcgcaggtgaaggagatgatctaccgcgcggcggcgatgcggccggtgcaccagctcgtgtgcggggccgccggcggcgagccgccgtcttcgtcccagaacaagccgcggcgcaggaacgtgcggatctcgagcgacccgcagacggtggcggcgcggctgcggcgggagagggtgagcgagcgcctgcgcgtgctgcagcggctcgtgccgggcggtagccggatggacactgcgtccatgctcgacgaggcggccggctatctcaagttcctcaagtcgcaggtcaaggcactggagagggcaaaccctagtagtaatggtggctacaacgacagcagcttcctgccgcagagttacacggggtgcctcggtgtcgacggtggcaccagtgctgcctttggaagcgatggcgccattgggggctacggctacgtaaaacccggtaggaacatgcaccggtagcgatgcaataatgtaaccattgatgtgagtgagcgatatatgagagaagtactgcagtactgctactggattttgaggttaataaagatttactgtatttcggaggaataataatcaaaacgatttaattt

SEQ ID NO: 1886 - DNA, 1794 bp, Zea mays
aataaataattccaaaccatgctcgagttaacaagcctgttttgcagccttttgtggcggtgagaatcgtgagattgtatagacgtttactcgcacgaatcttgatgtgccttatacggctcgcgcaactccgacgtcatcgtccagatgctccagccctaaccgcgcataaaccccgcgccgccgctgccgcctcctgtcccggtcggatcctccgcgccgctcgcgccgccctcatcttcccagccccaacgcgacgcaccacaagggccctcgccatgtcgaagaaagtaggacgagcgaagaaagcagcgggcggcggcgagctgtcccgcttcctggagtcgcatctccagaccattagcgacaccttccagatgatggcggagtcggctccgggggccttggagcggacggagtggtctgaggtcgttaagctcggcgaccaggtctccaggcaggccaccgtcgctggaatgctctggagcggtgacttgcctgatgtagagaccctcaaagagaacatcgttgcttatttcaacatcctacagggatttcttttggtttgccacggaagcatggtcggtgctgggcctactctacacaagtccatctttgggtctgcaaaagacgtggttgactctagcttctcattgttcaagcatgctgtctctgcttatgaatctcgcagctctgaccgcaacacaactataccccaggtcacaggaactgtatgggaagcttgtgctgctctcaagaaggtgcctgcatcaaactgcattgccataggacgagccatgaccaggataggtgtgtgtctgaaagatgttctccgagaaatgaatgagctccctattggtggttctggtgatagtactgctgagaagtcttccaatggtgttgtcgacacaacgagttgttctgatagagatgagaggtctgatcttgatttagatgatgacgacgacgatgagttcactgaagaagaggttgctgttgccaagttggttattaacgtggtatctgattccttggttgtagtgaaagaggcaattcgtttcattactggtttgctcaggagctctggtaacaaagacaaagatggtgctaatgaggacagagttgagccaatggagaaattgctgagccactgcaaggagatcgcagaccaggtcaacgatcttggggcttctgtatacccaccacaagactcgtctgagatggagctcgctataaaaagactgtacaatggcatcaacgggatgcgcaaggaaatagggaacctcggtggcgcacctgagagcacctttgcagcccttgaaggattcgaaaattgccttggatctctgcgggccaggttagctgatgatgtggtgaacgagatggaaggtcttaatattagccattagcacgtactgttcagattttccatagcagtgttgtgccagtatatcttctggttttgcacgatggaaggagcttctgtggtttcagtaaatgaggcgtccggtctctgtactgatggcgttgttgcgggtcatcgattgtaaaggaagtgggcctggatttctgtaacttctctggttagtgatgccactgtttacgggtcattcattgcgcgaataagattgtttgcattatatcgttcgtgccattgcatatatatacctgtttctctcactacaatagagtttagtttatccggtcgtgagataactaaaaggatgtgaaatgactggattgacaagctagatagttgtaattttaagaggagcaaatgtgcttggtttcaca

SEQ ID NO: 1887 - DNA, 72 bp, Zea mays
gtcgttgtagtatagtggtgagtattcccgcctgtcacgcgggtgacccgggttcgatccccggcaacggcg

SEQ ID NO: 1888 - DNA, 1376 bp, Zea mays
aaggcaccaccaccaggcaccaggcaccaggcaccagccgcaccatcgcctattcgcctcctctcgggctcgctcgctcgcccccactctcgtgcttctgcttccccacccagtcacctcgacctcagcccctctcgccctccctaatctcgactccgatgccgccgccgctcctccaggcgcgcgactacatgggcgccggcgccacccctctgtcctgctcctccagcggcgagggcacggggccgcacctcgcgctgcggctcgggctcccagggtccgactcccccggccgcgacgcggggccggagccggaccacgcccacgtcgacgccgcgctcaccctcggccctgcccccgcccccgcccccgcgcctcccagggtcggcgcaaagcgcgggttcgccgactcccgcgaccggtgcgcgaagcgggacgccactgctgcggatgacgctgctgggggagtgaccggggaggagaagcgggtaggtgcggccgctgccggagctccgccggctgccaaggcgcaagttgttggatggccgcctgttaggagctaccggaagaacacactagctatgagtgccacaaagacaaacggggaagatgaaggtaggagtgaggcgggatgctgttatgttaaggtcagcatggatggagccccatacctaaggaaggtggacctcaagaccttttcgagctatgaggacctttcgcttgctctggagaaaatgttcacctgcttcatcactggtcaaagcggttcgtgcaagacttcaagaagggagaggcttactgatggttctagggctgatgcccttcaggaccaagaatatgtccttacttacgaagataaagatgctgactggatgctcgttggtgatctcccctgggacttgttcaccacaatttgcgggaaacttagaatcatgagaggctctgatgctgctggcatggtatccaatcttcctgcagctccaagatcaccggagcagatagttgggaccagaataaggaacgttgcccggcatgcagagtcgtgaactgaaaggaaaggacagagtttacatggcgctgaagggagcggtgtttttacgtgaagtgctccggttaagtctctctctctctctttttttttgtaacccccacatgtgcaatgagatgtgtgtggccctactgtaagacaccccattttgcccacgaggttgtcacgtgttattgtagatggtcgcctttgtgttatgaacgatcaaactcggcagtagcctgcttgctgcttcctctatgatactttcctccgtatttggaagctcgtacttcatatggtagaagtaagaaaaaaaaagcccatgttgcccattaagattttttgt

SEQ ID NO: 1889 - DNA, 276 bp, Zea mays
atggcctactttgcccccccctcccctctcggtccgcccctgctggggagagtgccccggaagtcggtggcggccgtgctccgagtccaccgggtcaccagcctccgggaccggcagctgtcgacgccgtgttccacggttccagtcccgtccgtgcatcgtgcggagcgggcggtggtggcgggggacgaaggtgccgccagggaggcgcggcgcggaatgctgaacacgtcgggtgcagaggtcgtcgtcggaactgatgagctttggaggtga

SEQ ID NO: 1890 - DNA, 2407 bp, Zea mays
tccgtggcggcgcgacgcgacaaggagctacgtgccagcgcgtccccccgtctccgtctccgtccctcggggcgttgttgtttattccccagccccccctgttattgaacgcatcgttgacaaaagatgtgacgctgcctgcaactgcaatcagtccccgttccgttttcactttcaccggaacaaaggaaaaagaaaagtgtgtgtgtgtgtgttattgcattattggctcctgcacctactaccgccacgaagcgaccccgacccgttcctcgtcgtcgtcctcttcggatcttcgcttcatccacacaacgtaagctctccgcccttcccagttcggcagttcctcttctcagtcatgctcttcgaccggttgtcgccggtgaccaggcggtgcggtcgatctcttatccaccgtcgttccgctagtatctccctgcttgaagccacgcaagccctgacgacgccgatgattctgcctgccatgtgcagatcgcatccctttttttctctctcaggggaggggcggcgcgtagaggcacgccgccgagcttcgggcatcccatctgacgcgaccggtcttcgggcacgccgccgatcgagctatggacgcgtcgagctccctgtccctcctcgcactggtgaccatgctcagcctcctccactccgccacgaccgacgccgccgcgggtctgccggcggcgcggacgagccaccggaggctactgctgctacaccagcaggacaccaacctcgccgcgctgcctccgcctgcacgcgtgcacgtcgtcccagtcgacgtccacgtcccttctcatggaaccggctcttttccggcagcgtctcccggtccacacgggggcaagaacggtccgagtgaggcagcgccagcgacgccggcgacggcggcggcctatctgtcgagatccatgaggtggctgtacatggttgcggttccggcggtcgccctgctggcgctcgctggactggcgtgctggcttctgtgtcgcaagagcgccgttgccaccattgggccttggaagaccgggctcagtggccagttgcagaaagcgttcgttacaggagtaccgaagctgcagcggtcagagctggaacgtgcctgcgaggacttcagcaacatcgtggtgagctacccgcactacaccgtctacaagggaactctatcgaccggcgtcgagatcgccgtggtgtccaccatgatcacgtcgagcaaggagtggacagagcattcagagagctgcttccggagaaaggtagacgccctgtcgcgaataaaccacaagaacttcgtcaacctgctcggcttctgcgaggaggaagaaccgttcaccaggatgatggtgctcgagtacgcgccgaacgggacgctccacgagagccttcatgccgaggatttcgagcgcatcgcttggcgaggtaggatgaggatcgtcatgggactagcgtactgcgtccagcacatgcacgagctcagccctcccgtggcgcaccctgacatgcagtcgagctccgtactgctatctgaagacggcgctgcgaagatagcggacatgagcgtttggcacgaagtgatttctcaaggcaaaacgacgacaaatggtgacgaacaagcgtcgtccgctggcctgctggcggggaatgtgtacagcttcggtgctctgctgcttgagatcatctccgggaagcttccgactccataccccgcacacgagcgctccctgcagatgacctcggctctggtggagcgcgtaaccaacgacgaccggagcgtagcctcgttgcttgatccaacgctgggtggagaccacagggaagacgagctagcggtcatcggcgaggtgatccgggcctgcatgcagagcgacccgaggcgaaggccgagcatgagggaggtcgccgccaggctgagggaggccgtgggtatctcgccggtcgctgcgacgccgaggctgtctccgctctggtgggccgagctggaggtcctttccgccgcggaagcaagctaataatagtgggcgagaggacaggacaggaacagggcaggatgatgtcgcgcaatctgaccagtttgttctcaagaaaaaaaagccttgcagccctttgtgcatgctgtaaatgtgaatgtgaagctgcagggaaggaatagtaatccgtgaatgtaaatctgaaactctgaaggtgctagatgtacgtagctagtgtcttggcaaaggtatcagtaattcagtataaagtcagagcagcactctccctgccttgtcccagcccaggacaggcacgccgctcgccatggccggcaacccgccatggcgccatacaaaacctcaattattgataccggaatgcaggaagttagaaacctgatctcgggggcactactaactag

SEQ ID NO: 1891 - DNA, 1722 bp, Zea mays
cgaaatccatagggttcttcgtcccctccccgattcccacactgttcctctacaggctacaggagcagcaacagctagctgtggagacgcaacacaccccctttgccctggccgaccgatcgatcgatctgctctccttgccccctctcaccccatctcaccagcagtgacgcacccatcatcatcgatcgagcacagacgagacgaccaccccagctgtcttgcccaaggcaacaagggaagaaggcagcaacccgtcgataaaagcgcacgtcggagcagcagcatatggcgtcctcgaacaggcactggccgagcatgtacaggtccagtctcgcctgcaacttccagcagccgcagccgcagcctgacatgaacaacggcggcaagtcctcactcatgtcctcaaggtgcgaggagaacggcggaaggaacccggagccgaggccgcggtggaacccgcggccggagcagatcaggatcctggaagggatcttcaactccggcatggtgaacccgccgcgcgacgagatccgccgcatccgcctccaactgcaggagtacgggcccgtcggcgacgccaacgtcttctactggttccagaaccgcaagtcccgcaccaagcacaagctgcgcgccgcggggcagctgcagccgtcgggctcgggccgctccgccctgcaggcgcgcgcgtgcgccccggcgcccgtgacgcctcccaggaacctgcagctcgcggccgctgctcccgtggcgccgcccacgtcctcgtcctcgtcgtcctccgaccggtcctcggggtcatcatcgagcaagtcggtgaccgtgaccccgacgaccgccgtcgcgcttgcttctcccgcaggcgccgcgccggctgctgtcttccgccagcagggcgtgatgccgacgacggccatggacctgcttacgccgctgccgtcgtcgtcggccgctctggccgcgcgccagctctactatcagtaccacagccagatcatggcgcctgccgcgccgccgatgcccgatacgctcggtggcgtcctcgacggccactcccaccacacacacgagcccccggcggccatacaccggcccgtctcgctctcacccagcgtgctctttggcctgtgcaacgaagctctaaggcaagactactgcgccgacatcagcgtcgtccccaccaagggactcggccatggccaccagttctggaacagcaccacctgcggctctgatatgggcaatagcaatagcaagatcgacgccgtgagcgccgtgatcagggacgacgagaagtccaggctggggttactccactactacggcttggcgggcgcgacgacgaccgctgctgcggctgtcgctccggcccctctcgctgcagatgccgccgccggtacggccacgctgcttccaagctctgcggcgagcgaccagttgcaagggctgttggatgctgctgggctgctgatgggggagacgccgccgacgccgacggcgacggtggtggccgtggcccgggacgccgtgacgtgcgcggccaccgccaccgcgcagttcagcgtgccggcgtcgatgcgcctggacgtgaggctggcgttcggcgaggccgcccttctggcgcgccacaccggcgaggcggtccccgtcgacgagtccggcgtcacggtggagccgctccagcaggacactctctactacgtgctcatggtaacctag

SEQ ID NO: 1892 - DNA, 542 bp, Zea mays
aaaaaaccaacgagtatacgctgacgatgtattcgcgcagtcgagagagaagaaaggaagagcagagagagaacgggagcgttgccgggagggtgttcaacggtgccgcaccctggacgtccagggacattcctgtgcttgcggcgtggagcgttctgggcctcctcgccgggcgttgaggactgcgcgggcgccgtcgtccggttgggtcgcagaccagggcatgctcgaagtggtgggcgactggagtcgcgtctcgagcccaggaagtcggcggcgcgcttcggtagaacttgtgcggcgtaactcgcgcgaggacacgtgtcatctaaaaagcaagctggtacctggaatctcaagtgccaggtcaagaacaggtaccacaggataaggggcaaggaggatgctgcgatgagttcgtgagagatctaggtcgtcgtctcccagtcaactttgggttgctggaccgttgtctccttataatgtaattatttattttgtacagaactcttattatatattaaagatgtgacattctatcc

SEQ ID NO: 1893 - DNA, 2495 bp, Zea mays
ctaccactccgaccgacagacgacgagcgagcgcagcccaagcccaagcaagcagggcacggccatgcccgtggcccaatcctaggcgtccatttcgtattccacggccggcgaagcagcagcagcagcagcagccatggtggccggcagggtcaaggcggccatgggcttccagcggagcccggccacgcccaagcccggggcctcctcctcctcctcctcctcgcgcaaggcgccgccgccgctgcagctgcccgggtcggccgcgctgccggagacgccgcgccggaggtcctcgggctctccggcgccgccaggctccgggtccaagggcggcggcggcccattctcgcgctacttcccgcggtcgtccgcgcaggtgcagccggcgcgcgcgtcgggccagcccgagccgccgccgccgccgccgccgccgccgtcgtgcccgggccccgccgccgccgctgacctcgcccgcctcgtcgaggagctccgggagcgcgagtcccgcctccgcaccgagctgctggagcacaagatcctcaaggagaccgtcgccatcgtgccgttcctcgagaccgagctcgccgccaagagcagcgacctcggccgctgccgcgacgcgctgtcgcgcctcgaggccgagaacgcaagcctccgcgccgagctccacgccgccaggggcagccagcagagggtggttcagctggagaaggagctggcggaggtgaagaggcaccgtcgccgggactccggccccgatgccgaccgtcacgatgatgactgctcgtcgtcggtgtcgtcgcacaactccgactccgatcgctccaatgcgccgaccaacgcggtcgtgcccgggctgttgatcgtccctcctcctgctcctcctcctcctcccccgccgccgccgccgccttcttacaagtccaggtcctacttctctgcctcgtcgcgcgcatcgccggccaactcctcctcgtccagctccacctcgtccgcgccatcgacgccaacctactcttcagacaccgcggcgtcgcgaaaccgcgtgccggagctctcccagctcccgccgatacccgccccacccccgccgccgcccccacccccgccaccggcaatgccggcgcgcggacgccgcagcgcgtgctcgtcaccttcgacctcgagcggcagcagcggcggcggctgcggcagaggctcggggcctcctgcgccgccgccgccgcctccgcctgcggcgaggaggagctccagagcttcgtcccctgcggcttcgggaacggccccggcgcccgccccctgcgtcaggcgagtccccgaggtggtggaattctaccactcgctaatgcggagggactccaggtctagggacgccgccgctgccgccgaagctggcgccagtgggggtgccgccgccgcgagggatatgatcggcgagatcgagaaccgctcttctcatcttctcgcgatcaaatcagacgtggagaggcagggcgacttcatccggttcctgatcaaggaggtgcagggcgcggcgttcgtcgacatcgaggacgtggtcacctttgtcaagtggctggacgtcgagctctcacgtctggtggacgagagggcggtgctgaagcacttcgactggccggaggggaaggcggacgcgctgcgtgaggccgcgttcgggtaccgcgacctgaagaaggtcgagtcggaggcgtcgtccttctgcgatgacccccggcagccctgctcttctgctctcaagaagatgcaggccgtcttcgagaacaggttagagcatggagtgtacagccttgtgcgtgtgcgagacggcgcaatgagccggtaccgtgggtatcagatcccatgggagtggatgcaggacactggaattgttagtcagatcaaactgcaatcagtgaagctggcaatgaagtacctgaggagggtttcctcagagattcaggccatacaggtcggccctgacgaagaggagctggtgcttcaaggagtccgatttgccttcagagtgcaccagtttgcaggcggtttcgacgtcgatacgatgcgcgcctttcaggagttgaaggagacggcgtcagcctttcagcagtggggaggccaaaaccaacacctgcatcagcaaaggctcgctggcagaagttgagacgcatgtatttatagcaatccgttactacaggatagtggaagcatctatttacctggccaaatgctccactccttttctttttttttaaccttcccgtcaagaagctatatttcgacagattctttattatttttaatatgcataagagcatgcagaaagacgcttagcgtgtcaataccttgcgtgtgggctatcatttacacgctcctatgagtgattaactcgcatccatcgatggacatttctctcttcttacgttctcgcctcaagacaaggattttacaggtgcgaaaacacccgtgtctgcttgtcgtgattgatttttttt

SEQ ID NO: 1894 - DNA, 1812 bp, Zea mays
tacctggttgatcctgccagtagtcatatgcttgtctcaaagattaagccatgcatgtgcaagtatgaactaattcgaactgtgaaactgcgaatggctcattaaatcagttatagtttgtttgatggtacgtgctactcggataaccgtagtaattctagagctaatacgtgcaacaaaccccgacttccgggaggggcgcatttattagataaaaggctgacgcgggctctgcccgccgatccgatgattcatgataacttgacggatcgcacggccttcgtgccggcgacgcatcattcaaatttctgccctatcaactttcgatggtaggataggggcctaccatggtggtgacgggtgacggagaattagggttcgattccggagagggagcctgagaaacggctaccacatccaaggaaggcagcaggcgcgcaaattacccaatcctgacacggggaggtagtgacaataaataacaataccgggcgcgttagtgtctggtaattggaatgagtacaatctaaatcccttaacgaggatccattggagggcaagtctggtgccagcagccgcggtaattccagctccaatagcgtatatttaagttgttgcagttaaaaagctcgtagttggaccttgggccgggccggccggtccgcctcacggcgagaaccgaccggctcgacccttctgccggcgatgcgctcctggccttaactggccgggtcgtgcctccggcgccgttactttgaagaaattagagtgctcaaagcaagccatcgctctggatacattagcatgggataacatcataggattccggtcctattgtgttggccttcgggatcggagtaatgattaatagggacagtcgggggcattcgtatttcatagtcagaggtgaaattcttggatttatgaaagacgaacaactgcgaaagcatttgccaaggatgttttcattaatcaagaacgaaagttgggggctcgaagacgatcagataccgtcctagtctcaaccataaacgatgccgaccagggatcagcgggtgttactaataggaccccgctggcaccttatgagaaatcaaagtctttgggttccggggggagtatggtcgcaaggctgaaacttaaaggaattgacggaagggcaccaccaggcgtggagcctgcggcttaatttgactcaacacggggaaacttaccaggtccagacatagcaaggattgacagactgagagctctttcttgattctatgggtggtggtgcatggccgttcttagttggtggagcgatttgtctggttaattccgttaacgaacgagacctcagcctgctaactagctatgcggagccatccctccgtagttagcttcttagagggactatggccgtttaggccacggaagtttgaggcaataacaggtctgtgatgcccttagatgttctgggccgcacgcgcgctacactgatgtatccaacgagtatatagccttggccgacaggcccgggtaatcttgggaaatttcatcgtgatggggatagatcattgcaattgttggtcttcaacgaggaatgcctagtaagcgcgagtcatcagctcgcgttgactacgtccctgccctttgtacacaccgcccgtcgctcctaccgattgaatggtccggtgaagtgttcggatcgcggcgacgggggcggttcgccgccccccgacgtcgcgagaagtccattgaaccttatcatttagaggaaggagaagtcgtaacaaggtttccgtaggtgaacctgcggaaggatcattg

SEQ ID NO: 1895 - DNA, 3350 bp, Zea mays
ccgcgaccccaggtcagtcgggactacccgctgagtttaagcatataaataagcggaggagaagaaacttacgaggattcccctagtaacggcgagcgaaccgggagcagcccagcttgagaatcgggcggcctcgccgcccgaattgtagtctggagaggcgtcctcagcgacggaccgggcccaagttctctggaaagggacgcctgggagggtgagagccccgtccggcccggaccctgtcgcaccacgaggcgccgtcaacgagtcgggttgtttgggaatgcagcccaaatcgggcggtaaactccgtccaaggctaaatacaggcgagagaccgatagcgaacaagtaccgcgagggaaagatgaaaaggactttgaaaagagagtcaaagagtgcttgaaattgccgggagggaagcggatgggggctggcgacgcgcaccggccgtatgcggaacggctcctgctggtccgccgatcggctcggggcgtggaccgttgtcgcccgcgccggcggccaaagcccgggggccctaggcgcccccggcagccgtcgtcggcgcggacggtatccgcgcgcctctggcgcgcccctcggggcgctgcgctgcaacggcctgcgagctccccatccgacccgtcttgaaacacggaccaaggagtctgacatgcgtgcgagtcgacgggttcagaaacctgagatgcgcaaggaagctgacgagcgggaggccctcacgggccgcaccgctggccgaccctgatcttctgtgaagggttcgagttggagcacgcctgtcgggacccgaaagatggtgaactatgcctgagcggggcgaagccagaggaaactctggtggaggctcgaagcgatactgacgtgcaaatcgttcgtctgacttgggtataggggcgaaagactaatcgaaccatctagtagctggttccctccgaagtttccctcaggatagctggagcccacacgagttctatcgggtaaagccaatgattagaggcatcgggggcgcaacgccctcgacctattctcaaactttaaataggtaggacggcgcggctgcttcggtgagccgtgccacggaatcgggagctccaagtgggccatttttggtaagcagaactggcgatgcgggatgaaccggaagccgggttacggtgccaaactgcgcgctaacctagaacccacaaagggtgttggtcgattaagacagcaggacggtggtcatggaagtcgaaatccgctaaggagtgtgtaacaactcacctgccgaatcaactagccccgaaaatggatggcgctgaagcgcgcgacccacacccggccatctgggcgagcgacatgccccgatgagtaggagggcgcggcggccgccgcaaaacccggggcgcgagcccgggcggagcggccgtcggtgcagatcttggtggtagtagcaaatattcaaatgagaactttgaaggccgaagaggagaaaggttccatgtgaacggcacttgcacatgggtaagccgatcctaagggacgggggaaacccggcagatagcgcgatcacgcgcgtcacccgaaagggaatcgggttaagatttcccgagccgggacgtggcggcagacggcgacgttaggaagtccggagacgccggcgggggcctcgggaagagttatcttttctgcttaacggcccgccaaccctggaatcggttcagccggaggtagggtccagcggccggaagagcaccgcacatcgcgcggtgtccggtgcgcccccggcggcccttgaaaatccggaggaccgaattccgtccacgcccggtcgtactcataaccgcatcaggtctccaaggtgaacagcctctggccaatggaacaatgtaggcaagggaagtcggcaaaacggatccgtaacttcgggaaaaggattggctctgagggttgggctcgggggtcccggccccgaacccgtcggctgctggcggaatgctcgagctgctcgcgcggcgagagcgggccgccgcgtgccggccgggggacggaccgggaacggccccctcgggggccttccccgggcgtcgaacaaccgactcagaactggtacggacaaggggaatccgactgtttaattaaaacaaagcattgcgacggtcctcgaggatgctgacgcaatgtgatttctgcccagtgctctgaatgtcaaagtgaagaaattcaaccaagcgcgggtaaacggcgggagtaactatgactctcttaaggtagccaaatgcctcgtcatctaattagtgacgcgcatgaatggattaacgagattcccactgtccctgtctactatccagcgaaaccacagccaagggaacgggcttggcggaatcagcggggaaagaagaccctgttgagcttgactctagtccgactttgtgaaatgacttgagaggtgtaggataagtgggagcctccgggcgcaagtgaaataccactacttttaacgttattttacttattccgtgggtcggaagcggggcaccgcccctccttttggctccaaggcccggcctcgccgggccgatccgggcggaagacattgttaggtggggagtttggctggggcggcacatctgttaaaagataacgcaggtgtcctaagatgagctcaacgagaacagaaatctcgtgtggaacaaaagggtaaaagctcgtttgattctgatttccagtacgaatacgaaccgtgaaagcgtggcctatcgatcctttagaccttcggagtttgaagctagaggtgtcagaaaagttaccacagggataactggcttgtggcagccaagcgttcatagcgacgttgctttttgatccttcgatgtcggctcttcctatcattgtgaagcagaattcaccaagtgttggattgttcacccaccaatagggaacgtgagctgggtttagaccgtcgtgagacaggttagttttaccctactgatgaccgcgccgcgatagtaattcaacctagtacgagaggaaccgttgattcacacaattggtcatcgcgcttggttgaaaagccagtggcgcgaagctaccgtgtgccggattatgactgaacgcctctaagtcagaatccaagctagcaaccggcgcctctgctcgccgcccgccccgacccacgttagggcgttcgcgccccaagggcccgtgccattggctcagcccgcccggccgacgcgccgcggcgggccgcctcgaagctcccttcccaacgggcggcgtgctgaatcctttgcagacgacttaaaacgcgacggggcctttaagtggcagagtggccttgctgccacgat

SEQ ID NO: 1896 - DNA, 4074 bp, Zea mays
aagtgacttgcatgagttcgtttttgcaaccggataaacacataagaagcaatcgcagcgccgaaataggatgaataaaaccagccacatgttccggtggtgtgtgttcatcagcactcgcacgcaagcagctcctccaatccatctccatctctgggctaaaagatatgaagagagttttagcctgataggccactcgtacctgctgctctaactccgggtcaccattttttgatgagtagagggggctccccgtctcggccctcctgccggttgaggccagcagagtgatgagtgaacggagtcatgcttgtgagattaggctttgtcgttgtagcctccgtcgcagctttaactcttcagagagctaacagtggggccaggcacagcaaagactatgtccaagcaaggaaaaggaaggataaggctaacaattctgaacatggggagaaagaagaagagaaggaagaggttaaaacaatcagcggcataatcaactcagcccgctcgctaggcgatgacgacgatgatatgctttccgagatcgaaagcctcctatcaggagacattgacatccctataccaagcgatcgcttcgacgttaatggacggtcacggtacaacaacgcttacatggctaacgaggcctctgagatagagaagctgcgcagcctggtgagggaaatggaagagagagaggcgaagcttgagggcgagctgctagagtactatggaatgaaggaaatggagactgacatcgccgaactgcaaaagcagctcaagatcaagacagcggagatcaacatgctcaacgacaccataaactcactgcaggcggagcggaagaagctgcaagatgacgttgcatgtggagaggttgccaataaagagcttgaagcggctagaggcaagatcaaggagctgcagcggcagatacagctagaagcaggccagacaaagggtcagctgatgttgctgaaacaacaggtcatcggattgaaggccaaggaggaagaggcggggaaaaaggaagctgaggttcaacggaagctgaagaagctcagggagttggaagtggaggtacttgagctaaggaggaagaacaaggagttgttgtatgagaagagagatctcattgtgaagttggatgcagctgaagggaaaataactgagagtgatgtagttgccaatgcaagagaagagataaacaagctgaggcatacaaatgaggacctcacaaagcaagtggaaggcctacagatgaacaggttcagtgaagtagaggagttggtatacctgcgctgggtcaatgcctgtctgagattcgagctccgcaattatcagactccatcagggaaggtctctgcacgtgatcttaacaggacactgagccccaaatcacaggagagggccaaacaactgatgttggagtacgcaggatctgaacggggtcagggtgacacagaccttgagagtgttgtttcttcaatgccttcttcacctggaagcgaagactttgacaacatgtcaattgacagttcttccagcagatacagcttcctaagcaaaaggtctaatctgatgcaaaaattcaaaaggtggggaaggagcaaggatgacagcagtagtttagcctcctccatcagtggctctccaaggaggaaaccaaagggcccactggaagctctaatgctaaaaaacgctggagatggtacagccataacaacatacggaaagagggatcccaatgatgtcttggatgacgaaaatgtcgcgtcctcattccaattgatgtccaagacagttgaaggttttgctgatgagaagtatcctgcttacaaagataggcacaaacttgcaactgaacgggagaaggctataaaagagaaggctgggcaagcaagagcacaaaggtttggtggtggccacagttcagctctaatttcctctccaaaaggtgcactccctccaaaacttgctcaaattaaggagagatcccctgcagctaatgctgaatccagtgagcaatccagtgacaaccaaaacaacaccctggtggtgagccagatgaagcttgccaacgttgagaagagagcaacaagagttcccagaccacctccccctcgatcaaccgctgcttcaggggctaccagtattgcaagtggagtacaaacgccacgggcaccaggtgcaccacctcctccaccaccacctccagggaaagttggtggcccaccgccaccaccgccacctccaggtgctctaccaaggaaccttggcgggggtgacaaggtacaccgtgcgccggagattgtagagttctatcaaagtctcatgaagcgtgaagcaaaaagggagacatctttagggtcaatatcatccaatgtatctgatgccagaagtaatatgattggagagattgagaacagatcaacattcctcttagctgtaaaagctgatgtggagacacaaggagaatttgttgaatctctagcaaatgaggtccgagcagcaagcttcataaatattgatgacgttgttgcatttgtaaattggttggatgaggagttgtctttcttggttgatgagagagcagtgctaaaacattttgattggccagagagcaaaacagatgcaataagagaagcagcttttgagtaccaggatctgataaagctacagaacagggtttcaacctttaccgatgatccacaacttgcgtgtgaagaagctctcaagaagatgtattctttgcttgaaaaagtggagcagagtgtctatgcactactccgtacaagagacatgaccgtctcacgctacaaggagtacgggatcccatttgactggctgtcagattctggagtagttggcaagatcaaagtggcatctgtccagcttgcaaacaagtatatgaagagggttgcctcagaacttgatgcattagaaggcactgagaaagagcccaatagagagtttttgcttctccagggtgtgaggttcgctttccgggttcatcagtttgctgggggctttgatgcagaaagcatgaaagcttttgaagagctaagaagcaagatgaccacacaggcatctgctccaccaatatctcaaggctgaagcataaattgagcacaggattcagcacacatctggtcttacttgctggagagtgatttttagttgtgtatattaagtgtacagactacagaagagagattcaaattccggtgttgtgtcaagcaagttgtatatgccaagataatacaagtcaggtttgttcatttgtataacagttttagctcaagcataacacttttcattttgaatgttgtaactgtaaacaggcagttccagaatcacagtagagatcagatgcatagttttgcaactgttttttttcagctgggcatgattttgctactacgactaataaaatgtcaaaaaacatccattctgctagtctggtacacatggagataattcctctacatgaaccttgctgtctttgttcaaaaaaaaaaaagtttccagcctgtccgcttggttttaatccgtaacagcttctacttctacagtatttttgtctctatggattacagctgcagcagtccaaacttgttgctttaatccgaagcaaacagttactaccaacatacatacagtgctagactagcagatctgacttgaagaatgacatatcaagaaaaaaaaaatccacctggacggagaaggtcgatgttgcggcgacgagctctacctgaacgtggaagtggaaccgaacacttcgagtggttggctgtggctgcctactagtcgccggggggccgggccccgcctctcggctggcttcagcgcctccgagcgcggtggcagtgtcgccgtcgcgtgggtggaagaactcgtcggttgggttccggctccgggcgcggccgcttgccggggaatccaaccgggagaccgtgaatcgtggttatattattacttgggccctatcaaggccaccacgtctatgactgtgagcttattgtttgggcttgggccgatattcctcttcatccattagatcagttttta

SEQ ID NO: 1897 - DNA, 1414 bp, Zea mays
gcccagctccgaaataccacaaacacccccaatcccacccagaatccggcggaagtcaagccaacctccgtcctccatccatgggcgagcaatccctctcccagcccaagccccagcctctctccccgttcccgtcgcctcccgcctccgccgcgttgccgccccccgcctctgcctctgcctctgcctctgcctctgctgcctccacctcccgcaccaccagcgccgcggcctcgcgccccaagaagaaggtgacgaacccatcgcccgaccgtaacccggcaaagaagccccgcctgacgttctcgatcccgggccggcccctgtccgcagtcggcgaggtgggcgtggccatccgctacctgcgcgccgcggaccccgccctcgccgccgtcatcgacgcgcacgagccccccgtgttccagtgcccgcaccgcccgttccactccctcgtccgatccatcctgtaccagcagctcgccttcaaggccgccgcctccgtctactcccgcttcctcgcgcttctcggcggcgagtcctgcgtggcccccgatgccgtcctcgcgctcaccccgcaccagctccgccagatcggggtctccccgcgcaaggcttcctacctccacgacctcgcccgcaagtatgcctccgggatcctctccgacgccgccatcgtcaacatggacgaccgctccctcgccgccatgctcaccatggtcaagggcatcggctcctggagcgtccacatgttcatgatcttctctctcgcgcgccccgacgtgctcccctccgccgacctcggcgtgcgcaagggcgtgcagatgctctacgccctcgaggacgtgcctcgtccgtcgcagatggacaagctgtgcgagcggtggcgcccctatcgctcagttggggcttggtacatgtggcggctcattgaatccaaggtgccccagccggcgccagccatccctgttggatcacttgctttcccttcgccggacggccagagtatgctacagcagcaagaacaacagcaacagcagactgtcatccaaatgatcgacccccttcagatgctcccagggatggggtgaattcggtatcacttctactcattagttactccgtcttagatcaatcaatggttactctgtgcatctgatagtcagctccacacgttgttgttctggaatggaaccgcaggagggtagaattggatatgaaatgaggtttgggcccaacttattaagttgtcaatttggtttgtgttgtttatctgtgtcaagaatctgtgaagatcatggttggctgttgtttacattgtaaaatccacctagcggtattttagaaccttctggaattgttccatgcttgtagttcacctgtgataaaatgattaagaccatgcttaacacaagaa

SEQ ID NO: 1898 - DNA, 480 bp, Zea mays
atggctgctcgtgggctgggctgggccatgcattgcaccgagactcgcgggaaatcgggcccagcatttgcaaaacgagaatccagtttccatttctgcgctggcatacgcgatgcgacggatgcagttttcatggcggaggacgaagagtcggtgcgaatcggaatcggggaaggaatggtcctcctggtccgcccagccccacgattcttccaccaccagcagcaggcagcaggcagcaggcagcaggacgccggccggccgaccagccaagccaactacccagccgtgggccgcctgtcctgccgccgccgcagcataaatggccagcgagagcacctgcctgcctgcctgctcgtcgcctgcgccttccatgataaacaactcgccgagttcttcggcaaacaaatcggcgtgctggaacatgatcaggatgtcttgctttctctccacgtcagtacgtcaccatgcatgttttag

SEQ ID NO: 1899 - DNA, 1847 bp, Zea mays
ccttgcccctgaacttcgagagtattccaatccagcaccgaaccatccagaagcagccgcctcctgctcttaaaaaactctcgtctctggtcatccattccacacacccaacatcacgaaaccacgcgcagatccaaacgaacccgagcccttccaaaccctaagctcgcctcccctcccccccaaacaccaccgcgcacctatggcgaagtacggcgagggcgacaagcggtggatcgtggaggagcgcgccgacggcaccaacgtccacaactggcactgggcggagcgcgactgcctggagtggtcccgcgcgcggctctcttccctgctcgcgggcctcaccatcctcgacggcgagggcggcctcagtctccgcaccgtcgcgctcgacaagcttgatggcgaggcctacgtcaacatccgcaagggcaaggtcatcccggggtacgagctctcgctcaccctctcctgggaggccgaggccgcctcggagtccggagctgcgaaggtcaccggcaccgctgaggttccctacctcgccgacgagaacgccgacgaggaccccgacctccgcgtcaccgtgcgcggcgacgagacgcccctcgcgctccgcgccaaggacgccttcctctcccgcgggaaacccatggtgctcgagaagatccgggagttcgtcgctgccatggccaagggtggaccggccaaggacgagctggactccaagaaaactcccacgaaggtcgccggctccgcaccggcgaaggaggcggtactggctcctgcgccggctgtggagaagaaaaaggccaaggggaaggacaaggagggcttcaagaccattgagatgacggagaagttctactgccgctcaaaggacatatatgagatcttgatggatgagaacagatggaaagggtttacgcagagcaatgcgaggatcagcagagaggttggaggggaatttagcctcttcgacgggtccatcactggcgtcaacgaggagctgcaggaagggaagctgattgcacaaaagtggcggtttggaagctggcctgacggcttgtactcctcggtccggttggtgtttgatgagcccgagtctggagttacaatcataaagctcaaacaaactgatgtgccagaggaagacaagtatgttgatattcctatgcttcgaacaccaaatctgttgatgcttgtctcttgtacttacgatctgtttgcttttgagtacttgcaggtatggaaattcaactgtggtagagaacaccgagagaggctggagagaactcatattccagcggatacgcggagtgttcggttttgggatctaaagaatctaaagaggcgatttggcatgaagttagatttcaaatttttacggggtcagaccatgcacgtcatagcaatccatgttttattcacccatttgttttccatgtccttaaacacagaacactgcatatcgtggggggtttaaaaacatctgttattcgaacgctgcaatgttgcttgctcccgaaatgagtcgacgctgatctgggttggttatcttgttgcaatgattaagaatgtgtgtcggtgtgaagcgttttagtggctatatactcggtcctcgtgttgtgttttcgttgcatttggacttcaattgagtcgctgtgtgctatagtaacgatcagatcatatccttgtctcgtgctcgtgccactcggaatctggcactctatactttctttattccagatgtgctgccatgatggttttaatgaggacttgtaaatctctattactattatgtgactaatgtaggcgttcacaaccccatggtgtacgttctgccgggc

SEQ ID NO: 1900 - DNA, 2865 bp, Zea mays
taggatagctaacaattggtatcagatatccaccgatcctcgaattccatcgttcctcgaccggaaaacatccatggcgtcttcttcaccggtccatactcagctcattcaagcgttggagcttcagacgcgcgccctcctctcggagttagacaagcgtctcgactccaagtgggggaccaaatgggaatcccgtgttggagcgatcgaatcgcgttccgccgattcgactcgcgccatgtccgatttctcctctgctcttcactccgacgtggaagcgcacctcacagcagctgacgccgccaccgactccaaccttctccagatcgaagccgagctggacccccgcgtgtcggcgctcaaatcctcagtgcacgccctcgatctgtggtgtcctcgcgtggattcatcgatcgaggggctccacgcgtcggtggatttcatcagcaccgaagtgtccaagatggggattctatggaaccacgacgtgtgtgtcgacgacttagccaggccgggcttgttcggagcacacagatcggcggcgtgcttcgacgcgtccgccagcgcgccgtccatcccagcctcggtcatcgccgacaactggggagggttcttcgacgatggcgagcagtactgcgcggcgctggacgcgctgcccaacagcatccactcagacctcctcaacacattcgcgcgtcacagccacgaccatctcttcgtcctcaaccccgtggccgcccaggattcctctgccgaggaggccatggccacgatggaagcagccgcggacgcgggggatcccgcgaggctcgtccagtcctctccgtccccttccctactcatcgcggggaacctgctgccaccctccctcacgatgccgcagctgcaagctgaggtggtggacaagcagtaccgcgtcgcgatgagtccaccgcctcctcttcccgtcgtcgacgagctgtaccgcgaagaggcaagtcctccgcctcccatccacgacgacgctgcaggggtgatgtccttggactcgagcgcgttcaaggtgctcgaccaaatgtccaagagcgcaagagccgacggtctagtggtgaacccgttcgaggagctggaaagcggctcgatggcacttctcgcggaggcgacgggcgaaaaggtgatcgtcgttgggtctgtcttgctatgccgctcaccaagtctctaccctcaatccatgtcgtgtgacacgaggcgatgcatggcgtggctggatgccaaggcgcccaagtctgtggtgtacgtgagcttcggcagtgccaaatgcatgccacccattcagctcaggcagctcggcatggcgtttgcctcatgcccctcgcctgtgctctggctcatcaaggacgctgactccctgcccaacaacatcaaggatttgctacacgagcacactgttgcagacgatgtcgcaggaagcaagtgcctggtggtgcgcggttgggcgctacacgtggccatcctggcccatcctgccagtgacggcttcatggcgctctgtggatggggctccactctggaggttgttgcagccggtcttcccatggctgcctggccctttttcgccgaacaatttatcaacgagcagctcatcatggacgtgcttggtattggattgtctgtcgctgtgatgaagccaattgaaaatgttttgattgccagtaacatgggtggtgctgttgtgatgatatatgctcctgttttttggtcttgcctgacaagcttcacacttggaatccatggtcagatagttggggttctatgtttgccatttctggtaattcaactgaatatcagtatagctgtccagcaaaggttcttgtgggatccaggtggtgatcagtgttgcttactgaatttgtttattcatggcttgggggacttgcagatgcaacaagctagtctgtcttttgtcacgaagacaggatggctggtgattatcctttccttgctgctactccaatgggacaagccaaaccttcggggtcttaacaaatccaagtgcattcagcgtggcttccgtcgatgctatgtacatgcttgtccaagcaggtggtctgactggcttccgtcggccgagttttggtataatagctcgttccattctgctaccggtcgatctccttttgaggacttatatggttatgcacctcgccatttctgtattacttcatgtgatggtccctcagctggcctaaatgcattcttgcaagacaaactggttatgaccaaactgttacagcaacatcttttgcgcgccaagcaatagatgaagtctatggatgataagcaccgcactgagtgtgaatttgctgttggagatctgaaggccgtgggtgtgctaacgtcctggtatctccgttgctgcctgccactgactctgcttggcacattcatgaacagatattggagcgacatctggtcgtcccaaccttcctcgttggcaacatgggaagacttggaagcactcaagcacacctttcctcaggctccagcttgggggcaagctggttctcatggaggagggaatgtcagtatcccttcatcagtcactggaggtcaggcagagcatgttcgaggagatgcagcagataatgaagctacaaggctcgcaggccaagcaccaaggtttataggccagaatgggctaaatagttgctaggccggcctgtgtgccggagtataatatataagccaaacttagggcagagaaggggatgaaatgaacctgactctgaattctactatctactatcgtctccctgttcttcacctctattcatcttctttgtgttgtctgtctgtatctctccactcctgctattctattagtga

SEQ ID NO: 1901 - DNA, 2362 bp, Zea mays
cgactatagtgcagcgctatacaagaaacatcccagaaagtccgcgtcaccaagccgcaaagctagaatccttccaccacagccatggtgccatcacgacacaataattgattgccactgattccagcaaggttctaataaatcttgtagatgcaacctcgctttgcctgccgccgccagtcttccgcctccgccacacacaaatgtccagtttctttgctgtagctgtagctttggtgctctcatctctcatccatggaaccacgatggccacagcgagcagcgaagagagcttcttccagaagtgcccagcgtccaggtgcagcgaaggagggccagagatccggttcccgttccgccttgcgaccagccctctgtcatgcggtgcgcccggcatggagctggtgtgctccaaagcagacaccgtcctggttcacccaaaccttggcttgtgtaaggtaactgccatctggtatggcggcagcactataaccatcgtcccactcgcagtcgcagcagaacccaagtgccctttccagaagatcatctccaccaatctatcaaccgatgtgtatagaccttatggggatagggcaaccttagtgagctgttcagcagagttcatagtaccaagccatccggccagccttgctggtcccatctcttgccttaccaacgctagccgccggttcgcttacttggtgccgtcttttcgaccaatggatttccttcccttggactgcacggttctttcgaatagcatctcggtaccttaccctgcttctgtcaacgcgggcttcaacggaactgcaagaggagccatcgcatttggcgagacaatgttagaatggagagttcctaacattaccgatgtctgccgagactgcgaagctgaaggaaggctctgtggatttagctccgagagtaggcaagcattctgtaagagtaagaatcacagttcacgtctcaaggtcattgcagtaacgacgccagtagccgcagtcctggttctttcagcaatggcaggtgctgcattattacacctggccctgaaatctaaatacgacgacgagatacacaggaaagtggagatgttcctcgagacctacaggacgctgaaaccgagaaggtacacattctctgaagtcaggaagatgacaagacggttcagcagcagacttgggcaaggcgggtttgggagcgtgtacaaaggcgagctgccgaacggaggagtgcctgtgcctgtggcagtcaaaatgctggaggactcgacgggggaagaggagttcatcagcgaagtcgcaaccattggaaccatccaccacgccaacgtcgtccggcttctagggttctgctccgagaggtcaaggcgtgctctggtatacgagttcatgcctaacgcgtcgctggagaagtatatacgctgctcctcccaagaacagtcgttaataccaacggccagtaagatgctggaaatagcgacagggatcgcccgaggaatcgagtacctgcaccagggctgcgaccagcgcatcctccatttcgacatcaagccttccaacatcttgctagactacaacctgaacccgaagatctcggatttcgggctggcgaagctgtgcgcgagggaccagagcgtcgtcgcgctgaccgcagcgagaggcaccatgggctacattgcgccggagctatactctcggaacttcgggacagtgtcatgcaagtcggacgtttacagcttcggcatggtggtgctggagatggtggtggtgagtgcaaagaggaggaagtacagcccagcagagaccgaggaccagaacgacgacgtttgcgttccagagtggatatacgaggaaatagtcaccggacaagagcccagggaaatggcacgaggagagagagacatggtgaggaagctggctatcgtggctctctggtgcattcagtggaacccaccgaaccgcccgtccatgactacagtggtgaacatgctgacggatagcttgcagagccttaagataccccctaaaccatttgtttcatcctttgttggccagtaaccatgaagaaaaagctctagagaccacatggtgaccattcagatagatattcgtgtctatcacttgtcggcatatgcatgtatcagcgatgatgccctgtgatctgtcgtagttttgtgtcatacccatataccttttttccttgtaaccactggattgtatacattgcaattttctggtggtttaaccatgttcacgaatttgtaatggcattattagcaggacgttacataaaaaaaattagtaactggaaaggtagaagttacagcttacattaaaatgcggacagaataacgttctta

SEQ ID NO: 1902 - DNA, 3548 bp, Zea mays
atgcaccgcgccttcgaggagatctccgacgaggagtggtctaatcacaccttcgagccctcgcgcgtcctcaagcgccctaatcagcggccctcgcagcctccgccgtcgatcgattcattcatctacaaccccaaggcttgctccgccgccggcaccagcactgcaactgtcgtcctctcggacgacgacagcgacttcgacctaggtgcggacgggggttcccgccgcgctgcgaagagccaacgcgtcctcaagcgcccgcataacggggccccatcgcggccttctctgccagttaaatcgtcccgccgcaatccccaaccatccaatgccgctgccgcctttgggttctccgatagtgaggacgatgacttcgatcttcctacgtcgcctttgaggacgtcaagccttcgccgcaaaggaaagaaccaacgccccctcaaggcccctcagctcaaacctcacttgcgggctcctccgccacccaactcttccagccataatccgaaacggtccaaatttgcctccgatgtgaagctttccaacagtgaggacgacgatttcgacctcacaaaaacgttaagcctcaacagcagcacaaataggcaacacatccagaagcgtccacagcacaagccccgtttgcagcatcgtcagtcctttggctcatcttgcggcaatcagaagcattccaaggctgttgccaccacacggctatctgacagtgatgatgatgacttcaacatcacggacaatgactttgaccttccagcttcgcattcaaggatatcacgcccacgccgcactactagttgccgccggttgacgagttttgctattgacatctctgaggaagacgaagaagaccttgctgatgatgacttcgactaccaagacccaaggcctccccagcaacgctcctctggccgccgctttgtggtcggggacgatgatgacagtgatgtgcctgtagctctggaggaggaggatggggtgaattggtcggagctggagaaggaggacgtagatgaggactacaatggggtgagaagtgtacatgtggaggagcccgagggagatgtagtgggaatggcattgcacaaatgttcacgcatctcgtcagatctgcgcaaagagctttttggttcatcagcgcagaattgtgaaagctactgtgagatagatgcttccacttgtggtattgttactcaggaagacgtaaatgctgcatgcacacgtgagaagtctgggtttgagcctgtgttgaagccttatcagcttgtgggagtcaatttccttctcctactgcatcggaaaagcattggtggagcaattttggctgatgaaatgggtctagggaagacagtgcaggctgtcacttatcttaatctattacagcatctatataatgacccaggtccacatctgatagtttgcccagcttccgtgttggagaattgggaaagagaactcaggaaatggtgcccttcgttttcgatcatcatgtttcatggagctgcaaggactacctactcaaaggaattaagctccttaggaaaggctggctgtccagctccatttaatgtcctccttgttggctactcactttttgaaaggcggagtgctcagcaaaaggatgatcgtagggccctcaaaagatggcgatggagctgtgttttgatggatgaagcacatgttttgaaagataagggtagcttccgatggagaaacctgatggctgttgcgcaacatgctcgccaaaggctaatgctgacaggaactcctctccaaaatgatttgcatgagctatggtcattgttggagttcatgatgcctgatatatttgctactggggatgttgatctgaagaagctgctgaatgcagaagatcgcgaactaatttcacagataaagtccattttagggccatttattcttagacgtttgaagtcagatgtaatgcagcagcttgttcctaaaatccaacatgttaagtttgttgtcatgggcacagagcagtctgaagcttacaaaaatgccataaatgagtaccgtgctgcttgccaggctcgtagtgccaagtcttcagatggcatttccaataatgttgctggattgattccaaagcgacaaatatcaaactattttacacagtttcgtaagattgcgaatcaccctttgcttataaggtgtatttatggtgacaaagatgttgatcgaattgcacggttgctgtaccctaaaggtgcatttggcttcgaatgctccttggagagagcaatacaagagctaaagaactacagtgatttcaatatccaccaactattattgtcatatggtgatgtgggcacaaagggcgctctaaaggatgagcatgtttttgcatcggcaaaatgtcaggccttaggggagcttttaccttctctggcaaatgatggtcacagagtactcatatttagtcagtggaccacaatgcttgacatccttgaatgggcattggaaattataggagttacatatagacgccttgatggagggaccgctgtgacagaaaggcagactatagtggacacgttcaacaacgatctttctatatttgcatgtttactttctacaagagctggaggccagggtctgaaccttgtaggagctgacacagtcattatacatgatatggattttaacccccagatggatcggcaagctgaggaccgttgccatcgcattggacaacagaaacctgtcactatctataggctagtgacaaaggattcagttgatgaaaacatctatgagattgcaaggcggaagctagtactagacgctgcaattcttcattctggagcagagttggacaatagtaccgatgtaccagagaagacaatgggggagattttggcatctcttctcctggtctgaagttctaaccctggagtttcttgaaggtatacaattctacccgtgggatatcttcaacaatgggtttttggccttcatttaagcttaccattcaccctggttaatgtcttgaatcttgaggtcctaagatgtgcatccatgtatcctttttgctcttgaaacctcccatcttttagtctgccttatccatcttttgttctatgaatggcgtgctataaactgctggatttccgaagtgtttatggttctacataatgacataatgtttaaggttactgtaggttgtaatggagtccggttcccacccccccctctgatataggaagaactgaaatctgaagtaatacatctgtaccaaagttttaacttgttttaaatgaaacgcagaatagttccaaagtcgcaacattttcttcagtctgtaccattatttatctttatttttattttatctgcacaagtaggtacggggtacctaagctacacttaacattgtcaggatacgttttagagtgcagtttgaccacatgtacatgtatcttgacatactagtctaactgtcagtttgagattgacacccgctttatcagagaaactatatgggaaactttatatgtgttaaattt

SEQ ID NO: 1903 - DNA, 2970 bp, Zea mays
ggcccacatcttagggtgtgaatgaaaaaaaggtaactccgccggcccacaagagcccagcctgagcccataaatcttgcccccgctgccgcgcgccaacaccgtcactcttgttgatcctaaaaccctaacccctagccagcgctccgccgccatccgccggcgagatggcgttgtacctgctgttcgagtcggcctccggctacggcctattccatgcgtacggtatcgatgagatcgggcagagcgttgaggccgtgcgctcctccgtgctggacctcgaccgcttcggcaaggccgtcaagctcactgccttcaatcctttctcctctgccgtcgacgcgctcaaccagtgcaacgctatctctgaaggaatcatgaccgatgagttgaggagcttcctggagctgaacctgccgaagcctaaggaggggaagaaggccaaatacagcctcggcgttgtcgagcccaaggtcggctcccacatctccgaggtcaccggcatcccctgtcagagcaacgagttcgtccaggagctgctccgcggtgtccgcctccacttcgaccgtttcatcaacgagcttaaggattctgacttggagaaggcccaacttggcctggggcatagctacagcagggctaaggtgaagttcaatgtgaatcgtgttgataacatggtgatccaagcaatatttctgctggatacacttgacaaggacatcaattccttctccatgagagtcagggaatggttctcatggcacttccctgagcttgtcaagattgtgaatgacaattacctttatgccaagcttgctaagtttattgtgaacaaatctgatttggcggaaaaagatatcccagctttggctgatatagttggtgatgaggacaaggctaaagaaattgttgaagcagcaaaggcttcaatgggccaggatctgtcaccagttgatttgatcaatgtccagcaatttgcccaaagggttatgaatctctctgagtatcgcaaaaacctttatgaatatctcgtgactaagatgaatgatattgcgcccaacctgacatcattgattggtgaagtagttggagctcgcctaatctctcatgctggcagtctttcaaaccttgccaagtgtgcagcttccacccttcaaatacttggtgctgagaaggccctattcagagcactgaaaactcgagggaatactccaaagtatgggcttatattccactcctcctttattggccgtgcttcaaccaagaacaagggcagaatggctcgttacctggcaaacaaatgctcgattgcttcacgcattgactgctactcggaggctagtacctctgtctttgggcaaaagttgcgcgagcaagtcgaggagagactggaattctatgacaagggtgttgcgcctcgtaaaaatcttgatgtgatgaaagctgctattgacagtatggtcaatgacaccttaatggatgatgatggtaaggcagataatgagaaggcggacacatctgccaagaaaagcaagaaaaagaagaccaaaaccgagactgatggtgatgcaatggatgtggataagccctccaacgtggctgatggagaagctgagcttggaaccgagaagaagaaaaagaaaaagaagcacaagctagaggaggcacaggaggagaacggtgcagcacatgctaatggcgacgctgaagagacccagactcccaagaagaagaaaaagaagagccgtgaaatttcggaggaagctgaacctaagacagccactgaggggaagaagaagaaaaatgaagaagctgaacctaagacagccaccgaggggaagaagaagaaaaagaaggcagtcaaggctgatgaatgacaagctatttgttgtatgtcagtacaaatcctagtatttgttgaaaaccgagataagcacctagcttctagttcatgaggtgtacgatgcaattcaattcaactatgaagttctgcaatccaactcaactacgaagttctatcgtctctagcttgattgtaatttttttatgagggtgcggttggataagcaaatagcttggtgagttggcgttcgattgttatattgagtgagaactgagatttgaaggcatcttcgagacacttttttgaaggcagtcaaggctgatgaatgacaagctatttgttgtatgtcagtacaaatcctagtatttgttgaaaaccgagataagcacctagcttctagttcatgaggtgtacgatgcaattcaattcaactatgaagttctgcaatccaactcaactacgaagttctatcgtctctagcttgattgtaatttttttatgagggtgcggttggataggcaaatagcttggtgagttggcgttcgattgttatattgagtgagaactgagatttgaaggcatcttcgagacacttttttgttagtagcatgaaacgtgggcgtccacacggctccgcccgacatcacagcggcgcgcccttggcaagcgctccccctccccctcccccgcggcaatcttggtgtcccccgcggcaagctcgccctcccccgcgaggcaatctcggcgtcctcgctgcaatctccctcccccgcggcaagctcgccctcccccgtaatggcgcgccaatgcaatatattgccccgcggcgtcgacacctcgcccccacccccgcctgcccgcgatgcctcctccagtcgattcgccattcccgtggtgaatcagcctcggtgccacaccccgccccgttctcggtgccacaccccgcccccgtccttcgttgcccccaccaccattgtctcgctcctccacgccttcgccactctcaccgtctccgacgggcgcgcgcccgttccgcgactgcgacgaccgtatgcgatacttccgctcgcgcctcacaaggcggcacagatctatcaccttcggcttggagggctactactccaccg

SEQ ID NO: 1904 - DNA, 2446 bp, Zea mays
cacccggaccctattaaacccgcctctcagccgaccgtttcgagtccgtcgtcgtctagctcccatccgacctcctgcattccccactagtcccaactcccaaccaccgccagccgtccgctctccgcaagcgcgaccttccggccagatccgccccgttgcgccgacgagcggtccttctgcctagtttctccgcgcagcgagcggcgggttcctcggagattcccgctggccgcggggatccatttgtgactgctcgcgttgcgcgtggatctggtttgggacggaggagtgaaacgcgacggtgatcgtgcgaggtggggacgccatcagtgctctgtctggggttcggtctgttcttcgactgcagatctggaagggtttcgtgggatccgtcgctacgatctgtcccagtcagagcacctgcatcatctcgggtcgggccatggagactctgctcatctcggaggagcgcaaccaccagctccaccacttctcgggtcgccggaagaaggcgttagcagcgtcgcctcagtccacgcgcagctaccatgctggcaactgccgggcgttccactccggcatcaccgtcggcatcctgccatccccgcccgcgcagagggttgcactgacccgctcctctcctgagcccaagacaccgaaacatcagcttcaccatgggaaaaagcgcagccgagcaatctctataaacctttcgacgtcccctccctctcgccctgagctctgggctggcccggggttctgcaattcgccgcctcccagctccctcccgatccccaagttctcactccaccagaagcgcagtgtctcacttgaatttccacctgctgaccggtcagacgacgaagaggtgcccgtgcatgccaagtcggcaccttcatcgccgactgcaggctcaggtgttaccttcttcagtggtactgatgctaccattgccaccgagaatctgaggaggatccttaacctcaaaattgaggataactgaatggcggttgggtagttctgtgtacatagtttaactacaactgacctttgtagtatgtatagggtaaccggggataaccactgtgtacctggcggtggttccttctgcagcagtactgtaggcggttagcaagcacagcgaggagtttaggaagtttggaaatgcagtgagaaggatgttgtggtaatggagatttggtggatttgcatatcactgcagtttcagagtcacctttgttccttgtaccttgtagttgcctattagtagtccaatactccatttagatgttatagtatttgcatcttccctgcccatcattaaccagtagccacagccttcatatcataatccttgtcatgtagttcatctcaggcagggcattgtaggctagctagtactgttcaagttctgtcatatatgtagtcttctgtaggattgctgcatcccttgaaacttgcattctgtatcacattgcatcctgctgactcacctcccttcataacatctccctgtgttatgcaaagcgcacaaggatctcccctctggcacttctgttttttggaatgaagatgctcagaggagttgttatgaagtcccgatccaatgttctttgtcctccatgtctgtactgactttagctattcatctcctttgtcaccccagtcccattgcatgtgccatccaatccgtttcgaaccattcatctcaaaattgcatttagtggtggttttcccttcgtcttattatcttttgtgcctcatgatcctggagcatgcccaggattctagtctcctccatgtattctcataaaggacttcacgtatcagagatctgcgaatgctcaaccctgaatatggtaattatctatttcatgcctctctacccactactatcgtacatataatctgacagtggtaacgtgatgtgtggggcttttcgtgctgcaggtttgcttgtccgatgccacttcgcctcatccatacctggagttcagaattggcgaagcacctatcacttagctatctgtttcatagtcagtattgtgtcagactgttgtttttgtgcaatatttgattggctactagtctgtttgtgttactgttcaagtttatggtagtgatcatatatggcggccggagtgttccacgccgatgctgtggcattctgttgctttcaagtaaaactagtcaatgttatgtaccttcatgttattttttggtcctgtttctgtgacatgtttgaagttccatgttatcgcactgtatttgctcccaagatcttttttgtttggtccgcttttctagtggtcctaatcatcgtgtgacaaatggttgttactatacttaagggtctcctttttaaggataaatatcaacgttgcgaattgcgatgcttggtgatggatgcatactttgtgcggggaagatggctatggttggt

SEQ ID NO: 1905 - DNA, 1967 bp, Zea mays
atgctaaaaagcatgttcaatgtttgaaagtagatgcgctgcgatttcgctcgcctgcgtcgtgatgggggacgaacacggacacggcgctgaatgcgatggatgaggtgccctaactgccctttgctgctgtccgctctgactcagtgactcctgcggtcctgccgcccgcaaacaactagtcagacccggaaggaggcacgcgagctccgatggcggcgagcacggccgcggttgttcgtcgtctctgcgtggccgcggaggtgcggtctgctctggctgtgctcgcccgcgggacgaagtccggcgacgcagcgctggacgtggccgcgtgcaccgcgctggtccacgtctgttgtcagagcggcgacgttgcggaggcacgtagagtgttcgacgtaatgccgcgcctgggcgtggcccctaacgaggtcacgtacacagcattgatcaatggctactttgttcgtggacacagagagatgggtttcgccttgtttgcggagatgaggagagacggagtcgagccaaacctctacacctacaactgcttgatcggtgaatggtgcaggacaggggagttcaagagcgcccgactcctattcgacgaaatgcccgtgaagggtgtcgtgcataatgttgtcagctacaacatcttaattgcaggcctgtgcaggcacagcaagctgaaagatgccgtccagctgtttgaagcaatgagaagggagggtatccgtccaagcattgtgacgttcaatcttctaattgatggctatggcaaggctgggaagatggctaatgccttacatttcttcaatcagatgaaggcggcagggctgccacctagtgtggtgacatacaacgagcttatatgtggattctgtcgtgttagagatatagcccgtgcagtcagggctttcttagacatgaaggagcgcggtttggcacccacaaaagtgacgtacaccatactcattgctgcatttgctaaggaaaatgaaatggacagggcattcatgatgctttcagagatggagaaggctgggttggaagtggatgtgcagagttatggtgttctcttgcatgcgctctgcatggaagggaagatgatgcatgccaggaaactgtttcagtcgatggatctgaaaggtgtcaaaccaaacagtgtgttatatgacatgatgatctacggatatggacgggaagggagctcatataaggctttgagattgatcatggaaatgaggaagaatggtttgattccgaatgttgctagctattgcctaacgatccgtcttctctgcaatgaagggaagtgccaggaagctgaggctttgattgatgacatggagcatgctggtttgcaaacaagtgagactatctgcagaatactactcgatgctaaggcaagattgcatggttctactgatgattcttttacttaaaatagtcaggcacattgtttctgttatctgccagggtataggttactatagttatcttgtggaagtggcaaggtggtaggaaaagaaagattgatagagaggttaaagatctactgaatcctgtcttgtaccaacattttggtgttttattgaacttccccgcacaatgagcatggttggttggtccctatttgcacgctatgaaagatgaaactccatgtgctgagtcattttcctgtgtatccatctgcaaagcgtatggatgcaaaggcgaaagtggtctgcaaacaagtgaattcatctgcagaatatcattgaatgaggcagactggatgattctctatttctctcaatgaaccttttgcttgaagtagtctggcccattgcttttgttatctgataagtcatatgttgctatatctatcatggattcatgacagtgggaaaatgatatgcaaaacactgctacgtatggaaggtctactgcaacatgccttgtagaaacatttcagtggattactg

SEQ ID NO: 1906 - DNA, 786 bp, Zea mays
tgtgcttcagatctccaacaatcaactatacgaaagtagtttaaaattggctgcagatattaagaactacgctagaacagagcatagagctacgattttgacagtttcatacgaattgcctttcaaggtccccatggtgctatttcgtccttgttttaattattaaccaggtatcttatctgcaatatcttgatttcttttttcttctctttttacaatgctgactgacccaaagactccttccgcaagctcaaacgaaacagtagtccgaagcgggcaccgtttgcagtaaacggcgacgatggcgcaaagcttgactcgctgtgcggcgacgtgatgacggaaggaggtgtacctgcagagcacgccgacgaggaggagaaggaggtgtacctgcagaacacagccacggccgacgaggaggaggactgcagagcacgccggggccggagtccgagcgcggctcggccaccgcgttgtcccacagtagtccagaagcccctagccccatgcaccgatgcgcgtcctgccacgtgtgtgaagtgcccggagtggtgcgcattttgcttagagaccgatggttgtggtctgttctctttggtccttgtaaccttgtttgatgttatagttggtcgttgggcgagacgaagaaagctagatctgacctctaggcgtgaggtgtgtggatggaggtctctcctcctttgtgttccatgcttctttctttttggattggaggaccaaggaagcagacaagcagtgcagctttatagagaggacgagcat

SEQ ID NO: 1907 - DNA, 516 bp, Zea mays
atgccccgagcccctctactcgacgacgagttctccacccatccctctctcacgacgccgaactcgccgccacaggtcggtccgggcacgccgttcggatcggtgccgccgagccccatcatcgtggtgtcgagcccaccaggatccggccctgatcccggctccggctcaggaggcggcggctcgggttccggcggcggtccgttccagccgccgatcatatacccacctccgctggctccaccgctggcgccgggcgcggggcagacgttgtggtgcgtggccaagcccacggtgccggaccccatcatccaggaggccatttactacgcgtgcggcgccggcgccgggtgcgactccatcctgcccagcggctcgtgctaccgccccaacaccgtgctcgcgcacgcctccttcgcgttcaacagctactggcagcaggccaaggcgaccgacggcacctgcgacttcggcgacaccgccaccatcgtcaccagagacccaagctctgactga

SEQ ID NO: 1908 - DNA, 2315 bp, Zea mays
cctaatctgttattacggcatacctaaactgccctgcataaatccaccgttccttgatacgacagctctgaaacgcggacaagtctctacagcctcagcacggacccggcctgcctcctcttctctctctcggcgacgactgggcgaccgaccaaccgtcgctgcgctacgccaggtgccaaggtcttcttcgggtccttcgccggcgaccagcagcaccaggcatagacttgtgtaagaaatggatgcaactgccggttaattgcgacacagatttatatggacatagatattggggccatgtgtaagggcggaagctgttcctaccgcgtcaataaggggagtcctgctggttctaccaggaagatccattccacagcctctcaaggtcggatggcatctgacacagcgagggtaacgaaaacagaggcatcaaagctgaagaacctgatctcggcatcattcaaacccttgtctctgaccattcccatcggcgacggattccacgaatcgctccctttcagccattgtcatttatagtagagaaagacctacgagaacgtccaggtgctttctgcaggatctcataatacttgcacgagctaggatgcagctcaagcctcctgcaagacccaagctctattcagggctcatgccccaagaggatttggatccgtaccgtgatctaataccaggcttgcctgaagacttggcgaagatatgtcttgcccttgtccctcgtgctcattttcctgccatgggcgcagtttccaagaggtggatgtcgttcctcgaaagcaaggagctcgtagctgtgaggaaggaggttgggaaacttgaggagtgggtgtatgtcctggttccagatgctggggcgaaggggtcacactgggagattttagagtgttcggggcaaaagcagagccctcttccacgcatgcctggactaaccaaagcggggtttggtgtggttgttattggtggtaagctctttgttattgcgggctatgccgctgaccatgggaaagactgtgcttcagatgaggtttatcagtatgattcttgcctcaacaggtggactgtgcttgctaagatgaatgtagctcggtgcgacttcgcctgtgcagaggtcaatggggtgatatatgttgctggtggatttggtccaaacggcgagagtttatctagcgtcgaagtgtatgacccagaacagaataagtggacactgatcgagggcctgcgcagaccaaggtggggctgcttcgggtgcagcttcgaagggaagctgtatgtcatgggcggccgctcaagcttcacaatcggtaactcccgttctgttgacgtgtacaaccctaacagccacgcctggggccaggtcaagaacggctgcgtgatggtcacggctcatgcggtcctcggcaagaggctcttctgcatcgaatggaagaaccagaggtctctagcaatcttcaacccagctgacgactcctggcagaaggtccccgtgccgctcaccggcagctcaagcactcgtttctccctcgtggtgcacgaggacaagctgctgctcttccctctggaggaagagcccgggtaccaaacgctgatgtatgaccctgcagctccgatggggtccgagtggtgcacgtcgaagctgaagccgacgggttcttgcctgtgcagcgtgaccatcaaagcctgatgatgaccttgaatgcgtgggatgcggtggtcgtactgtcctcataagatggagtcccacacgccttcatatttcagagttgggatgaggctgccttcagttggtctcatgcgcactttctttgcttgaaattttaattttgcgtgtcgcatcgacaaataatggataggacatttatgcttcggttcattgagttgctgaagcttatgatgtattctcacttctgtattgaactctgttcgtttggttgtttagttgatttgatcttttgttttttgctggcactcacatgataacgacagccgtgctgtcaacagtcaactgatgctcggcagaaaggtttatgtcgttggctcgttgcacatgatcaggtcggcttttcttatttggggctgaaagtatagctcgggctcaaatttcattaatcagatggaggattaagattctggagcactcattttatgagaacctttgcgcacagatgagctggtcaagtatattactacttgtgacctttgatcttgcaagtcctgattgattctcatgatgcagtatgtgcgcccacgttttatcccgtacagtatgataagaggacttttggcttttgccccct

SEQ ID NO: 1909 - DNA, 1378 bp, Zea mays
ttgttctcatgtaggctgctgcagcaagcaactggatgatggcttccaggcagtcagggaacaatgcacaagaagcagcatcaccattggcgagtcctcctcactccaacatagccagcatcatcccttcgctgcccctcgagaccaggtgcccaccgttccctctccgccggtacgccaacttttgggtgcctgaggtaatattgaaggcagacctccccggcattcattcctgcttcaagccgagacccaccgacgtgttcgtcgcaagcttccccaagtctggcaccacttggctcaaggcccttgccttcgcgacgctgaagcgttccacgcatccgccattggatggcgaccatccgctgcgtcgttgcaaccctcatgactgtgtcaggttcctcgatgctaatttcaaccagcagaaggatgagttggaggctctcccgtccccgcgcgtgctagccacgcacctcccctactccctgctgcccggcagcatcaccggggatagggagcgctcggggtgccggatcgtgtatgtctgccgggaacccaaggacgcgctggtctctgcctggctgttcacgaggaaggcggcgtcggcgctgggggctgacgctcgatcgttcacgatccaggaagccttggagcttttctgtgatggtcgctgtatgtgcggcccgcagtgggagcacgtcctccagtactgggaggagagcgtgaggaggcctgacagggtgttgttccttcggtacgaggagatgctgattgatcccgaggcacacgtcaggaagctcgccaagttcatggggtgtggattttctgaggaggaggaggagcacggggtggtgagcgccatcgtggagctgtgtagcctgggcaagatgagggacatggaggtgaacagaaatggaagcaatatgttgggggtcaagaacgaaagctacttcaggaagggagttgctggggactggagcaaccatatgacgccggacatggcgcagaggctagacaaggtcgtagaggatgcattgcaagggactggattcagctttacgagcaaagcatgatgagccactgcgctcatggtagttgcgaactccataatgccaagaacaactcgttttgtcggtattgcttgctggatggagatcataccagccagccatggtgagcatccttcttttgtgatgaaggggaaattgatttgcgtataattcatctgtataactttgttacaaaccatagtttgtggcaccttggcgcgccaaaaccatatgcattactgtgtaagattcgtcataaagctatgtgtatcatcattgacatatttgtcttaataaaattcatcataaaccatcgttcaatgtatggagaa

SEQ ID NO: 1910 - DNA, 1577 bp, Zea mays
atggacgtcgtcgtggtagccgggagctctgacgaccatcggcggcggcggaagggtagcagcgaccacgtcgttgcccagctgctcgagtcgccgctaccaacgccacgccgctcgtgctgcgggcggccagccgacacgcctgccgcgcgccgcggctgcgccgacgcgtccccgcggcgcgggcacgtgccgttcaagtgggagagctcaccgggcgtgcccaagagcgcagcggccgcggcggagcgggaggtaccgctgccgaagccgccgccgggacggtgcggcacgtgccacgccgcgcgtgcgcgggcacgggcctaccaccaccacagcaccgccaccgccgactcgagcagcagcgaccggcaggacgacgacacgttctccgacgcgctggacagggtgtcgtcctccgacaggctcgccctcgccgcgatctccgcgcgcctgagcgccatcgacggcgccttcgggtcgcgccgctcgccgagcttcatcatggaccgcttcctcccggccgccaacgccatcgccaccacgtctgcggacaagcacccgaggaggcggccgtcgtcgcgccgctccaagtccaagcgcgaccgggacagggaggccgaggccgcggccacggccacggccagagccatagtggcgatgcacgttcggcgccgcgctctcccttctgagcagcctatatattccccgcagcagccgcagtgtgagcgcgaagacgcggcggcacaggcacaactcccgtcgtgtgccaaagaggacgcgcggggcgagcagacgcccccgaaagcgtgcgggttcatgttcttcttcccctggagcgccaagccggtgcacctcggtttccagcggagcccggcacgtccacggacgccgcggggcgacgtcgcctctgtcaccaccaccgcgtccgcgtctcctcctcgccggagcgtcacgctaggcgatgccctggagaaggagcggaaagtacgcgatggcagcctgtcgcattggtacgacgagaagagcggcagtggcaaggagtggggcatggcgctccttggtacgagcaagaggtactgcgcggacgcaaggaaggcgctgagcaggttgactcgctctggaatggacagcggggacagcccgaggatcggcagggagaggagcagcagcaagcacaagcacaagcaggccgcctcgatgccgttgccgcgcgcaacgtcggtcaagttgccgccgctatcgccgccgtccgagtcgtggctcagcaacgcgaggcggagcaatgcatcaataacaaaaattgatggcacttgcgatcgacgtgagagcccaattgcacatacataggatctctgtggcgatttttccaccgtcatatatgtcttcagtaacaaaccagtgattataatataccctatatttaagcgcgagtttcgccgtatgacgcctcctcctcgacctcgagcgacgaataatttcctctaccccgtgaaatattgttttgtcgtgtgtcgtcttcgtgtgtcgtcttccctgttcatttggtataaagcagtggacttctaccagtataa

SEQ ID NO: 1911 - DNA, 1253 bp, Zea mays
aaaccttaaccaaatcccccctcccctcgcttccacaccttccgcctcgtctccctctctctctgtctctctctctcacacacacacacacacgcatcaggtcgggacgggaggggaggtctcgtgcgcgcccggctttcctctcctctcctcgccgcacgacgcgcgcgcggtcccggtcgccgatggccaaggcacgcaggccgccgttcgccgccgccgagcggttcctcggcttcccccgcggcgggccctcgccgggggccgtggcgccggcgcccgccgccctcgacgacctgccggacctcgccgaggccgacgtctggtactcggctgccgacccgggtagcccgtatcccgcggcgtcccgacatgcggcggcggagggcaggagcgcaggccagcgcggcccgcggcgcggcgtgcagggcggcctgagccgggcgttcggggacgggtccgggtccgggtccgggcggcaggcggcggcgtcggcgcccgtcgaggtggccgcgtggccggcccgcttctccgtgccggacgcggagccgacgctgctgttcgagatggagatgggggacgacgacgacgacaagggggagggggacgccgggtgggtgcctccgcacgtgtaccttgcgcggcgccaggcgcgggcgtcggtggtggagggcgccggccggacgctcaagggccgggacatgtcgcgggtgcgcgacgccgtctggagccggacgggcttcgacggatagcgaatgagcaagcgagcctggacagattttgatctgcttttgctccctgccccccctcttcttcttcattgcctgtcagatttctcttccccctctttgttttttcttctcccttctggatgaaatggaaattttgtaacaaggccggtgtgcttgttttggcctccgatccaccggcgattttagtactggaatcaatggcaaagaaaggaaatgagctcagctcagctgctgtgaaggaaatgtgaggtgtcatgtgtagcagtatcagagtagtatagctcaatacaggtgcatgtcgattggttgaatagtaatctgcttgctgattggggcagttggatactgtggccttgtggctggctccaactcaaattggttggcctgcctgctgaggctgatgatcctcttggctactcattgagtataattcgctactagtaccaggggcaaaaataaacaaaaaatgggccatgtgttgtgatccagaactggattttt

SEQ ID NO: 1912 - DNA, 1619 bp, Zea mays
cgacgctgccactaagcttatcctaccttccagtcttctcccctccctccagttcattcccatttcccaacccaaaccagcggctggcacggacgccggcgagccgcgcggcccggaggaccactgcctcctgcatatagccggcttccgcggccatgtcatccgtacacttctttcctgcctcctcccagaccccggtccccgcctgccttctcaaaacctctccaaagtcacccctcccgtgcccccgcacccttgccaccacctctctccagagtgttggcggcaattgcaatgcgtggcaccgcccgcacctacggctgcagcggagggtccgcacccctgcagcaccgtccgacgcgccgcctgtgggccccgatggcgggagcgggggcggcggcgcggggggagggagtggaggggaggatgaggaggaggagggggagaagaagaagggactgttgcccgagtggatgaacttgacaacagaggacgccaagacggtgctggccgcggtagctatctcgctcgctttccgaaccttcgtcgccgagccgcgcttcatcccctcgctctccatgttccccaccttcgacgtcggtgaccgcatcgtcgccgagaaggttacttactactttaggaagccatgtgttaatgatataataattttcaaaagccctccagtgctgcaggaggttgggtatactgataatgatgttttcattaaaagagtagttgccagggagggagatgttgttgaggttcatgaaggaaaactcgttgtgaatggtgagggtagaaatgaagaattcattcttgagccaccttcttatgacatgaatcctgtgcaagtaccagaaaactctgtttttgtgatgggagataaccgaaacaacagctacgattcacatgtgtggggccctcttccagcaaaaaacatattggggagatcaatttttcggtattggcctcctggtcgaatagggggtactaccaagggttgcttcagccctgaattaagccctggagcaaagccagaatcacttactgatgtcaaatcgacaaagtaggagattgagaagttagttttggtggtgcctgatgtgcaggggaagcttcggttattcttcgtggtagaatgtcacagaggaatcctgtgttgtgtggcaggtagttctattagaacccagagagcggaagacaatttgattctcattgagtcattgggattgggattggattggccagaaggcacagaaaccattttgtctcagggtttcttgtccttttgccttgctgtatacgtacgtattagggaaacttgataccatgatggctgacctagttaagctgcaaaaaagtatggttccactgttgaaatctagagtctggaacatgatgaaatccgcgtacagcatgacgcgcaagtacatcctgtaaatggagaacgtgtctattcaatgtgccgttgaacaacgcagagaaactacccggattacttacgctaccgcagaaaaagatggattatgttagattgcaattgcaggcgtacaattcagcctttttttaaacatttggttgtttttttcgggtgtcttcgttaagtgtttggaatagat

SEQ ID NO: 1913 - DNA, 3475 bp, Zea mays
ccaccccgcccccgcgaatccatcctatttccgccgatgccgccttcctcgaaccttcgtcgcccgctgcacctccccgccgcgccccctacaaagccagccagcagctaaaaacctcctcattctcatccacttcctcccgcgcaaccgctcttccccaacttcgccgccgccatgggctcctcctacgacccctacccgtccccggccgccgacgacctcttcctctacctctccgacctcggccccgcctcgccctccgcgtacctcgacctcccgcccaccccgcagcctcagccgtacccgcagtcccagcagcagcagcaggggagcaaaggccccacgcaggacatgttgctcccctacatctccagcatgctcatggaggacgacatcgacgacaccttcttctacgactacccggacaaccccgcgctcctccaggcgcagcagtccttccttgacatcctctccgacgacgcctcgtccccgaccaccaccactggcaccaccaacagcagcgccagcgtcaaccactcctcctccgacgcgtccgccagcgcgccgctcaccccagccgcggtcgactcctactccccggcccccgccgtccagttcgacggcttcgacctcgaccccgcggccttcttcagcaacggggccaactccgacctcatgagctccgccttcctcaagggcatggaggaggccaacaagttcctgccctcagaggacaagctcgtcatcgacctcgatccgccagacgaccccaagcggtttgtcctccccacccgcgccgcagaaaacctcgcgcccggattcaacgccgccgccgccaccaccgcccctgccgccgtggctatggcggtgaaggaggaggaggtgatcctcgctgcgcctgatgccgcgcttggcagcggcggcgtcgtcctgggccgcggtcggaggaaccgcttggacgatgacgaggaggacctggagctgcagcgccggagcagcaagcagagcgcgctgcagggggacggcgacgagcgggacgtcttcgagaagtacatcatgacctgccccgagacgtgcacggagcagatgcagcagctgcggatcgccatgcaggaggaggccgccaaggaggcggcggtcgccgccgggaacggcaaggccaagggccgccgcggtgggcgggaggtggtggacctgcgcacgctgctcgtccactgcgcgcaggccgtcgcctcggacgaccgccgcagcgccaccgagctgctcaggcagatcaagcagcacgcaagcccgcagggggacgccacccagcgcctcgctcactgcttcgccgagggcctccaggcccgcctcgccggcaccggcagcatggtttaccagtcgctcatggccaagcgcacgtccgcagccgacatactccaggcgtaccagctgtacatggccgccatctgcttcaagagagtcgtcttcgtgttctcgaataacaccatctacaatgccgctctgggcaagatgaagatacatatcgtcgattacgggatccattacggcttccagtggccgtgcttccttcgatggatagcggatagggagggcgggccaccggaggtgaggattactggcattgacctgccccagcctgggttccgccctactcagcgcattgaggagacagggcgccggctcagcaagtatgcccagcagtttggtgtgccattcaagtaccaggcgattgcagcatccaagatggagtccatccgcgcggaggatctgaatctcgatccagaggaggtgctcatcgtgaactgcctataccagtttaagaacttgatggatgagagcgttgtgattgaaagcccaagggacattgtgctcaataacatcagaaagatgcggcctcatacattcatacatgcaattgtgaatggctccttcagtgcgcccttcttcgtgacgaggttccgagaggctctgttcttttactcggccctgtttgacgctctggacacgaccactccaagagacagcaaccagaggatgctgattgaggagaaccttttcgggcgggctgccctgaatgtcatcgcgtgcgagggcacagatcgggtggagcgccctgagacgtacaagcaatggcaggtgcggaatcaacgagcaggcttgaagcagcagccgctgaaccctgatgtcgtgcaggtagtgcggaacaaggtcagggatttataccacaaggactttgtgatcgatattgatcaccactggctcttgcagggatggaaaggccgcatcctctatgccatctcgacatgggtggcaaatgatgccccctcttacttttagctgtttttttgtgactcacttgtctacaactttaggggccagtttggtacggcgcgtgcggcgccacggcgtgcctaagctgcggcgcccgaatcggccgccacacctgcggcgggaaaactatggtgcgccgtggcggcttagtccacgcaccaaacagcccctaggtttaggtatgtcatctagatatatctagtgacaagcgtgttcttggcctagttaatagccatggttacttggactctgcagtatgcctagtgccctagtgagaattcaacatgtacctgttctttccaagggtacattcagcttctgtggaacatgagtgacacacgggggatccagaagtcagaaggcataccgaaatctgtcctttgatttaatgtggattatatagatgctcatcactcagccatgctgttgcatagtgctaaatatgatctaggtcctggtctggataatgttctccacagcatctgctgtgcgtgtgacctgtgatcagttcagtcagttgaccaggttgtaattgacacttgttcctctgtttccggcgcttactgcgctgtttcagacttaaccatggctattatgaagtgatgaagcgtgggggttttttgtctgtctactttatcgcacatgggggagctctttccaggatttatatgccatgtgtttgttgatgtacatgattcatgttcaatgagttgaatcctctttccagcctgcatactggtttgtcgcggcgaggaaattattattatgacagtttatgaactgtggctgatgaattgttcagtaatcagtcgtgctgtttggttcacgaaatgtaacgtaaattgtaacggtaatgattcacattcgattcgagtaccagtggtaacaaatttgaatatgccgatattagttcttagtgtgatttagtttctagtgtgatatttaattacggttggtcacaaacaaacatgatataacgttattagttatccattacgttacaaatatgtgagctaaacgacaccttattaggctgttattaccaggattgcaattatctcttgctgtactgtctctgcgttttcaggctacatatggggttttgtgaggcccatgctgtcttgtatgggagctctctcca

SEQ ID NO: 1914 - DNA, 2651 bp, Zea mays
gcccaccgggcagccgtgagagattctcccgaaaatacccccccgtcgcgaacgggttatatatagcggggcgccgcacacccggcggagcacggcagtccgcaccgcacacacacgcacaggcagcagcacagcgatctgccttctgctgtgccccgcccccatccagcccagagcagcagcgcgcggtgccggccggcaaccgcagctggtcggtcatcaggtctctgggcctccacctcctccttccccctctcaaccctccccgtgtcgcctcctcccgaatcctcacacgtagccccgcgcgccacctcgctgccggccgccggcacacagatatagagagagagagagagagagagagagactgagagagagagagggaggggaagcgaagagaccagaacaagagcgaagatggtcggactcctccccgagaccaatgccgcggcggagacggacgtcctcctcgacgcctgggacttcaagggccggccggccccgcgcgccaccaccggccgctggggcgccgccgccatgatcctagtggcggagctgaacgagcggctgacgacgctgggcatcgccgtgaacctggtgacgtacctgacgggcaccatgcacctgggcaacgccgagtccgccaacgtcgtcaccaacttcatgggcacctccttcatgctctgcctcctcggcggcttcgtcgccgactccttcctcggccgctacctcaccatcgccatcttcaccgccgtccaggcctcgggcgtgacgatcctgacgatctcgacggcggcgccggggctacggccggcgtcctgctccgcgaccggcggaggcgtcgtcggggagtgcgcgcgggcgtcgggggcgcagctgggggtgctgtacctggcgctgtacctgacggcgctgggcacgggtgggctaaagtcgagcgtgtcggggttcgggtcggaccagttcgacgagtcggacggcggggagaagcggcagatgatgcgcttcttcaactggttcttcttcttcatctcgctggggtcgctgctggccgtcaccgtgctggtgtacgtccaggacaacctgggcaggcgctggggctacggcgcctgcgcctgcgccatcgccgcgggcctcctcgtcttcctggccggcacacgcaggtaccgcttcaagaagctggccggcagccccctcacgcagatcgccgccgtcgtcgtcgccgcctggcgcaagcgccgcctccctctccccgccgaccccgccatgctctacgacgtcgacgtcggcaaggccgccgccgtcgaggatgggtcctccagcaagaagagcaagcgcaaggagcgcctcccccacaccgaccagttccgcttcctggaccacgcggcgatcaacgaggatccggcggcgggggcgagcagcagcagcaagtggcggctggcgacgctgacggacgtggaggaggtgaagacggtggcgcggatgctgccgatctgggcgaccacgatcatgttctggacggtgtacgcgcagatgaccaccttctcggtgtcgcaggccaccaccatggaccgccgcgtcgggggctcgttccagatccccgcgggctccctcaccgtcttcttcgtcggctccatcctgctcaccgtgcccgtctacgaccgcctggtggtgcccgtcgcgcgccgcgtcagcggcaacccgcacggcctcaccccgctgcagcggatcgccgtcggcctcgcgctctccgtcgtcgccatggcgggcgccgcgctcacggaggtccgccgcctccgcgtcgcgcgcgattcctccgagtccgcctccggaggcgtcgtgcccatgtccgtgttctggctcatcccgcagttcttcctcgtgggggcgggcgaggcgttcacgtacatcggccagctcgacttcttcctgcgcgagtgccccaaggggatgaagaccatgagcacggggctgttcctcagcaccctgtcgctgggattcttcgtcagctccgcgctcgtcgccgccgtgcacagggtcacgggcgaccgccacccctggatcgccaacgacctcaacaagggccgcctcgacaacttctactggctgctcgccgccgtctgcctcgccaacctactagtctacctcgtcgccgcccgctggtacaagtacaaggcgggccgccccggcgccgacggcagcgtcaacggcgtcgagatggccgacgagcccacgctccactgatccatccatgttcgatcgatcgacgaggcacgcgacggacgaccctaaattgaaccctatacaccgagcttaattatatatccgtccgatcgtcgtcggtcagattcattgctagctccgcgtgttgtaccatcgtgtcagtcagtgtatacgagtgtgtatcttttgtatccaagtacagcacgcgcgcgtgcgtaagcgtgtagttataaaaattaataacatgtttcttagaggagtgaggggggaattgtaaaaccgcttgtcaattgggctaagatcgttcgggacactgagcaaactcagaatgagttaagtttttcattttcatataaccaaccgtctgtgtgctagtacttgacacctttaaatgatttagggtcgaataaagtctatctttagagaac

SEQ ID NO: 1915 - DNA, 1731 bp, Zea mays
cccacacgtaagccttatggcgaggattcgtttccctaccgtctcggctcttggtctcccccggcttgccccttcctcccctgttgcacacctctttcttcctcgaacacgaattctgtgccccaccccgacgctacctataaatctcatcagcacaccccgaatcccggcaaaacccaccggcagaagctaagctcgctccgcagcatcggcagccgcgatgatcctccgcatccgcagccgcgacggcacggaccgcatctcggtcccagactcggcgtccgccaccgtcgccgacctgcagcgcctcattgagtcacatctcaccgtgcccgtcccgctccagcgtatctccctcgacccggcactcctgctccctaacccatccgccgctgtcccactcctcgccgacccggcggcgccgcttgcctcgctccgcctcgccaacggcgccttcatctacctcgcatacccgcccgacgcgcgctccgcccgcccgacgccgcccaaggtgctttccgccgctggctctttcggcaagaagatgaccatggatgatctcatcgcgcggcagatccgcgtcacacgccaggagaacgcgctctgcgccgccgcctccttcgaccgcgatgccgccaacgcgttccagctttacgtcgccgagtatctcgcgttcgccgtcaagcgggcgggcttcctatacggccgcatcgacgcagagaccaaggaggtcttggtcgacttcatctatgagccgccccagcagggcttcgaggacgtggtccatctcatgagggatcccgacgaggaggcccgcgtcgataccattgccgaggggcttgggatgcgccgggtcggcctcgtgttcacgcaggccgtcgggaggagggccagcaagactggtgagtacactatgtccaaccgggaggttgtgcaggcggcccagctgcaggctgagggcgggaccccggagtgggttactgccatagtcaaattggaggtgggggatgacggcactggggatgtgcacttcgaggccttccagatgagtgaaatttgtgtcaagctcttcaaggatggggtactggaaactgaggttcaggatgctgatgatccccgtctgtcaaagatgcggaaggaggtggtggctggggggaaggatactatgaaggtggataatgacttcttcctcgtgcctgtcaagatctctgatcaccagggtccactctcagtaggctttcctatagagaaccgtggaagtcctgtaggcatgagtgcgttaagaagtcacctggagcggatgaagcatttgacatttgtgaggcggatttcggacttccatttgctccttaagcttgctactttcctagatgcaaagtcagacatgcctactatagctgcatgtgtaaaaactcagagcaggatgcccgaggggtaccagtttctgatcgagtcctttgctagtcagggataatattgcctctgaaagcatgacacacgatgcataatttatttacctatcacatcaggcgtggttcggttattcttaattcatgtggattggaaggtatcaggatgaattgatatagattttgatttgctatagatttaaaccaatttaatcctatccaatttatatggattaacctcaaaacgaataagcccttatgtgtaacttatggatgtctcaggtgtataagtattgttcaatgcaatcacttttcgatagca

SEQ ID NO: 1916 - DNA, 1239 bp, Zea mays
atggctgggaggaccgcgcccgcctccctcccctccttctccctcacgcccgactccctcgctgcccctttatcctggatctcgtcatggacgctaccacgaccaacgattgatatcatgtccaagttcttcaagctgatggtggttctacaattaatgaatgatttgaacgaagtgttcaagatgccgctatctcttgtattgaggcttatagtgtgcttgaggttcttcgacctctctataattcccctaagatactggaacaaaaggatcattgcgtctctgcgagctaatcagttctgtgagcgtctccctagccccaatggcgagtcaactgttgattgtcatcagatctcaaagatgccaaatcttgcattcaccattgcaaacaagactttcaccttaacaccagagcagtacatagtgaagttggagcaagcaggacaaactatctgcatcaatgggtttatggcatttgacgttaaacatgaagaagtcatcgggctcgggctcggtgtcgttggcgcggagcatcccggagctgtacgaggagaggggagccagcaacctccgggagttcgggttccaggagctccgggccgccaccagcgacttcagccgcctgctcaaggtcggcgaggtggcttcgggagcgtttacaagggcgtcgtccgccttcctggcgggcccgccggcggcacggtagttgccataaaaaactcaatcccaatggtcatcagaagttcaaggttatctcattctggcatatctcatttgcctgctgatgaagtgaagcctttggttaaatatgataatgatgaagatgcacactcacctggtggccgtggaaggggtcgtggtggtcgaggccgtgggcggggcaggggcagaggtggacgtggaaatgggttcaatgagtatgctgatgctggttgggaagacgatcacgcccctgcatatatgggcaatggatatgcccgcggaagaggtcgcagtttcaggggccgtggtaggagaggcgacgacgataaccagcctgaataccaacatgtcggaggtttcaaaggcatgagagtgatgagggtcaaaaatctgaacctctacgcttttggtttatatatgcaaccaacttctatccgtgagaagttgggtcctaagtatgcttcatttccaactgacaagctgatggagaaccctgatttctatagtaatcttctcagatcaaatctcctctcttag

SEQ ID NO: 1917 - DNA, 1961 bp, Zea mays
agcagccacgacacgatcacgaattctaatcaaacgattcaaactaacacaaccgactcgcgtcccccgtacgtccccgcaccagtgcagcacctcgccaccagccatgtcatggtcgggaccagaactggcggagtggtcgcgtgacggccaggaagcggagcaacagcccaagtcggagcctcggcgcaagtcatggtcggcgccagaactggcgcagtggtcgcgtgccggcaaggaagaggagcaggagcccgagccgtcggagcctcagcgcaagtgggtggccctcgtctccgttgtcgtcctcttcggcagcgaggacgagcgggcccaagagatcatcctcggcaccgacatgctgatggtcgacctcaacgacccgccgctgccctcctacctggtgcttcacccccgcatcgcccccaatcccaggcgcaccaacgagccactgtccgcctacatcctcgccgccgaccgctccggctacatcctcctccaggtcgtcgaaggcaaccgcccggacttcttcctctgcaacacccacactcgtaccgtcaccattctccccccgcctcctatacgcaggccagccacggcgtcgacatcctccccgaactcagcatgggtctaatagccgacccgcagcgcagcggccagttcgtggtcgcccagctccaccccaccatctcctaccgcaagcccaacaagctcctctacttctccaccgccaaaggccggtggttcgtcaggaacctcacccgggcgcggcaacgggtccgcatgcacaaccccaacgagatcggagtggttgcccacgacggacgcctctggtggttcgccccctcctatggagtgttctgctgcgaccccttcacgcccgtcctcaagtgccctgagctgcgcttcatcccgctcccggccaactccgagatgttcgcggccacgtcgcctttgaccccgtcgtcaggcccctcgtcataaaacgccgctgcgtgaggcccagcgagggcaagctgcgcttcgtcgagatccgcggcctctcctacaaagtgcccgtcgacgagtctaaccccaccgtatggatgtggacgctcgatgacccggagggcccgaacccctggacattcgagtacgaggtggccttcgcggaaatctggaaggacgagacctacgccgccgccggcctgcagccgggcgaggtgcccgacgtcgccctcgtcgaccccaacgaccactacgtcgtctacttcttccagggctcgaagctcttcggcttggacctgcgcgagaagaaggtcgtcgcctgcgaggaatgcctgatagaccgcgatcgactcgagtaccaatcctcccgccccatcgtcgacgcctgggagctgtcgccaccgccacccattctttcgggcgatgacgactcttcgacagacgataaagatcggtcgagacaggcttacgccgagaaaaagaagcgcaaggtggcggagtccgttgactcttggctaaactaggcccggttggagtggacgagggacgcggacgtggacgcgtcgaactggaggacatggaagatggcgcctccacaatttgatgaatcacctatcgacatggaaggtggccaagctgatgatgagccggagatacagttccccccttcttctccctagctaggtgaggtgagacagagagcccagagaacccgattcgtcgtgtcaacaagaatgcatgtggaggcttctttcgatcttgcgtttcagatagacgattgagcctgcagctttgcgtcacggacaatctcacatttctcatctgagttgatgaaagccaaccgaacaatcacacgggggccattgttatcgagatgtagctctattctttttttttaatgattgcctgctgatacaagtggtactcagttttgattctccattgtcgtcctgtcctgtgtgcatgcttttctg

SEQ ID NO: 1918 - DNA, 835 bp, Zea mays
tggggaattgcatattgtgtcaagggtgggtccagaaaaagagctaaaagcaatacaggtgcgctacttttttttctcccgtgttctgcagttccaaaaaaaactagaattacactgaaattcaccttcatttcagtacttggagagaagagagtgtgagtacgaccagaaaatatccattgatttctacaaggtatgaacagttagctttgaactgccttttctttcagaactctcatgtttccttgatgcatgttcaggaaggagatcccttgaaaccagctgtgacgggcgtcttagtgttcgtttccactccagatccaattggcaacaagtactatcttggccctgctcctctgcaggatatggcaaggcaaattgctacagccaatggccctactggctataatagggattacctgttctcaatggagaaggcattagccagcattagccacgaagatgattcgatcatagagcttgcaaacgaggtgaggaaggtgctcaacagaacaaaggagaccaagatcactggtgccaatgcttccatgaaatcacatgcccctcttgtgcacctgtccgcgcttccagaaggcaccgttgtggactcgagatagcgacctctactcggaatttactttcagctcttgcatgtttgtggttgtggccatcatgtactgattttcccttttcaacagttgtcgtgaggctgtatcgtctggagtaaaaaaaaaaaaagctaaaagccggcactaataatgatattaacttgaaaaagctatcggcgatccttgaacttggaggaccccccccccccccccccccccccccccaa

SEQ ID NO: 1919 - DNA, 3407 bp, Zea mays
gtgatccctcaccctctgcctcctccagtccagcttgccttcaaaacaaaaagggtccaaaccaggctacagttacagctgcacggctactgcacagccgcagcgcccggaccccaaacggctactccgatttcaaatcccttccccttctcccccccggcttccaatctccaccgcgctccctcctccatctctcgcctcgccgcgtccccttcctctccacgggctcccacgaaccatagagctcgcccgtctacggagcacgggctcaccagcagcggatccccaggtcgtacctgctcccgaaaccctagctcagctgatcccacacacacaccccgatggcgccgccgcccaccccgcctacacgtccggcgccggcgcctcaggccacgggcgcgaccgcgacgcccctcaggacgcccgcgtccaagcaccgtctccacttccccgccgccaccccgaggaacgccaaccacggcggcgccacggagcacccggtcgaggtgatcggccgcatccggaacctcgcctcgggtgtctcgtccgcgctggagttcgcgggcggcgggacggccgtgcgcgtgcgcggcgacgccggcgggtgccgcgacttcaccctcgacggcgtctccgtgtcggaggaggaggacctcgaggggttctaccgccggttcgtgcgctccaggatccagggcgtccgggtcggcgccaagtgcaccgtcatggtctacgggcccacggggtccgggaagagccacaccatgttcggctgcgccaggcagcccgggatcgtgtaccgtgccctcagggacatcctggagggaggcggaggtagcgaaggcgactctgcagaggatgacgccggcctcttcgttcaggtcgcggtgctggagatctataacgaggaggtctacgatttgctcgtgggcagcggggccgctgctaaaggaaacgcccccaaggcgagactagaagtaatggggaagaaagctaagaatgcaacctatatatctggaaatgaacctggaaggatatcaagagaagtttctaaagttgaaaagcgaagaactgtgaagagcacactttgtaatgagagaagttcacggagccattgcgtgattatcctggatgtcccagctgtgggaggaaggttgatgcttgtggacatggctggatctgaaaacatagaagcagcaggtcaaacgggatttgaagccaagatgcagacagcaaaaatcaaccaagggaacactgctttgaagcgagtggttgaatctatagctaatggtgattcccatgttccatttagggacagcaagctcacaatgctactacaggtacactactacaaaaatctacatttgttgatacaacctctcctctctagcgacgatctaaatatttcctttattgtatttcaggattcattcgaggatgacaaatcaaaaatcctaatgattctgtgtgctagtcctgacccaaaggaactgcacaagacagtttctactttagaatatggtgccaaggcaaagtgtattatccgtgctgctcatgccgcaacacctagggacaaaatgagctccgaggagtcatctgcaatgctcaattcaagaattgttgcaatgaaccagttcatccacaagcttcaaaaagagaacaaattgagggagaaagagcgcaatgaggctcgcaatgtgctaaagctgagggaagaggagctagcacaattaagagcaaagctcaacttgatagaaaggcagggaaaagctactgagaatgagatcaattcaaaagttatggagaaaacccagacattgaggggtgaactcatgaagatggaagaagcgatgtataagcagcagcaagagctctgtgtgctaaggcagcgactgcaggaggttgagcgtgaaaaggctgatagttgtcagccagggcagcaggatgtaattggaggtagactgctggcacggctatcagagatgcctgcaggccttgatcaatcaatggcaatcgacatgtctatggacttagatatgggagatcagacgtccatgcaagatgtcaaggtaataaaggaggatacttgccagcagggccaaatatggaatcacacaaccacagcagcaagtgcttgcacagggtctttggtgcaagaagatgatgtcaggctgtccgggtatcctgaaaagactgtcctcagcactgtgtttgaggagggagatgaagattatgcagagaagaaatgtggccttcaagaggaggtacgcaaggaggttgtagatgagaactttaaggtggacatagcacaacatacactttctgagccagatcatcctgcaacaaggaagcatcatattgagaacatgttcaggctctgtggcaaccatcgtgaaatagctaagaagccaaaggttcagtcaccagcaaaggaaatgttctggaatgagaaccagtctccagcaaagcaagtgtttgggaatcagaacaaatcaccagcaaacaaaatttttggagacgaaaacaaggagccgttggcatggggagctatagagacccccatgtgtgacgtcagagtgactgacagcccagtgtcttctcagctttctccaatcgtatgccaagttgtggatgcgccattatcggcgcaaccggatacatgcagtgcagtggaagagagtgatccgaacaaggagaacagccttgctggacagaaggatggcggcctcttggaagtttacataaaatgggagtctggcaacctgatcaaagggctgaagctactgcacaactcgtgcctttcagatctgaggaagtttatagaggctcacttcgaagaagcaggcagcaaacagaagcatcagttcaccttccttctcctcggggatccgtccggtgctccggtgtcccgggacacggaagcttcggtgcagataagcaggctgcctcactggaacaaccagccggacagctacctggcgtgcctgcgcgcggccaagaagccgtctgcggaccacgtgcccttcagcccgctggacagcaatctgaacacggttcacctcgccggtgcggtgtcgcccaaggtcaaccagatgagccccagctacatccgggagctgagagcttgagctcccgtggtatctgttgcttgtccctcgtggatcgattatgttttgtgtaagatttgattgctagtctggtttgctaaccggaactactgcaacccgtgaccaagataattgcagcgaggagatgacaaatgccacctctccaaagttgtgtgcgctattttctttaccgaaaattgctggcaggtcgtctgccagacaatattaatagaggagataaaaagagctaaaaatgcaagcctaagaaatacaatggaaggcccaaacgagaaattgccc

SEQ ID NO: 1920 - DNA, 1035 bp, Zea mays
atgtcgtcgtacagccacagcacgaagaatttcttgggtttcttgcttggagcagccgtcaccgcggcctgtatcctgctgctactgccgcctgctccgtgcccctgcggcgtcctgccggcacagcaagaatccgtcgtcttgggtaacggtaacggaactcaagctgatcccagcatgaagaagcttcacatggccggcaattcaaccgaccacgagctgctggagctactgaagcgagccgccatggacgacaggaccatcattatgaccttcacgaacgaggcgtggacggctcccggctcgctcctggacctcttcctgcagagcttccgcctgggcgtaaggacggcgccgctgctaaagcacctgatcgtcgtcgccgtcgacgccatggcgtacgagcggtgccagcacgtgcaccggctctgctaccacctccgcgtcgacggcgtcgactacgcggcggagcagtcgtacatgcagaaggactacctggacatgatgtggcgcaggaaccggttccaggcccggatcctggagctcggctacagcttcgtcttcacggatgtggacatcatctggctgcggaacccgctgctgcgcatcccggtaggcgccgacatggccatgtcgtgcgatttcttctacggcgacaacccgtacgacctgaacaagctggccaacggcgggttcgtgtacgctaaggcgaacgcgcggatggtggcgttctacgggagctggtacgagtcgcggaaagggtttcccggcgcgcacgagcagtacgtgttcgaccaggtgaagcaggagctgtcggcgcggcatggcgtgcgggtgcagttcgtggacacggcctacctcagcggcttctgcgagctccgcaaggacttctacagggtgtgcacggtgcacgccaactgcctcgtgggactccaatccaagctccagaagctcacccaagtgttcgacgagtggaaacagttcagggagaaggccgcgctgctgggcagcaacaccaccgcgctgacggactga

SEQ ID NO: 1921 - DNA, 1281 bp, Zea mays
tcacccatcggaaagcgtcagaaagtggctagggttagccgccccgctccctgctcgcggcatcgctcaccgctcacgctgccctgcgacctgcacctggtgttcttcctgttcgtggcggcgcccagcgtggcgtgcctggcgtgggcgcgacgagttcggctacggctcccgcgtcgcctacttcatctccggcacctgcgacgacgacctcgccaagctgctcgaggagtacgacgaggagtgctaaaacagctcgctgttttgggatttgccgcctcaagtttcatctagctacctcgaacaaatccttcaatctccatggctacatcggacaagaaaacaaggggctatgttccttggaatgatgagatggataaggtactcctcgatacgtttgtggactattacaataaaggtgatagatgtcagaatgggtggaagtctcatgtatacacagctgttgtgaagaatgtttgtgagaagtgcaatgtcaccattacaaaggaaaatattagctctcgcagcaagacctttgataagcactacaatatcattaatggtttgttgtccactagtggttttggatgggattgggagaagaacaagctcaaagttgatagtgacactgtatgggatgagtatattgagaggaataaggaagcaaaaggatatagacataaggttgtgaagttttgggatctactgagcctagtgtacaataaagaccaagcaaatggagagggtgctaaaacagcagctgaaagttcaaaggaaatggcaaaagagaatgataccggaggcaaggatgctccatattctgtatcttcctcgagtagtttaaaaagacaaagatcagatgattcatttaactctatatggtgtgataagtttgacatgcttacatctgcattgaaagatgatggtccaaagctaccctcttctgccgaagttctcgccgcattacaagaggttgaaggacttgacgaagacacagaacttgagctttatgacatcctcacctctaatgcacgcaagtttgagtcaatgatggcactcccaatggaaaggaggaagaggtggcttatgatgcagctaaggaagtgaaacaccttatatgtgaacttagatctctgtgttgaactgattgtgtgaacctgtctttgtgaaacttttgtgtgcgaacttgttggctatgtgaaactgttgtgtgcgaacttgatggctttatgaaactgctatgtgaagatttgatgtatttgtagaacttttatgtgcgaa

SEQ ID NO: 1922 - DNA, 1877 bp, Zea mays
cgtggcgcggaaagacgctcctataaaaccgccgctcagtttcaaagctctcgtcgccgccaccactctcccagcctctcttactctccgccgtcgccctgctcgcccgaagcagccgccggcaaaatggccccgaagagaggcggtagggcgccggtccccgccaagaagaaggcggtggtgacgaacccgctcttcgagaagaggccgaagcagtttgggatcggcggcgcccttccgcccaagaaggacctccaccgcttcgtcaagtggcccaaggtcgtgcgcatccagcgccagcgccgcatcctcaagcagcgcctcaaggtgcccccggcgctcaaccagttcacacgtaccctcgacaagaaccttgcaacaaacttgttcaagatgcttcttaagtaccgccccgaggacaaagctgccaagaaggagaggctcttgaagagggcccaggctgaaaacgaggggaaaactgttgagtcaaagaaaccaattgttgtgaagtacggccttaaccatgtgacttacctcatcgagcagagcaaggcccagctggttgtcatagctcatgatgttgatccgatcgagctggtcgtgtggctcccggccctttgcaggaaaatggaggttccatactgcattgtcaagggaaaagcacgccttggatcgatcgttcacaagaagactgcatctgttctttgcttgaccaccgtcaagaacgaggacaagcttgagttcagcaaaatcctggaggctatcaaggctaacttcaacgacaagtttgatgaggtcaggaagaagtggggtggtggtatcatgggctccaaatcacaggcgaaaaccaaggccagggaaaagctgcttgccaaggaagctgcccagcggatgacctaagtcttgtcctgttaaattaaaattttcgtgtacttgcgatcgtgtgcaatcacggtggttgtcagatctagtttttgagagttttgcttcagggagagacaccgagtcaccgaccatgacagaaagacatcatgtaagaattcaaagttttggttctgtaccatctagttcatgtgaatcatcttctatgatggctatgatgtttatgcgcatagctatttcagaattaaatgtcattttatcatgtattgccgcctgcaatttgcatgatttgacttcctacagtacgaacgaatgtacctgaaggttttcctccaagctgatgaaatggccagatttctgctgcactgtacctgctgtaatgtaatgagatttatgcacttgtaacggtatgatatttaccatgcgactgatatgatatttacaatgctgcttcactatttcctaacctacgtgagattttatatatgtacaaggcccagggctttattatgttcttcgattacggtttacgagtaggatctgatgagtctcaggccctggaacgagctcttgagcaggctgccaaggacggacaccgcgccgccctcggcctcgtgcttgacgggcgcgtcgtggccgccgcgcttcaccctcagcacggcgtgcccgagctgctcccccaccgcgtccatggtcctgccgtcgacggggttgccgtacgcgtccgacacgtagaacgtgtcctcggccttgccgtccctggtcgtgatcgccgcccggatgatggagaggctgttctcccggaacacgcgcgtgatctccgacagcagccccaccctgtcctccgtccacacctctagctccagcccctgctcagtcgtgaacagcaacgatgttactagcaagaggccatgctggtgggtcgacgaacgagggagatcatacatacgttggacgcgcgcctctcgacggcggcctctaggcaccggacgagg

SEQ ID NO: 1923 - DNA, 1062 bp, Zea mays
catcaccataaattatccaaggaatcccggggacgacgccagagcggcggagtgggtgacaagcataacttaaaccaactccaccaaaacttaccaaatcgcttttagttagcacctgcatgattcgcttcgcagtcctatataaccattgatcgctccaagtcaccgcactcagtggtgcccacagctaaagccttgtgcaaaattatcattaagctgtcatcaatcatcatggctgccattacggcaggtctgctggtactcctcgctgctgccgtcgccgctccggcgcacgccacggactacacggtcggcgactcgtccgggtggagcagcggcgtggactacgccacctgggcgagcggcaagaccttcgctgctggggacaacctagtgttccagtacagcgcgatgcacacggtggtggaggtgagctccgcggactacggcgcgtgctcggccagcaactccatccagtcctacagcgaccagaacaccaagatcgcgctcacagcgcccggcacgcgctacttcatctgcggcaccccgggccactgcggcaacggcatgaagctcgccgtcacggtcgccgctgggaccgccaccaccaccccggcgtcatccccgcccgccgctgactcgcctccagagacagccacgccgtccgggtctacgcccacggcaacgacgtcgccgtcggcgcccacgacgaagcccacctcgagcagcactggcgctgcctgcggtggggaggcccggctcgctatgggcgttttggcctgggccgcgggcctcgccgggctcgccctgatgggttaggcaagaggcagtgctgtttccgttccatgcttttcctgttgcaggcttttgtggcccgttgtgtttaatctgaattcacgtctatggtctatgctcgattctggcttgttcgagactcccgctgtatacatgtacggctatccttgaatccttcatgctggacctgtcccagcggtctgcaatatgtcatagataacgatatgctatggctatttaatcgttctaggatgtgtttaaatgcac

SEQ ID NO: 1924 - DNA, 2220 bp, Zea mays
cgcagcacgtggacgcgaagccttgccgaaagttttccctacgcgttcgcaagagctcgtaaccatcacggcctccgcttctccattcgatcccatataagcctccgccacccacagagccacgcgtcgaacggaacccagaggaacagagcagacgacgcgaggcgatttctgcgggtttgcttgctccatctgtagaccttaggccgccgccgggcgaccgtgcgcgtgcggtgctcacgccccaccccgctcaggtgaaggcacttcaagatgggcgaggtacacgaagctgacaagaacattgagatctggagggtgaagaagttaatcaaggcacttgatgctgcaaggggcaatggcactagcatgatttctctgatcatgccacctcgtgatcagattgcacgcgtcactaagatgctgggtgatgagtacggaactgcctcaaacatcaagagcagagtcaacagacagtctgtgttggctgccataacctcggctcaacagaggttgaagctttacagtcgagttccccccaatggtttggtgctctatactggtaccattgtcaccgatgatggcaaggagaagaaggttacctttgacttcgagccatttaggcccattaatgcttccctgtatctctgtgacaacaagttccacactgagtccctgaacgagcttctgacgtctgatgacaagtttggtttcataatcatcgatggcaatggtacactgtatggtacactgagcggaaacagcagggaggttctgtacaagttcagtgttgatcttccaaagaagcatgggcgaggagggcaatcagcagtccgctttgcccgcctgcgcatggagaggcgacacaattacctgcgcaaggttgctgagcttgcgacacaatacttcatcaatcctggcaccaaccagccgaacatcgttgggcttattcttgccggttctgctgacttcaagagcgagctgggtaaatctgagatgttcgatccacgccttcaggccaaagtagtgaagatgattgacgtgtcttatggtggggacagcggcttcaaccaagccatcgagatgtctgccgaggttctttctgatgttaagtttgtccaagaaaagaagctgatcgggaagtacttcgaggagataagccaagacacagggaagtacgtccttggcatccaggacaccatcacagccctggaaatgggcgcggtagagatcctgatcgtgtgggaaaaccttgatgtcaggcgttatgagctcaagaacagtgccacaggagagacagtcgtgaagtacctgaacccagctcaggaggctgaccagagcaacttcactgacgaggcgacatccggagatctggaggtcattgacaacacgcagctgctggagtggttcgcggagaactaccaccagttcggctgcacgctggagttcgtcaccaacaagtcacaggaaggttctcagttctgccggggattcggcgggattggtgggatccttcgctacccagccgacgtcagtgcctaccaggacggtgacttgtctgatggggagtatgatgaagacttggaatagcaatcaaccagaactcaaatgaatccggtccgggaggagcctgcgctggcccgggccgtgccgggggggggaaccctgaaacttccaaacgatcggtgcaaggagaccatggtggaggatctgtagggaaggaggcttgagcaacttatataggatatatatatggaagcttgtcaagctggtgagtggtgactttggagacggtgttttgctctgttgatccgagcttgcagtctggtgctactaggaatcagccgtggacgctgccttctgttggtcaggagagcctataatcgatcaactagcatcctattagtattgggttggtgccagtagtatggtgaataaaatacctggaggactcccgaggttgcacgttcgctttatgacgtgcgtgatatctatgattgtgaaaatgtctgtgacctgtcatttcttataatccattctctcgttgttgtggattgaggcaatattttgtggatgtcattgggtagtaacttctcgcagagcaagtgcagtaggatgatgtgtgaaagaggaacagagagagaagaaaagccagatgttaatgaacagacttgacattttgtaagaaaaagaggtggatctaataagagtacggaagtg

SEQ ID NO: 1925 - DNA, 946 bp, Zea mays
atcagctcggggcgcagagctttgggaattccaagcagagccagcacagccacagcccacagcccacagcccgggaggagaagcgagcgcgcgatccagttggtggccgcccccgcccgcacaccatggcgacgccgtggtggtggccgtcgctgctgccggcgtggctgagctccagcgcgctatggttcctcgtcgccaacgcggtcgtcgccgcggtcgccatcctgtccaggcgcccgccgctgccgctgccgctgccgctgccgtcgccccgccgccgccgccgcagcagcggcgccgccgccgcgctcacgcggagggcctcgtctgcgctgctgcagcgcctccgctccttctccatcttcgccgtcccctccgcctgcttcaacaccaccacgccgtttccgcaccccgacgccgcccaaggaacagaaactgaggcgccggccaggacaccggcgtcccctctctcgtcgctgggccgcgcgccggcggcagacgccgacgaggaggatagcgagcccggcgggatgagcatggacgaggcctacgcgctggcgctggaggcgcgccgccggccggaccgggagagggaggaggcgcccaggaggtccgaggtggacgccaagcccgaggagttcatccgcggcttcgaggaccaccaacgccagcagcgcctcaactccatcttcaactacacccagatgctcaagcagcgcgccgccgccgcccgccgccagcgccagccggatgccccgccagatcagctttgagtcacgtgttcggttcgttcgttcctgatattggtcagcgttttcagggagaccaaaatcagttttgagttgctgtacatagcctgctttcaacagattgtttgtatatagtcaccagatatgatttacagataaagtacgacataaagatatatcttgatcgtttataa

SEQ ID NO: 1926 - DNA, 880 bp, Zea mays
aaaggcctagaccgctcgtgccataccccaaaaccctaccaaatccagtggtttcgttctctgcggccgcacacgacacgaaccctcgtgattcctgctcgtcgaccgacaatggcggactccggcctcatcgacgtccagaagctgctcaccgacgtcgtcgacaagctgacatcgctcgagaccaagatgacgacggtcgagcgcgagctctgcaccgtcaagctcgatcaacggcgcctccaagatgccgtcgaggctgggaagcaggccgcgttccccggagtactcgagctgcgtttaccggagtacgacggcacggacgaccccgccatatggctccaccgcttcgagctgttcttcagcctgcagcggaccgaggacgacgacaaggtgtgcctcgcggccttccacatgaccggcgcggcgcagatctggtactccttgctcaagcacaaccgcggcgtccctacctggccgcagctcgccgagtcggtgcgtcgccgcttcggcgccccgacgagcgggtacgcgctccgcgagctcctccggctgcggcacactggctccgtcgcggagtaccgggacgagttcctgaggctgctggacagatgcgacggcgtgacggagccgctgcaggtggccttctttaccgccggtctccgcgatccgctgctcaccgacgtggagctgcggcaaccggcgaccctggatgacgccatgtggctggcctgtgcgctcgaggcctcgagcaccggtaagaactagggaaccagggtgtcgatcgaatctacacgaatattactctcccatatttgatttcatactttcactcgtgaatcagataatatggatattatcggcttgtgttggagaagat

SEQ ID NO: 1927 - DNA, 315 bp, Zea mays
atgatggaccacggtggtgaagaggcagtagccatcaacgttgacctatttgtcgtggtcgaggcgaaagaccatgggagtcggcgcccgtggaggacttccacgcgatgccccgctcccagatctggtggaggtggcagaggggagggggcgaggagaggaagcgagtggggtgcagcgaccgacggcatgtcgtccatgacaggggtgggtgacagtaggtgcgtcgtgtgtggtggggcgggcgcagcggttgccgatgccgagggcatcgcccgagcggctaaggacaaggagctgtgtccaagggcgtaa

SEQ ID NO: 1928 - DNA, 870 bp, Zea mays
ttttctaattcaagatcccttcttctaactggaattaaagaaattagtagatctggtccgcccaaatgggaatgggtgctagggttatgaacttataatcatggaatcgactcgatcatcagatttataagttcattcccataccggaccagatcgtgcacattcttattatgagaaggggtcattcgagcctatggaaataggatactctgtttacatagaaatccctacgtccttacattctatttaggattaggaataggtgtaatcagacctgcttttgacatatctatcctatccttatttgggtaccatatgcacctctttgggcttctattgaatcgagaaattggattgtacatctttttgattttgatatcgattttgatacatataaggtgtcctacggataatgcaaatcgaagctatttgatgtctgactcaggcctatatgtatatgaccgatcgatcgaaatactccaagactccacctttgtcatatattccatatatcacattcgatagatatcatattcatggaatacgattcactttcaagatgccttgatggtgaaatggtagacacgcgagactcaaaatctcgtgctaaagagcgtggaggttcgagtcctcttcaaggcataatacggagaatgctcattgaatgagcattccccgtagaagtattccggaaatctgcgcctggcgctctcctctatcttctgaggtccttaaccatctccctgagaaaagtagacagtaaaagccaaaatagactaaatatagcctgaatgatcctaaaaacccctcgaaggagataataaagaacctaaagcagacggtatcctactgcaagggtttcgaaatcca

SEQ ID NO: 1929 - DNA, 2383 bp, Zea mays
gtcagcccccagccgttaaaatctcccctcgctgcctcgccgtctggtggtccctgcgggagccaacaaagcccaccaccctcccgctaggcgctagcccaccccttttattctccctcccttgacgagcaacggagcaggcgctgcaggcaccggcaccaccccggcggcggcgctgcattattcccacctggccaccgtgcccccccccccccccccccccccgcattgcgtgctaggtgtcgtcacgcctgctgctcgtctgtgtgttgggagcctgggtccacggtgtgcaaaaatcacaaccgcaatggcggtactggcggagctggggacggtgccggcggcgggctactcccgcagcgacgtcgcggcggcgctgtggcagcagctcaagtccccggtggtggtgccgctgctgcgggtgtcggtggcgctgtgcctggccatgtccgcgatgctgttcgcggagaaggtgtacatggccgtggtggtcgccgcgtcgcgcctgctcgggcggcggcccgagcggcggtaccggtggcagcccatccgcgacggcgacgacctcgaggcggccgccgcctaccccatggtgctcgtccagatccccatgttcaacgagcgggaggtgtacaaggtgtcgatcggggcggcgtgcgggctgtcgtggccgtcggaccggatcatcgtgcaggtgctggacgactccaccgaccccgtcgtcaaggagctggttcgtgctgagtgctggcggtgggcgagcaagggcgtgaacgtcaagtacgaggtccgcgacagccggcgagggtacaaggccggcgcgctccgggaaggcatgaagcgcgcctacgcccgcggctgcgacctggtggccatcttcgacgccgacttccagccggagccggacttcctgtggcgcgccgtgccgttccttctccacaacccggacctcgcgctcgtccaggcgcgctggaagttcgtgaacgcagacgaatgcctgatgacaaggatgcaggagatgtccctggactaccacttcgcagtggagcaggaagtcggctcctccacctacgccttcttcggcttcaacggaaccgctggcgtgtggcgcatatccgctttgaacgaggccggagggtggaaggacaggaccacggtggaggacatggatctggcagtccgagcaagcctcaaagggtggaagtttgtatacatcggtgacctcatggtgaaaagcgagctcccgagcacactcaaagcgtacaggtaccagcagcacagatggtcgtgtgggccggcaaacttgttcaggaaaacgctggtggagatcgtcagaaacaagaaggtgacgctctggaagaaaatccacgtcatctacaacttcttcctcgtgcgcaagatcgtagcgcacgccgtgacgttcgtgttttactgcatcgtgatccccacgacggtcctggttcctgaggttcaagtgccaaagtggggttccgtctatatcccaaccgtaataacccttctcagtgctgttgccactccaaggtcagctcacttagttgtcttctggaccctcttcgagaatgtgatgtcgctgcatagaaccaaggccactttcatcggcctactggaggcaggcagggtgaacgagtgggtggtgacagaaaaactcggtgatgctctcaggaccaaagtgccaggcaagaaaccccgcatgaggataggagacaggttgcacgttctggagctcggtgtcgcagcttacctcctcttctgtggatgctatgacattgcgttcgggaacaaccgctactacatattcttgttcctccaatccatcgctttcttcatcgtcggcattggctatgtcggaacattcgtccctcactagctagctcgtagcagaatcattctgagaggctacccatcctgatgatgcatggttgtcttcaaccccttccggtttcatttcatggaaatcagttggtagataagatcgagcaaaccttctcttgtatgtaatgttgtcatgggaaaaaaaagaaaatacagtgtaaaggcacactggcagacaagccatagatatgagtaggtatgtgtgttgttgaaggaatgtgctgtgatgcgcatggggggattggtgatgacaagcaggccgttttgagtctccatgtcacctatgcagaatcagctgtagaaaaaaaggtagcaaattgtggaagtcgaaccaattgttttgcaaacataaaaaaaaaagatgaatgtttgttggcgagttcgttgtgagaacattgtaaagttgtacatgttttgttgtctcctcttacccttctttatttgtttcccatgtttatatcaactataataaacagattgtatttga

SEQ ID NO: 1930 - DNA, 1503 bp, Zea mays
atggacgctggagggctcggcttcctcgtcgcgggctcccggcgcgagttcgtcgtcctcaacgtcgacgatttctccaagcaaggatcttcacagggctgtccagactatatttgtcagatatgtggagatgacattgacatactccaggaagaaaatgagtatttcgtcgcatgtaatgattgtgcttttcctgtttgccgcacttgctatgagtacgagcgtcaggagggcacacaagtatgccctcggtgcaagacccggtacaaacgccacaaaggtagtcctcgagtccatggggatgaggaagaagaaggttctgatgacattgagagtgagtttgcttccagtatagctggacgatcaaatatagtgcatccataccgtgtctctgtggcagaaagctccatcaactcatgggacattgatagtgtcagtatcaccaacagtggagctagtgtccatttttatgaagagcatgttggaactccaacaaatcatcatgctcttgttgttcaccctaacaccggagaaattatgcgatataatcccttgcaaacaagaccaataaatcccaatagagacctagcattgtatggctatggatcagttgcctggaagaacagagttgagtggaaaacaaaacaacagaataaaatgcaaaaggtctcatctgatggtgaaggatctgatttaaatgattttgacagcgactgcgatattcccaggtgtgctgaaagtaagcagcaactatcaaggaaggtgcctattccatctagcaaaataaatccttacaggatcgtaatcagtttgcggctagccattcttggcttatttttccactatcggattctgaatcctgtacatgatgctcactggttgtggttgacttcagttatttgtgaaatttggttcgccttttcatggattttagaccaatttcccaagtggcacccaatacagagagaaacatacttagatcgattatcattaaggtacgagaaggaaggaaaaccaccagaacttgctcggatcgatgtatttgtcagtacagttgatccaatgaaggagcctcctttaattattgcaaacacagttttgtccatactggctgtggattatcctgttgataaagtttgctgctatgtgtcggatgatggtgctgcaatgcttacttttgaagcacttacagaaacatgtctatttgcacgaaaatgggttcccttctgtaagaaacacaaaatcgagcctcgggctcctgaatggtattttgctcagaaaattgactatctaagagaaaaggttcacccagagtttgttcgagaacgacgtgcaatgaagagagaatacgaagaatttaaggttcgcataaacacagtagttgctaattcatgcaaagttcccgagggaggatggtccctaccagaaggagctccatggcatggaaataatgttcgagaccatgccggaatggtccaggttgggtgctttatttgtctctaa

SEQ ID NO: 1931 - DNA, 309 bp, Zea mays
atggcgtcgcctccgcccgatgtggacctgggcaagctgagctacgagatcttctccctactcgagagcaagttcctcttcggcggcggctccgtgccgggcacgccagcgcgggcggcggctccgggccccggggaggaccgtggcagggtgcgggtgctggcgatcgacgggcgcgggccaggccccggcgacgcgctactggcagcggccgcgctcgcgaggctggaggcggcgctgcgcgtggcggcggacgggtcgcggggcggattgatcgggcggttgtttggctggggcagtctacactaa

SEQ ID NO: 1932 - DNA, 1495 bp, Zea mays
ccgcgaggcaacgaatcccactaaccaacactgccaggtgggccacgcactggggccgcctggacccaccacccaccccctctcgacgctcacttcataaaaccactccacctcctgtctcccctttaaacacaccgatacagcacaccgtccatctctcccctccccctcgcaccgccgcgcggacacgaacacgcgagccaccgaacgggtccgggcccgatcgcaccgaccagccgcgcccgcggggcggggaggtggatccagtccaggggtgggctcctcttcaccgccgccgatggacttgggcctcagcgtcgcgggtaggaccggcagcggaggaggaagagggggctggagagggagcgggggcggcgcgtccgcggcggcgtggacccggctcgtcagctctggcgtggaggacgagctggtggccgcgtcgggaggaggaggaggaggaggtggtggacgcgctggggcgagagccggaggcctgccgctgggccactttttggaggcctgcttcctctgccggaagcccctccccagcaaccgcgacatatttatgtacagaggtgacatcccgttctgcaccgaggattgcaggagggagcagatcgaaatggacgaggagatggagcggaaggagagcaaacccaagaacgtggcgccgagaggagctccatcccccaaggacgtggactccccgccgaggcctcccaaggcccgggccgggtcaatccttgccggctaacaccgtgaagaagaaaaaaaaaagctcacaaacgagctctcacgtatgcgcgctccccctccccaaaaccaagagatcagaccccctcttaccaccacgaactaccaccgctacagttacgtatatgggtttgtgctttttgtttaaaccccttgcgccattggtggcgccgtgacctgctcagtgtcagtgcctgcctacctgtatggctgtgatgatgtatagagatgggggaggggaggggaggggaggagagcgcgctggtgtttaggaccgcatgcagctcttattgcgctgctgtgtcgttcgttgtatcatgtgtgggtgtttctgcctccgtttacaggggatttttgtgaaatttctgtgtgctacgtagtagtagtagtagtcggtaatgatggttttaggcttatggtttcccgtaatgatgacgacggaaaatggaaaacatatgtctacagaaagaaatagacatcaagtacatgactagctcctgtgccatcgtggatgatcctgatttccttttttttaaagtaccttctgattggcaacaagtgtgtactgttcttggtcgatacatccaatgttttgttttttattagtggcgctgtgcaagtgctaagcgtgcgtggcatgtaccatctattgttgttttgtttgttcaatacgacgagagaccacttagcttaacacttcgcacttgttcttcgtttggctgctgcttcaccccaagaacgc

SEQ ID NO: 1933 - DNA, 2763 bp, Zea mays
cccggtttcgttgccgcggccgcattcaacattcatcaaatggtctttatgcgattccgccccccagttcattttcttctcactccccggctccactcctaaacccagaacccagcccgccgcaaccctagccgccgccgccggcaccacaccaccgccatagtcacctccatggccgcggcgtcggaggacgcgttgcggcgctcgctcgcggagcgccaggccgccgtggacgcgcaggccgaggccgtgcgcgcgctcaaggccggcggcggcgcgtccaaggccgacgtggacgccgcggtcgaggcgctcaaggcgctcaaggtcgaggccggcgccgccgcgcgccggctgcagcaggcggtcggggcgggcgcgggtggcgccgcgagggaggagctgcgccaggcggtggtcaacacgctggagcggaagctgttttacataccctccttcaagatctaccgcggtgtcgcggggctctacgactacgggccgcccgggtgccgcgttaaggccaacgtgctttccttctggcgccagcactttgttttggaagagaatatgttggaggttgactgcccctgtgtgacgcctgaggttgtcttgaaggcatcgggccatgtcgagaagtttactgacctcatggttaaagacgagaagacaggcacatgctaccgtgctgaccacttgttgaaagatttttgcaaggagaagcttgagaaagaccttgccttgccccaagagaaggctgatgaatttaagcgtattcttgccattttggatgacctctcagcagaggaacttggtgcaaagattaaggaatacgacattgttgcccctgatacaaaaaatccgctttctgatccctacccattcaatcttatgttccagacatctattggccccactggtcttagcgtggggtatatgcgaccagagacagcacagggtatttttgtaaatttcaaggatctatactattacaatggccaaaagctcccctttgcagctgctcaaattgggcaagcttttagaaatgagatctcgccacgacaaggtcttctccgagtgcgtgaattcacattggcagagattgagcattttgtggacccagaggacaaatcacatccaaaatttgttgatgttgctgatttggagttcctgatgtttccaagagagctacaactctcaggggagtcggccaaactattgaagctcggggaagcagttgcaaagggaactgttaataacgagacacttggttacttcattggaagggtctatcttttcctgacatgcttgggaattgataagggtcggttgcgcttcaggcagcatttacctaatgagatggctcattatgctgctgattgttgggatgctgagatagagtgctcttatgggtggatagagtgtgtgggtattgctgatagatctgcatatgatttgaaagctcacagtgagaaaagcggtgtcccacttgttgctcatgaaaaattctccaaacctagagaggttgagaaacttgtcatagttccctcgaagaaagacctggggctggcttttaagggcaaccaaaagatggtccttgaagctttggaggctatgagtgagaaagaagcatttgagatgaaagctgaactagaaaccaagggggagacaaattttaaagtctgcacgcttggaaaagatgtggtgattacaaagaagatggtatcaatcagcatggaaaagaagctggaacatcagcgagtcttcaccccttcagttattgagccgtcatttggaataggccggatcatctactgcttgtttgagcactcattttgcacaaggcctagcaaatcagaagaggaacaactgaatgtcttccggtttcctcctcttgtggctcctatcaagtgcaccgtgttccccctcgtcaagaatcaagagtttgatgctgctgccaaggaaatcgccaaggcattaacaactgctggtatctcacacattattgatactactgcaatttctattgggaggagatacgcgaggaccgatgagattggtgttccatttgccgtgacagtggattcggcaacaaacgtgactatccgagagagggacagcaaggagcagatccgtgtggacataaacgaggtggcgtccgtggtgaagcagctgacagaaggacaaagcacctgggcagatgtttctgcaaagtatcctgcccatgttggaccccaaggtgaccaggagtgaaaaatcctgccacccttatgtctagccatggaccgagaaggagccaggatggatttcattctccgattgccgagaagattgactagcctaaacataaccgcatttggtatttgacacgatccagcgcggtagtcccccttctcatacatacatgatacgtgctgttataaaatcggcagagctcaccaatgtttttgtttcttgtaaatgtctttttttcttaatatattgtctcacccacacaaaacttactatttgagttacttctgaactagttgcccttttgtaaggtcaaaccgagaattgaactgggatccacagtggaattggaatataaagagtttggttgtttgcccataaaaggcccgtatccaggctccaacaccaaaaggagggcctctccgtagcctgactccctatcccactctttatttttaaatttcactatgtaaacggtatactctataatgtattcccttgtcttagaatataaaaaggcataaccattttttt

SEQ ID NO: 1934 - DNA, 2069 bp, Zea mays
tttttttatttctattttatgattgaccaatataaacataaacaacttcaaattggactcgtttcccctcaacaaataaaggcttgggctaaaaaaatcctacctaatggggaagtcgttggcgaagtcacaaggccctccacttttcattataaaaccgataaaccagaaaaagatggattgttttgcgaaagaatctttggacccataaaaagcggaatttgtgcttgtggaaactctcgagcgagcgtagctgaaaacgaagacgaaagattttgccaaaaatgcggggtagaatttgttgattctcggatacgaagatatcaaatgggatacatcaaactagcatgtccagtgactcatgtgtggtattgaaaggtcttcctagttatattgcgaatcttttagataaaccccttaagaaattggagggcctagtatatggtgatttctcttttgctaggcccagcgctaaaaaacctactttcttacgattacggggtttattcgaagatgaaatttcatcctgtaaccacagtatttctccctttttttctaccccaggctttgcaacatttcgaaatcaggaaattgcaacaggagcaggcgctattagagaacaattagcggatttagatttgcgaattattatagagaattctttggttgaatggaaggaattagaagacgaggggtatagtggagatgaatgggaagatagaaaaagacgaataagaaaagtttttttgattagacgcatgcaattggcaaaacattttattcaatcaaatgtagaaccagaatggatggttttgtgcttattaccggttcttcctcccgaattgagacccattgtttatagatctggggataaagtagtgacttcagatattaatgaactttataagagagttatccgtcggaacaacaaccttgcctatctattaaaaagaagtgaattagcaccagcagatttagtaatgtgccaggaaaaattggtacaagaagtcgtggatacacttcttgatagtgggtcccgcgggcaaccgacgagggatggtcacaataaagtatacaaatcactttcagatgtaattgagggtaaagaggggaggtttcgcgagactctgcttgggaaacgggtcgattactcggggcgttctgtcattgttgtgggtccttcgctttcattacatcaatgtggattacctctagagatagcaataaagctttttcagctatttgtaattcgcgatttaatcacgaaacgtgctacttctaatgtcaggattgctaaaaggaaaatttgggaaaaggaacccattgtatgggaaatacttcaagaagttatgcggggacatcctgtactgttgaacagagcacctaccctacatagattaggcatacaggccttccaacccactttagtagagggacgtactatttgtttacatccattagtgtgtaagggtttcaatgcggactttgatggggatcaaatggctgttcacctacctttatccttggaagctcaggcggaagcccgtttacttatgttttctcatatgaatctcctgtctcccgctattggagatcctatttgcgtgctaacccaagacatgcttatcggactttatgtattaacgattggaaaccgtctaggtatttgtgcaaatagatataatagttgcggaaactctccaaataaaaaagtaaactacaatattaacaattattataagtatacgaaagataaagaaccccatttttctagttcgtatgatgcactgggagcttatagacaaaaatgaatcggtttaaacagtcccttgtggctccgatggaaaatagatcaacgcatcgttgggtcaagagaagttccgattgaagttcaatatgaatcttttgggacttatcatgagatttatgcccactatctagtagtgggaaatagaaaaaaagaaatccgttctatatacattcgaaccactcttggtcatatttctttttatagagaaatataggaagccatacaaggatttagtcaggcctattcatacactatctaa

SEQ ID NO: 1935 - DNA, 2017 bp, Zea mays
caaaactggctctcttcacaaggcacatccctcttcactctctcctccgtcgtcccgtcactcgtcagtcctcgctctcttcactcgctgaaaggcaggctggtggagtggaagcgcttcactccccttcgtgccaccccagcccatcgccttccactggactcatctgcttggcactcctcgccccgtgcttggattcttgcacttggtgcttcccttctcctacctcacatcacccgcccagatccaatccacacgagatttgcgacgctccggcctcccggcacgaagcctttctagggatcgccactcgccacacgccggccggggcgaaaaaagctcttcttggagcccttctgcttggcctctccctctcttctctcccggcgtcattgtcgccgctgcctgcgagcaacaacaattatggccgccgcgacgtcgcgcgggccagcgtcggtcgccatctgtgcgctcgccgtgctccacgcaatggctgcgctgtgcgactccgccaccgcggcggcggcgacgtgcgcgggcctggccccggccaagcaccggccggaggtgatatccatcgccgacttcggcggcgtgggcgacgggcggacgctgaacacgtgggcgttccgcaaggccgtgtaccgcatccagcaccagcggcggcgcggcggcacgacactgcacgtgccggccggcacctggctcgccggcagcttcaacctcaccagccacatgacgctcttcctcgccagaggcgccgtgctcaaggccacgcaggacacgaggggatggccgctggtggagccgctgccgtcgtacggccggggcagggagctgccgggaccacggtacgccagcttcatccacggcgacggcctccgcgacgtcgtcattacaggtgacaggggagtcatcgacgggcagggtgaggtgtggtggaacatgtggaggaggcggacccttgagcacaccaggccaaaccttgtggagttcatgcattccaccggcattcacatctccaacatcgtcctcaagaactcacccttctggaacatccatcctgtttactgcgacaacgtggtcgtaaccaacatgatgatcttggcaccacgtgactccccaaacacagacggagtcgatccagactccagctccaacgtgtgcatcgaggactcgtacatatccaccggcgacgacctggtggccatcaagagcgggtgggacgagtacgggatcgcgtacgggcggccgagcgccggcgtcacggtccggcgcgtgaggggctcgtcccccttcagcggcatcgccatcggcagcgaggcctccggcggggtgcgcgacgtcctggtggaggactgcgccatcttcgacagcggctacggcatccacatcaagaccaacgtcggccggggcggctacatccgcaacgtcaccgtcgacggcgtgcgcctgaccggcgtgcgcagcggcgtccgcatcgccggcgacgtcggcgaccaccccgacgcgcacttcagccagctcgccgtgcccacggtcgacgccgtgcgcatcagcaacgtgtggggcgtcaacgtccagcagcccgggtcactggaggggatccgggcctcgcccttcacccgcatatgcctctccaacgtcaagctcttcgggtggcggagcgacgccgcctggaagtgcagggacgtgcgcggcgctgcgctcggggtgcagccgtcgccctgcgccgagctcgccaccagcttcgcgtccgcacggtcctcatgcagctagttagtgtagtgatgcctagctaattaatttctgaattctgatgatgggtgtgcttttaagtttgggctttgttttacttattctatggcaccgatgtctgtctgtctgtctttgcttgctcaatcacttactttaggcttccactgctaaagtgctaatcgttcagaaaaccttaccactgcaaataattttgtactccctacattctaaattataaaatatcttagtatttatagat

SEQ ID NO: 1936 - DNA, 1939 bp, Zea mays
gacgagtagcagtggagtgagctgagcagggctaggacggctgcgaggccccggctcgatcgactagccagtccaggccatgtgcgccccaaccaacatggcacgttctccctcgctcctcctctctgctgctaactgcgtacacacacagacctctccctctccctcccctcccgttagctagcgggccgacgcccatctggcctataaattggcccacacggcaccacccacccaccactgctcgcactcactcacagtcgccgccgctgcccagtgcccactgctcgccgctagaggaatctgagagagagaggggaaagggcgaaggaggcgcaggcaggcatgggctccccttcctccctccccgccgcggcggcgctcgtgctcctggccctgctcgccggagcccagtgccgcgaggcccagttcgacgccgcggacgccggcgcggagaacttcaacaccagcgaggccgccgtgtactggggcccctggcagaaggcccgggccacctggtacggccagcccaacggcgccggcccggacgacaacggtggtgcgtgcggcttcaagcacaccaaccagtaccccttcatgtccatgggctcctgcggaaaccagccattgttcaaggacggcaagggatgcggctcctgctacaagattcggtgcaggaaggacccgtcctgctccgggcggacggagacggtgatcatcaccgacatgaactactacccggtgtccaagtaccacttcgacctcagcggcacggcgttcggcaggctggccaagcccggcctcaacgacaagctccgccactcgggcatcatcgacatcgagttcaccagggtgccgtgcgagttccctggcctcaagatcgggttccacgtggaggagtactcgagccccgtctacttcgcggtgctggtggagtacgaggacggcgacggcgacgtggtgcaggtggacctgatggagtccaagacggcgcgcgggccgccgacggggcggtgggcgccgatgcgcgagtcctggggctccatctggcgcatggacaccaaccaccgcatgcagccgcccttctccatccgcatccgcaacgagtccggcaagacgctcgtcgccaggaacgtcatcccggccaactggaggcccaacaccttctaccgctccttcgtccagtacagctagctagctggtttgcgccctcgggccgctcggtcaccaccacccaccactactaccaccaccacccactagactactgcttctgctaccaaatactacggcggaacggaacggctggttgccgccgccgccgtcgtccttggaaaggttgaggcgtctcttggtcatccgtatcgttaccgttgtcatggtcctttgagtcgttgcaaccctgattgcaagccggcaagggggaaaaaaccaacaaagccgtgtgggaaaatggaggaggcaggcgtacaatgtacgctctcccgcccactgttgctttataatctctatatcatcatcatcttcttcttctccattccgatcggtgattaatcgaaaagtatattgtaatgtataaacaccatttcctgtttcccggagctgagctaccctgttcacacccctgtgcagggttgaggcttctgcatgttaattgttctttcgtcactaatgttttcttctgtgacaatgacatggaatgtcgacggttggcttgagcattcagcatcgctgagctgacggggagaaaactcccataggcacaccacacccccacatctcccatcccatgtccggtgccatatggggaggaaactccatatgccgtatattaattatgttatttatttgtgatattaatattcatttaacctttctaatatgataccaatgtatactatagtagtataaatacaaatactctactatttaaaaaaaa

SEQ ID NO: 1937 - DNA, 2040 bp, Zea mays
tctcgatctcttctctctcgtcctcgctaagctagctagctatatatgatccccccatgcccccaaagcctttccacacacaaacacacagcgatatacgcacccttgaagctttccaccccgtaaagctagctaagccttcccttggcacctctatcccactaaggagcaaaaagagaagcgagagggaaaggagacaaggccggcgcccctgtggtagcgtttgtgaccttagcttaattgcttgcttggccaggactcccttaaaagaagcaagctcatggcactgctggtcaagagccaccaccaaatgttggtctcctcctccacctcctcgtcgtccccttccgcgtcccagcagcggcagccaccgccaccacctccctcctcctcctgcctcaccgagcagcagccgtcccccgccaagcgcaagaggcgccctcccggcactccggaccccgatgcggaggtggtggcgctgtcgccgcggacgctgctggagtcggacaggtacgtgtgcgagatctgcgggcaggggttccagcgcgagcagaacctgcagatgcaccggcggcgccacaaggtgccgtggcggctcgtgaagcgggcgccgccgcctcctgctgctgctgctggcggcggcggcggcgccgccgacgctaataacagcagcggcacaggaggtggtgcaggcggcggcgcgccccggaagcgcgtgttcgtgtgccccgagccgagctgcctccaccacgaccccgcccacgcgctgggcgacctggtgggcatcaagaagcacttccggcgcaagcacggcgggcggcggcagtgggtgtgcgcccgctgcgccaagggctacgccgtgcagtccgactacaaggcccacctcaagacctgcggcacccgcggccactcctgcgactgcggccgcgtcttctcacgggtggagagcttcatcgagcaccaggacgcgtgcaactccagccggatgcgcggcgaggcggtggtggtggccgtgcccgtgcccgtgccgccgccgtcggcgctcccggtcatccgtcccgccgtcccgcggcatccgcccacggtggcagtagcaccgccgccgccgccggtgctccagctcctccccgcctccgcggcggcatcagcgccgcggactagtagcgccacgacgaccgcctctccgtccaccaccacaaccgcgtcccaccaccaagcaaaaccccacgcggcgacaacaacaaagctgcagctctccatcggccccatcgtcacggctgcggcggcggcggccgtcgactgcggcgaggacgagtccgaggcggaggagctgcggcgcgcggtggaggagaaggccgcggcggacgcggcgcgggagcgggcgcgcggggaggccgcggcggcggagcgcgcgctggacgaggcccgccgcgccaggcagcgtgcccgggccgacctcgagaaggcgtgcgcgctgcgggaccacgccgctcgcctgctcgggcaggtcacctgccacgcgtgccgccaccgctcgctcgccgtcgccgtggtcaggggtgccgccgagggccacgccgccggccccgcggtggcctgcgactccatcaggggaggaggcttaggagcaggcatctagctagctccaccactcgtgcatgccattgccatgcatagttcatgtgtgtagatcaagctaagctaattcgtaggccggacttgtgcatagtgtcgtgtggcgattactgcttgcaaccacgcacccactttggtttctagggtgctacaacttgcaactttggcctggtaaaggtatggtgaatgagatcatgcacgttaaaaacggagtgtgtattggatatgttctcacacttggtaagggaatgaatctaaaacactcggtaaaggtacagaagtaggtattgactttcttaagtatttgtcctttgattttcctctagtggtattgcatatgtttaatatgtaagagggagtaatgttagtgtgttacatttttctggtttcataccctcattttcc

SEQ ID NO: 1938 - DNA, 547 bp, Zea mays
ggagaaatcaaggggccagaccggtccgcatgagcaagcgactcgcggcggttgtctagtcacgcgacaacatacaagagcgcgctcgccaagtcctcatgaagcgactggggatcttgcctagcgttggccagccaacaaccgctgctaatggtgaagttgcactggagcactacatcaacctcttcaagggtccgttgacgaccgtgactcttcaggcgctgctacccctctatggaatcatcccgcaggggcaggcagtgcatgggacttgatcctgccgcgcgacatcgtgctgtgtgggtacaagatcttagtaaatgtctagtagctccgtgttcgatcgcccaggacgcgtccttgtgtttgtagtcccaagtcttcatcaacaccttgtccgattgcccaaaatcacggtagcagccagaggctttcaattgttgtgtttctgttggaccactccacttagtcgtttaatgttgccacgtctgttcgtcagtctgttatcttcgttggttaggaggtcgctgggcttgctcccagccac

SEQ ID NO: 1939 - DNA, 1037 bp, Zea mays
gcgacgcatgaggacggtggagtccaggggagcccgggccggctggcgcgggacgaggaggccggaggcagcggcggaatgagcgggcggtcgtcggcgggtgggccgtccggcggggagtgctacacgtgcacgcagcccggggtgccagctttccactccacgacgtgcgaccaggtgcactcgccgggctgggatgccaacgcagggtcctcgctcgtgccggtccagggccaggcgcaggcggcggcggcggcggcgccgcggcacgcggcgtggtggctgttggggcccgtgctggacccgcggagcaggcgcgtcacgcgtgcagcgctggaactgctggatcctgctgggccgcgccgccgcgctggcggtggactcgctcttcttctacgcgcttttctcgaagggctggcctcgtctccccgacgcagcggcacaacccttcgccgcggccgccgccgcctaagctcgaccgccgcgtcaatcgccatcgcggccacgccggctctcttggccgcctaagcttcgatcctaagctgccgaacggagcaacagagaattattccagctaaaacctgggctgatcaagtgaaagacccggaacaagtgaaagactcagatcaactaaaacctggcctgaaactgttcctgacctggaactaaaacctggctgccgaacggggcctaagcctccttcacctggttggctactactactgcagtactgcctggtcggcaacaggtgcgctcaaaaagtcagctcctgcactagtacatttagcatctgaagtccttgtattttcttaaaaagcgccacggaaaagtaatcccaaattcccatatgtgaatgttcctaccatatatcctgaaaaatgtatgtatctagggaatagatcattagatgaatattgttgagtttgtgatctaaattctgcatatggagaccgtgttggcgagcggcggaggctcgtccttgtaagccgccgtctacggacgatattctgtggctggtgatcgtggttttttccttt

SEQ ID NO: 1940 - DNA, 1959 bp, Zea mays
tacccgagcacgcattgcaacagcacgtccacgaccaactccaatagctgatcctttgccctacattcgacaaaacaagaaaattatataccatctcaccattagttttctcacaacaagacactaagaggtacagggaatcatcagtaacaaaccctaatcctcgcttccaagcgcttgaacatgggagcgttcttgagcatatcaggtataatcataaatctgtaacataacagcagcaaaacccacacacagaaaaaaaaattaggccgccgtaactcaacaacattgcatgacgaaacaaatctagtttttcgattacctcactctgcttcctctgatgaagacgtgctccagctgcgaaaccttcccatcctgcagattaaccaacagaaaggaagaaaatattcagggaaccataatccatgagaatatagctcagatccgaaggtagcgcgggcagggagagcataccttggcagtgaaggttatgttctcgagctggcaattccagttatcctcgcactcgaccaatgacccccggtacacttcgccggtcttgagctccaccgtcaccacgtgacccgctgcctcatggagcaacttcaccgggatccccaggctccggctcatcttcccctttccgtctctctcgctggctttcttttccctcttttcgccgctaaaaccccagctcgtggaaacagggggaggcggcacgagaagaagcgaggcggaccaagggcgaacgggaaagaaaggagagaggaaggccttaacgggccgtttgtgaggataccagcccaaatttgagaggaggggagcctggtccaagtcgccgcgaaaacgacctcatcgaatcgcttggcgatgaggcaaatcgccgagagcccgagacgaataaaccgatgcgacgcgtcttcaatccacctgtccgtgatccgctcacctagaacctactagaaggcgaaccaacccgcacattcacttctcttcccatccgtacgaactcgcagatcagagagaccgaggcgcccgcggttctgctttccttccttgccccgttcacgagagaattttctggagtcttcgactcgagcagggttccgatggcgctgcaatggatgatcctggcgtgcgtggtggcggtggaagctgcggtggctgcgctggtcacgctcccggtgccccgcgctgtgcggggccagatcgtcgcgctcacgtccttgttcctgcagcccctgtccagtgtgatacccttcgccgccttccagatcctcgatctctactggaagaaggagcacagactgatgtgcacctcggagatttgcaccgccgaagagcgcattcgcttcgagaaatctatgtttaaagctcagagaaatgtcattctttgtgtttcagcatgtctcctttattggtgcatttatcgtattgtaaaattgaacaaggatattaaggctttggaagagaccgagaagcgcctcaaggaagagtagatctattgtgttttaaggttagtgattttagtggtgattcaatgtgtactaggttcttgcacttttttcttaatataatgatacacggacctggtgcagtggtagagcctaccgtctgtaaccgaaaggtcccgggttcgagcccctggctctgcatattatgcgggtaaggcttgacgcttaaagataccctttcccagaccccgcacagtatgggaagcctacggcactgggtacgccctttataatgatacacaactcttcctgtgtgttcgcgaaagaattgtgtagttggcaagatcatctttggctcctatttttacttgcttgtaagttgtaataccaatggcagtatgagtagcagatatgacttatgtgttaagattcagtgaagcatgaacatggcatacatgatacaccgcattttgaggcggagttatggaattcttaaattatgatt

SEQ ID NO: 1941 - DNA, 326 bp, Zea mays
atggccaaggcggacacgaacgacgacgacgacttcgtcagcctggctgagttcgcgacgctaaacgctacaatggtcggcgagacggcgatcgggccgcctacgaggacctccggctgccaagccgtccgcgtcttcaacgccaacaacggcactatctccgccgccgagctcgtacgtgtcctctgcagcctcggcaagtccacgttcgttgtgcattgttgtcgcatgattgagggcgtcgaccagaacgttggcagcttcatcttcttcaaggagttcaagatcatgatggcgggggcggttgcttcgctaagatcgtgtag

SEQ ID NO: 1942 - DNA, 2001 bp, Zea mays
gagcaaataacattgtcattcagtcatcccatatactatgtctcgctccgtttatgggccctgggccgccattcggaagtcaagtattgggctggtccggccactccgacacccttatataaagtcccgaaccctagaggccagcaccttcctccccaactcgccgtctgccttgtgcgcctccatttcggcctctgtcccttgcaagttcaatctcacctccaaccatgggtaaagagaagtcccacatcaacattgtggttattggccatgtcgactctggcaagtcgaccaccacaggacaccttatctacaagcttggaggcattgacaagcgtgtgatcgagaggtttgagaaggaggctgctgaaatgaacaagcggtccttcaagtacgcgtgggtgctcgacaagctcaaggctgagcgtgagagaggtatcaccattgatattgctctgtggaagtttgagaccaccaagtactactgcacggtcattgatgcccctggacaccgtgacttcatcaagaacatgatcactggtacctcccaggctgactgtgctgtccttatcattgactccaccactggtggttttgaggctggtatctccaaggatggccagacccgtgaacatgctctccttgcgttcacccttggagtgaagcagatgatttgctgctgcaacaagatggatgcaaccactcccaaatactccaaggcacgttatgaagagattgtgaaggaagtctcatcctacctcaagaaagttgggtacaaccctgataagattgcctttgttcccatttctggttttgagggtgacaacatgattgagaggtccaccaaccttgactggtacaaaggcccaaccctgcttgaggctcttgaccagatcaccgagcccaagaggccttcagacaagcccctgcgtctgcccctccaggatgtgtacaagattggtggtattggaactgtaccggttggtcgtgtggagactggtgtcatcaagcctggtatggttgtcacctttggtccaactggcctgactaccgaggtgaagtctgttgagatgcaccacgaggcgcttcaggaggctcttccgggtgacaatgttggcttcaacgtgaagaacgttgctgtcaaggatctcaagcgtgggtttgtggcctccaactccaaggatgaccctgccaaggaggctgccagcttcacctcccaggtcatcatcatgaaccaccctgggcagattggcaacggctatgccccagtgctggactgccacacctcccacattgctgtcaagtttgctgagctcattaccaagatcgacaggcggtctggcaaggagcttgagaaggagccaaagttcctgaagaacggtgatgctggtatggtgaagatgataccgaccaagcccatggtggtggagacgttctcagcgtatcctccccttggtaggtttgctgtccgtgacatgaggcagacggttgctgttggagttatcaagagtgtggagaagaaggacccgaccggcgccaaggtgaccaaggcggctgccaagaagaaatgatgcgatcctgcgcctgctttagcaatacctagttttcatcatcacaagttttgtttgtgatcgttgctgttatcgtgtgaactgttgagatctgttagcatgtgcacttttatctatttatttggtaccatcttgctatttcaccttttgcaatacaagaatgctctaagacctatatgttaaccttttggcattgttaaattgattttaggaagtcgtatagttagttttcttcagtatgtttctttccccccttagttttgtctgttttggaagttttgtagggtcgtttggattggtttctgaatcatttatctactacaattttctctatccattagcaagagaaactcttctttttttcttgtccagtagcgttttttaaatctcgtcctatacgttaatctcgtgctacatgtaaatacaatgt

SEQ ID NO: 1943 - DNA, 315 bp, Zea mays
atggccgcgcagccaggccaagctgaggaggagcagggatggcgcgggccaaacaccgagccgtggctagaagggactcgccatggccgagcagagagggacgcggtccgagcggaggagcgcggcaaacctgaaggtgagcaggcaggggcggacgcgccaggaacaagagagcaggtgccagggacacgacagcagggaggagcaggaaggttgggcggccgagaaggagaagtcccagcaccatgggaagcatgggagctctggccggcgcgtaggaagaagacgagggaggccgtggcgagtgaacactag

SEQ ID NO: 1944 - DNA, 2313 bp, Zea mays
tttttttttttttttttgaattctgcccgctcctcagtcgtcgccaatcgcggagagagggagctcggctgagagagaagagagaagagagaagcgagcacgcggcggggtgaacgggggagaaaatttgaacaacggttattaacgagtgggcgagcaggcttggagtcgaactaaagcccactaaggattgcccttctagatggacagcccagcccaagccagcttgcgaagatcacatgcatcgtgagtcccgaccgcaaaattcaaatcagttcgagcttcgaaccatttcaacggtgacctgttcttccccacccggccacggctacggccacgggtcacccctccaccccaaaccctagcacccccgatccagcagcagcccccctctccgagctccaaaacctctcagagatggcggcgccggcgccggcgttgatgcagctcaaggtgcggatcccggagaacgaggaggtggctcgctgcctccacgagaagcggctgtctatgagggagcagccggccggtttcaaggagcacctggaccgcacgttcgccaaagcctaccgcaatgtctgcgccgccaatgagcccatccggactctcaaggagttctccaaaatcaatggtgtaggaccatggctcatacgctgtatgaaaggcttctttgcagagtccaagcaggattctccagcgaaaggaaagaaaacaagagtaccaaagtgctgtgtgacaaagaagaaaactgctgcttctgcttctcttggcaagggacctccttccaacttaaattgtcagaatgctcagttttcttcatcccaaggaacattggagctgcaaccatctggtaaaacgggttctactgacttcaatatgctagacaaggatgttgtatcaatgaacaattgtatactggctatgccacctcgtcaatcaagtgaagagtttcttgaagcttacgaggttgttctgatattggatgatcgtgagaattttgggtattgttcaagaaaagttgcttcaaaaaaggttgctgataacattggctcgcagtttaacgtacctgtagaggttaaacgtttgcctgtaggtgatggcatatggatcgctcgtcataaaaaaaattttacagaatatgttctagattttattgttgaaaggaaaaatgttgcagatttaggtagttcaattagagacaatcgatacaaagatcagaaaacaaggctgcagagatgcgggttaaggaagcttatgtatcttgtcgaaggtgatccaaatacttcaaaaggatcagcagcaagcataaaaacagcctgctttaccactgagattttcgaaggatttgatgttctgcgtaccaatgggtatactgataccatgagaacatatggttatcttacactctcgataatggattactacagcacaaatttctgcagacttgataaaagtgcctgtatatgcccaacctatgatgagtttgagagacactgtcattgccttcagaaaagaacagtgagccaaatatttgctctgcagcttatgcaggtgccacaagtaacagagaaagttgcattaactgttatagagttctatccaactcttttctcactcgcaagggcgtactccatgcttgaaggtgatatccatgcccaagaggagatgttgaagaacaagagcaagatgataaatgcaggggctagtagaaatatcttcaggcttgtctggggtgatggatgtcaatcttcagggttaattttggactagccgacttaactgagtatatcaccgacttggtgatctcgaggcatattattgtgtggttcactagccccttatgctcagatattcaattgaaaggctttcgcattctgaaggcaaatgatccaattgaacactgaccgtttgggagcatgtagtcaccatgaaagtgtctgaaagtgcctccacaagatgtagagcctgtttggttcgtggctaaggacatatttggtgtggtgcctacgccgccacaccgcgccacacttttcaagccgcaggtgtggcggccgatttggccgccgcgggttaggcgcggtgtggccgcctaggcgccacaccaaacatgccctaaatgtgccacattttgcctaaggttagtcgtctgtattgaacaattaaccttaggcagaaaggttatgcaaattttaattgcaagttagtcagtgaaccaaatatgctcgtaatgttatctggatgagatgcgttgtgtttcattatgtacatcttgacttttgctcacttgcttgcattatgagatgtctcttgtta

SEQ ID NO: 1945 - DNA, 2340 bp, Zea mays
tttggaggaacgcagaaacgtcgaaaccagcacccggaaacccagacaaagcacgagccacgcacgccccgctgtctccctcccgccgtcccgccgccaccgctactgccggagtctctcgccaccgtcgttgctctcccgccttcaccgtgccaactcccctccttgcctcccccgcgcttcagtcgctccactccccatcgctttcgcctggtcaggtatagtcgccacctttcttttctttcccttaccattttctttcatgcgctcaagagccaacacggctcgatccagaattccagatccaggtgtcctttgacccagaccgcgcctgcctttccctccgctcggattcttcgccgtcttcgttcctactgggcgccgccggggtggagcggagatcggatccgccaggagctgattccttctctcgtaggtgaggacgcccttgcattgctttcttggagtgattgctcgtggtattctgcaaatatcagcttttgctgtgagcgctggatcaaatgtttctttctctgcgtccagtctagtttgatgcggattcattcgctgaccggcatagcatgatcctgcggtgattgcggtcgcggatagcttgtgcaagctgttggcttgggagttatctttctaatctggcctaaagaaatcctgaggcggtagcgtcacatggatgcaagtacggaggttactgatgctattgctgcagtgggcattgacaatgggccaacggggaagttgccgccccgtgatagtgtaggggggcacgcagaagaacacgacgtgctggctgatggaacacattcgggtgagagcgaggtgatcaacccgtctgaagaagtggaaatggaagccacctcgcaatcccaggacataaagccccgagttcctgagggggttcaaggccattcaccgaaggttgttactaaatctccgcgacagagccctcggggcggggataagagtgaagccaggaaaatctctcccagtccttatcctaaggtgcccatcgcacgggtttctgatctagatatagttgatagctcttcgagcaatggtgatactggtgccagtaagaaaaagactgaaaagagcagtttccgcccaattgccaaggagagcctgtcacttgaggactcaaaagagaagaataaaactcagaaggcatcaaaccaacgctctgccaaaaacgatattgacgaagaatcaaatgaaagtgtgaaacctcaaagggtgggcagcactccttcatatggatttagttttaagtgtgatgagagagctgaaaaaagaagagagttctactcaaagctcgaggagaagattcatgcacaggaactggagaaaagcaacttgcaggcaaaatcaaaggaaactgaagaagctgaactcaaaatgctgagaaagagtttaaagttcaaggcaacaccaatgcccagcttttataaggaaccacctcctcccaaggttgagttgaagaagatcccaacaacaagagctcgatcaccaaagcttggtcgctccaagaacacaccctcaggagggacagaaggaaattcaaaccccccagctcgttcagctcgactgagtctcgatcaaagggtcccccaaaatggtgccaagaaagcacctgctgcaaatgcggcgaagaagccccaacggaaatctctccctaaattgccttcggagcaaacagccaaagttgttgacattgcagcgtctgttccatctggagaagagctggggaagaagccatcgttgacgggtcttgttcgagagccaatccgcgcgcaacttacgcctgatgaacctggactcagcgtgtaggaaaggaacctatcaagccgactcatgaaagaagagagttgtgcctcagcttcctttatcacactttgctatttctgcattaactgctggctggtattatgtactaaaattagtctcatcaccaggatggagttgggagtttggagaatggcaagtgacccccgtgtattgtttatgctagtttctgttgacatacgaagtgtttgtagttggcaaattttttcagattatcatgtctcctatctccagggctcggagccaattttcttgccgtcgtagagaagccttgtgattcggtgcattagttcttgcagtttgatttcggctattgttcattgcttgtactgatacacaggtgacaaggaacattctgcacgtaaaaaagctcttcaatctacatgtctgctacacgttgccctgcaaattcctcaggtgcctaacaatgaagaggcttagacgcgtgtgtgctctggcagattcagttttacatgtgccgtg

SEQ ID NO: 1946 - DNA, 2064 bp, Zea mays
ggcctcgtggccaaatcgtcagctcgtgttcgattgtttgtttcagttgcccgcctcacttcaccggctcaccgtgcttcacctgctatcttccatggcggcggctcacctcttctgctccgcaccggccgcctatcgcgccgcgaacccacggccccttgctacccgtggccgcgccaaccccgccacgggaacgtatctggtgctcaaaggggtatggtgctcatgtgcacatttcccccgggccacaccatcgagaagattcttcccctgccgcgcgtcgctcagccccgatggatcgctggccatgctcggggctcccagtcccaggatggcgccaccgatgaggaagccgtacatgcgggagcactcttgcctcatcttcccgcccccgcgcggtcgacgcccgctggcggtcatcaagttcctcggcggcgccttcatcggcgccgtccccgaggtcacctacggctacctgctggagctcctggcgctggagggctttgtggtcgtgtgcgtaccatacaacgtcaccttcgaccacgaggccgccgcgcgggaggtattccagagtttccatgcctgctacgacgcgctgctcgcgtcggggctcccggaggccggcctcagcgccctggacatcgcggagctcccgctctactctgttggccacagcaacggggcactgcttcagctgctagtgggaagctacttctcagaaaggataccagaggctaatgccattgtctcattcaacaataggccggcatcggaggctgtgccttactttgaacagatagggcccctttttaggcaactgatgcctatgatggaggcctcgcctgtttactcgatggccagaaatgcatcaggatatgcatggaaagctctatttgatttagctggaggtcttttacgtgagtatgatcaagaagctacggtatctctgagcaaatttattgatcagttaccatcagtaatgaaccaggtttcagaaggtgtgtctgaatttaaaccaacaccacctgaaaaccgtgaattctgcaagaattcctacagtgtacccaatacattattggtcaaattcactgtagatgctattgatgatacagacatagttgaagatgtcctgagaccccgcgttgattcaatcggtggacaaataaagaaggtcatactgtcaggaacacatctaactccatgtatacaggatgtcaaatggcaagttggttcagaatacactccagcagatgccattgcacaaggattgaaatcattggctcttagtgaaacaagagtcctctcaagaacaattgctgattggtttacatccctttaaattttgagttattcaatacatctgttgaagtttggagttcttcttacaaaggaatgccttcatcaggtctcaacttcccattttgttgaagcagtccactattgtaatgagatgtaaggatacaatgtattatgtatggcacataagagcagtgcatttttgggctgtgctgagctggtcatgctcacccgcaggccctagccgtactacaaatatctgatcaagattggtggtttggggccttacttggatcgtagttgcaagctataaaaagcatcgaacccaaaagtccaagcagctcgatcctgtttgaggtacggtgccagcaaggttaagttggccaaatctgttgcacgcagacagcccaatgggggtttctgcaggctggcgaaagtaaaggcgtgcgataggaaatctgggaatgttttatattgccacattgtaattccacgttataggcgtatagctcaaatacatttggacggtttggaggtatttcgttggtgtgctggcagttgtttctgtatcgtgcatgtctgttgcaagaaggcctggatgctgctgacctgagaactgattgatttcgctgacgcttacagttcttgcaagggcgtgcaagtagaacaacccgtatgcttcaggaattagtattacacgaggttaacaaatgtaataggcttgggactttctttcaacagcatcactgcagtacgtaacctctgcaa

SEQ ID NO: 1947 - DNA, 2845 bp, Zea mays
gcagggcgcatctatccgcatctccgcccccccccacggtggcatcgcctcgcctcgcgtcggatcaatccatcccctcgccctcgccttctgctcttcctcatcgggggcaggcggagccgcagagggaggagccgccggcgctaggaatccccaatccgtatcgctcccccaacgattttgagtatattgctgctgcttctcaagcctattcttattgtagatcgaatcgatcaattcgctgcatcgactgatagtagatagggttcatacgcccattccattgattcgacgatgttccgccgcgactgtgtgggatcgccgccgccatgacccccggctacctccctccaccttcgtatcccgacgtcttgaccaaaccccaaacctgactccgaccccggttccccgctggaagagtataatagccaaaacacaagcggcccgtgcgcaccaaccaccaccggagcaacaggatggccgatagcggcggaatcagcgccgacaacgccgcggccgctaacgacgacgacgacaccaacacggcgcctttccccgacacggtccaggtcggaggatctcccgagtacaaggtcgagaggaagcttggcaaaggtggcttcggccatgtctttcttggccgacgtctgactgccgcccacgccgcacgctccgcggcgtccgctgcccaagaggttgccatcaagtttgagcacactagcagcaagggctgtacctacggccctccagctgaatggcaaatctacaccgctcttggaggcacacacggcgtgcccaaggtgcattataaaggtcgtcagggtgactactatgtcatgattatggatatgctggggcctagtttgtgggattcatggaattcattaggccaatccatgccatcggaaatggtggcttgcattgccatggagtccatttccatcttggaaagcatgcattctaaaggatatgtgcatggagacgtcaaacctgagaactttcttctggggcagccttcaacgcctcatgaaaagaaactttatcttgtggatcttggattagcaacaaagtggagagatactgctaatgggcagcatgttagttatgatcaacgtcctgatgcctttagaggaacagtcagatatgctagtgtccatgcacatttaggaagaaccgctagcaggagagatgatttggagtcacttgcctatacactagtattccttcaccggggcaggttgccatggcagggatatcagggtgataataaatcatttttggtgtgcaagagaaagatgagtacctcacctgaggccctctgcggcatatgtcctcaacctttcaaggagtttcttgaggccgttgtcaacatgaagtttgatgaagagccaaactattccaagttgatttcattgtttgacagtttaattggaccaatcccttccattagaccaatcaatactgatggagcccaaaaggtagggcagaagcgtgccaggttgcttaatgatgacgacgaccatgtaaaaaagaagattcggctgggtgctcctgcaacacagtggatttcagtatacaattcaaggcaacctatgaagcagaggtaccactataatgtggctgatgcaaggttagcgcaacatgtggagaaaggaaatgaggatggtttgttgataagttcaatatcatcatgcgcaaatctttgggcaatcattatggatgcaggaactggcttctcagctcaagtttatgagctatcttcacactttcttcataaggagtggatcatggaacaatgggataaaagtttctacatcagttctgttgctggctccaacaatggaagttctattgtagtgatgtcaaaaggcacaccatatacacagcaatcttataaagtcagtgattcctttccatttaagtggataaacaagaaatggaaagaaggttttcatgtgactgcaatggcaacatcaggcaatcgatgggctatagtcatgtcccgcagtgctggattttctgagcaggttgtggagttggacttcttgtacccgagcgagggcatccatagacgctgggacaatggcttccgtattactgcaatggctgccacgatggatcagtctgcgctgatcctaagcaagccaaggcgtcgcccaagagacgagacacaagagactctgcggactacacagtttcccagtcaacatgtcaaggacaagtgggccaagaatctctaccttgctgggatatgctatgggcgaaccgtggcctaacatcgtccgttgctgacctagctgttgtttgatgtatattttgagttttttatcagctgctaccagcatgagccacaaggcatttgccttgtcgtaacccatggaaattggaaaggggatgaattccgatgtatgtgcccgaacttgattctagggttggtctcgtaagttaatcgggaaaggcgggtgcagacactactgatgagccgtaacgtacccgtcagatcccccagatacaataaaacgagtctgtaatgtggcttttgcatcgtattttctgcatcgtgttaaggagaattctgtttttttattcagtgaattgtgaagagtggaaaatatagagcaacaaatagtaagttaaatagtatttcagctacctgcagagcatcatctagctggaccatttccttctcttccagcagcccagtcttgtggaggtttggaatgcaatcgctcaagtatgtcagcacagaatatgtgacttgtgtctttagcgctcgtagcacctgaaattttggtttgagtaattactctatccaatttgatgtgatgtgatgtattatgagtct

SEQ ID NO: 1948 - DNA, 3387 bp, Zea mays
ccgcgaccccaggtcagtcgggactacccgctgagtttaagcatataaataagcggaggagaagaaacttacgaggattcccctagtaacggcgagcgaaccgggagcagcccagcttgagaatcgggcggcctcgccgcccgaattgtagtctggagaggcgtcctcagcgacggaccgggcccaagttctctggaaagggacgcctgggagggtgagagccccgtccggcccggaccctgtcgcaccacgaggcgccgtcaacgagtcgggttgtttgggaatgcagcccaaatcgggcggtaaactccgtccaaggctaaatacaggcgagagaccgatagcgaacaagtaccgcgagggaaagatgaaaaggactttgaaaagagagtcaaagagtgcttgaaattgccgggagggaagcggatgggggctggcgacgcgcaccggccgtatgcggaacggctcctgctggtccgccgatcggctcggggcgtggaccgttgtcgcccgcgccggcggccaaagcccgggggccctaggcgcccccggcagccgtcgtcggcgcggacggtatccgcgcgcctctggcgcgcccctcggggcgctgcgctgcaacggcctgcgagctccccatccgacccgtcttgaaacacggaccaaggagtctgacatgcgtgcgagtcgacgggttcagaaacctgagatgcgcaaggaagctgacgagcgggaggccctcacgggccgcaccgctggccgaccctgatcttctgtgaagggttcgagttggagcacgcctgtcgggacccgaaagatggtgaactatgcctgagcggggcgaagccagaggaaactctggtggaggctcgaagcgatactgacgtgcaaatcgttcgtctgacttgggtataggggcgaaagactaatcgaaccatctagtagctggttccctccgaagtttccctcaggatagctggagcccacacgagttctatcgggtaaagccaatgattagaggcatcgggggcgcaacgccctcgacctattctcaaactttaaataggtaggacggcgcggctgcttcggtgagccgtgccacggaatcgggagctccaagtgggccatttttggtaagcagaactggcgatgcgggatgaaccggaagccgggttacggtgccaaactgcgcgctaacctagaacccacaaagggtgttggtcgattaagacagcaggacggtggtcatggaagtcgaaatccgctaaggagtgtgtaacaactcacctgccgaatcaactagccccgaaaatggatggcgctgaagcgcgcgacccacacccggccatctgggcgagcgacatgccccgatgagtaggagggcgcggcggccgccgcaaaacccggggcgcgagcccgggcggagcggccgtcggtgcagatcttggtggtagtagcaaatattcaaatgagaactttgaaggccgaagaggagaaaggttccatgtgaacggcacttgcacatgggtaagccgatcctaagggacgggggaaacccggcagatagcgcgatcacgcgcgtcacccgaaagggaatcgggttaagatttcccgagccgggacgtggcggcagacggcgacgttaggaagtccggagacgccggcgggggcctcgggaagagttatcttttctgcttaacggcccgccaaccctggaatcggttcagccggaggtagggtccagcggccggaagagcaccgcacatcgcgcggtgtccggtgcgcccccggcggcccttgaaaatccggaggaccgaattccgtccacgcccggtcgtactcataaccgcatcaggtctccaaggtgaacagcctctggccaatggaacaatgtaggcaagggaagtcggcaaaacggatccgtaacttcgggaaaaggattggctctgagggttgggctcgggggtcccggccccgaacccgtcggctgctggcggaatgctcgagctgctcgcgcggcgagagcgggccgccgcgtgccggccgggggacggaccgggaacggccccctcgggggccttccccgggcgtcgaacaaccgactcagaactggtacggacaaggggaatccgactgtttaattaaaacaaagcattgcgacggtcctcgaggatgctgacgcaatgtgatttctgcccagtgctctgaatgtcaaagtgaagaaattcaaccaagcgcgggtaaacggcgggagtaactatgactctcttaaggtagccaaatgcctcgtcatctaattagtgacgcgcatgaatggattaacgagattcccactgtccctgtctactatccagcgaaaccacagccaagggaacgggcttggcggaatcagcggggaaagaagaccctgttgagcttgactctagtccgactttgtgaaatgacttgagaggtgtaggataagtgggagcctccgggcgcaagtgaaataccactacttttaacgttattttacttattccgtgggtcggaagcggggcaccgcccctccttttggctccaaggcccggcctcgccgggccgatccgggcggaagacattgtcaggtggggagtttggctggggcggcacatctgttaaaagataacgcaggtgtcctaagatgagctcaacgagaacagaaatctcgtgtggaacaaaagggtaaaagctcgtttgattctgatttccagtacgaatacgaaccgtgaaagcgtggcctatcgatcctttagaccttcggagtttgaagctagaggtgtcagaaaagttaccacagggataactggcttgtggcagccaagcgttcatagcgacgttgcttttttgatccttcgatgtcggctcttcctatcattgtgaagcagaattcaccaagtgttggattgttcacccaccaatagggaacgtgagctgggtttagaccgtcgtgagacaggttagttttaccctactgatgaccgcgccgcgatagtaattcaacctagtacgagaggaaccgttgattcacacaattggtcatcgcgcttggttgaaaagccagtgacgcgaagctaccgtgtgccggattatgactgaacgcctctaagtcagaatccaagctagcaaccggcgcctctgctcgccgcccgccccgacccacgttagggcgttcgcgccccaagggcccgtgccattggctcagcccgcccggccgacgcgccgcggcgggccgcctcgaagctcccttcccaacgggcggcgtgctgaatcctttgcagacgacttaaaacgcgacggggcattgtaagtggcagagtggccttgctgccacgatccactgagatccagccccgcgtcgcacggattcgt

SEQ ID NO: 1949 - DNA, 916 bp, Zea mays
caattacataatataactaatatatatagagaggtataaatgtataatcacatatacttttgttttttttttctatcccacggcggccaagctgtggaaacgagggagacgaggaggacaagggaaagaaagcctaccggctcggcggctccggctcacctcccacacccccaaaaaaaatctcgcgtgccgccggcggccaccaccatcactgccatgatcagcatcctcgcgcaggagcgcctcctcgggttcgccctgggttccgtctccatcggcggcttcgtcctccaccagcgccgggccatctaccgttcaatcgctgaagccgacgggtcgccctacttttaccagcctggtgaaattgccagtcgaagaagctcaactgaactggctcatgtatggaacaaggcagtggacgagacccttgggcgacttgttgtgtaccttagttcgcgtgggtggtgattcaagctccatgttgaacatggtaaccgaggaagactctttttcaagccactgatgtgctcatacttccctgtacccggattgaacatgtttttttttttaaaaaaagagatacttccaatgaccgatttatctgaaattctgaaccgagctgattgattctaccgatgcttccctgagcaggtggatgttacttcgaggtcattgttgtagccctgtgaaaggcaggactcgtctaactattttttacatatatgtattggtaataaagaatgtatgttactttgctgacgttgccaacacttcaatggaaactatggtcgttctctaatggtcagtccatccctggtcaccctgagtgtcagttctgctcttccatctctaactaaggtctcagactgtcattcactatacctgtatataatctcagtctccgattcagttttac

SEQ ID NO: 1950 - DNA, 249 bp, Zea mays
atggggacgagcgcggcagggaacaacgccgacagaggaggagctcggccggacgccatggggcgagcagagagctcggagcggagctgggacgacgcgcagaggaggagccggctgcgcgcggctgccaagacaagcgcagaggaaactccgaccgggcgccggaaagaagaggccgccggggcgaagctccatggtcaggagctgggggcgaactcgagcagaaggaagggagcaggcacggcgtaa

SEQ ID NO: 1951 - DNA, 1472 bp, Zea mays
tataactactaaaagggaatatcattgacttaatcatataatttaacctactttcgcgttactaactcatcatacctcacataggtttatccatatatttctcgcataataaatatttaaacataaccctcccattattaattcgatcattcatcggatacgaatcaccaatttaatcttctcacataacctatatcgttaatcctaaacatagctacgcagcacgacgacttcgcaatcgtggacacaattgtcatgctacctgtagccccgtattcctacaagcgttatataaatacgtgcttagctacaagcaggatattcatcgcgacgtacacacctatcaattcatccatcaaaccagtcaataaaatagcaaattagctcaccatttcaatatttgactcgaatccgtgaggttggtaatgattttccgatccagacaatttgtcgagcgcttggcaggtactatacaaacttcacgcacatcttcatccgacgctcaacaagtttctccataaccggctaggaccttttttgtatctccccgtcatacaccacatgacgaactctcaacaccggtcgaaaataatccgagtaacccggcgaaacccaaactcaactcacagccggcgtggtcaactgaaacgacaacgtcggggttagagaaacccgcgcgacatgggtaggggcgagctgggctaaaatccgagctggagctcgcggcaaactgggagccagggcgctggtttctaggggagcctattggtgttgccaagctgggctactactgctcctaagcatccatggcccagagaagggacagaacagggaggaatgcgctgaacaggggagcacagccggaggagctcgacaacagagagcttagcagaggaacgacgccgagctgggtgcaagcagaggcgcggttcggcgaggtcacgacctgggcgagcctggtcggagcaggacgtgaggaatggcgtagcaggagagagagagcagcgtggagagagaaacgccatggggacgagcgcggcagggaacaacgccggcagaggaggagctcggccggacgccatggggcgagcagagagctcggagcggagctgggacgacgcgcagaggaggagccggctgcgcgcggctgccaagacaagcgcagaggaaactccgaccgggcgccggaaagaagaggccgccggggcgaagctccatggtcaggagctgggggcgaactcgagcagaaggaagggagcaggcacggcgtaaaaattctgagcaggggaggtactgccgtgagctgagggagggagagataacgatggctgaaaggatatagggagaagaacgatggagaaggcctgcttagcggtgagatattttctgtgaaatacttcaacgacacagaaaaatcccagcggctgtcctgcttgaggataaggaagaagagagaaacagggaacacgacg

SEQ ID NO: 1952 - DNA, 2435 bp, Zea mays
gtcgcggggaaccggccgagccgagccgagcccccgtaaagtaaagtatgtaaaccactggcgcctcgtttgttaaaaacaccccttggttgttccatatctctaacagatccacagctctcctagtttgtttgcagtgtgcgcaccagcactgaacgttgggatggccatgcatcacagccgttgatttttgcagctaagcaaggtacactacatacataggacgagtatgcaattagtggaatagtagatgggtgtgattgcacggacgcgtgcaacaaattgggcaaatctttttcccctttcaggcgtcgccaactccacttgtcagatcttgcccgtatggtatggagctcgccggagcagcctcccctcacccgccgccggaatcccacgtggcgccgccccgcccacctccgcagccgccggaagaggatttatgtgaagatagaggggacatgagtgtcaccggcgaaaagccatgcacacatcgggaatcagatgttggtcagacaaatagttgtagccttaacaattccagtgagtgtgagaatcatacacccagcaacgacgaaatatcggaaccagagtccaatttggagatggccaagactgatcagggcggcgatgtgccgagcggagagaaggtcctgaagaagccagacaagatcctgccgtgccctcgctgcaacagcatggacacgaagttctgctactacaacaactacaacatcaagcagccaaggcatttctgcaagagctgtcagaggtactggaccgcaggcggaagcatgagaaacatccccgttggtgctgggaggcgcaagagcaagagctccagcgcgagttgccgcagcgtgttgattcccgttccaggcagcagtagtgtagctaatcctggcggagaggcttccctgtttccgttgtccgtaaaagcaaaccaagcagcagttagcttcgggcctgattcccccctctgcacctccatggcctccgtgctgaagatcggaggaggaggagagcaggttaagagctgcagccctgcctcagcagcagcacagcccaggaacggagaaacccagacccagacgtgcgcaccttcttctgctgctacaacaccatcagatggtccagggaatggattgcagaaaggagcagagagcgcacaccaaaaccaaaaccaaaaccaaaacggaatcattgggcacagcaacggagtcactccagtgcatcctataccgttcttccccggaccgcctttcgtgtacccctggagtccagcatggaacggcattcccgccatggcagcggcggtgtgcgcagccccagcgacagccgaagcagcgatttcatcagaacacggcaccgcgagcagcaccgtccagtggaacgtgccaccagcgatcgtgcccgtgctgccaccgggattctgcggcccgatcccagtcccggtaatcccgccgccttccgtctggccactgatcactccctggcccaacgcagcatggagcgcgccgtggctcgggcctagcgctagcgtgccgccggggtcatctcggagcagcggcagcagcacgtgctccgacagcggctgcggctccggctcccccgtcctgggaaagcactcgagggagtcgaggccgcagggcgacgagaaggcggaacgacggtgcctgtggatccccaagacgctccggatcgacgaccctgtcgaggccgccaagagctcgatctggacgacgctcgggatcgagcctggcgaccggggcatgttcaggccgttccagtcgaagcatggacggcagcaggagctgcaagcgtccggcgccgctcgcgccctgcaggccaacccggcggctctgtcgcgctcgcagtcttttcaggagacgacgtgattactacactacagagcagagcgttgctgaaacctgtgtggcattactattcagagacgattgtatttcaacttcaaggggggaaatgagagagagagcgcgagagagagattggcctgtttggttcactacctcagttgccacactttgcctaacttttctgactaaggttagttattcaattcgaacgactaacattaggcaaagtgtggcatatttagtcataaaccaaacatgccatatatgttctgtacaatatgattggcaacataggtgctgctgctgtacaaggcagcggacaccgttactgtaactgtaaccattggaagagtgcatcctcaaacagtgtgttgtttccatgtagagcgtgcccccaacatgttgggttggaggtgatcaggtttccagcgcgtgcgtgcttggttgtacaagaataactgtcaatagcttcccttcgcttccctcgagtcattgtgttacgctggtcctgaattttttgcaacttacttttatttaaaaaaaaatcacatttagacctct

SEQ ID NO: 1953 - DNA, 2859 bp, Zea mays
ctggcgcggacgcgcggtggcgccgtcgccgcctcaatgcagttcggaacgccgcttcctccggccgctcggcgcgcacccaccttccacgcagaccccgccgccgacgcgaggcagctcctcggcgcgctcctgccgccacgccctgcgctctaccacgttttgcaggcccacgcccgcctcgccgttctcggcctcgctaccgcgcgtgccctcccgcaactcctcgccgcccttccgcgcctgacgctcgccgccgccgacgtttcccactcctacccgctcctcctgttccgttgctccaactgtacctcggccttcgcgtcgaaccacctcctccgcgtgctcccgcacccgctcccgctccgcctcttcccgcgcctcccacgccgcaacccccactccttcactttcctcctcgcttccctctccaatcacctagacactgagcctgccgctgcaggctccatcgcctcccgcttcatgggcacccacgtgcacgcgctggccgtgaaggctggcgccgcgggcgacctgtacgtgcgtaacgcgcagatccacttttacggcgtctgcggagacgtggcggcgatgcggaaggtgttcgacgagctgccgatcgtgcgggacgtggtgacgtggaatgccgtcctcgctggctacgtgcgagcgggcatggtgggggttgcgcgggaggtgttcgacggaatgccagtgagggatgaggtttcttggagtacggtgataggaggctatgtgaaagaaggagagccggaggtcgcgctgggagtgtttaagaatatggtggcgcagggggtgaaggcaaatgaagcggcaatagtgacggcactgtcggccgctgcacagctgggtttgcttgagcaggggaaatttgtgcatgaagtggtcaagagagtaggaatgacgatgagtgtgaacttaggtgctgcactgattgatatgtattccaagtgtggaagtgtggcagcggccaaggaagtttttgatgccatgcctaggagggatgtttttgcttggaactccatgatctgcgggcttgccacccatggattggggcatgacgcagtccagctctttgagaagtttgtcagtgaggggttttgcccgacaagcatcacatttgtgggggtgctgaatgcctgcagccgtactggccttgttgatgaaggacggcggtatttcaagctgatggcagagaaatatgacattgagtcagagatggagcattacggatgcatggttgatcttctgagtcgtgctggtcttgttcaggaggctgttgaattgattgaagggatgcgcatcccacctgacccagttctctggggcacaatactgtcagcttgcaagagacatggccttgtggacttgggcattactgttggtaataagctaattgaactggatccagctcatgatggatactatgttctccttgcaagtatatatgcaaaagcaaagaaatgggacgaagtcaggaaagttaggaaattaatgtctaaccgtggcaccagcaagtcagctggttggagcttgatggaggcacatggaattgtgcacaagtttctagtaggggacatgaatcacaaagattctgcgcggatatataacatgctttgcacgattaacagaaggttggctgaggcgggctatgtaccagacgtgtcatcagtcttgcatgacatcggggatgaagagaaggttcatgcgattaaggtgcatagcgaacggcttgcaattgcttacgggttcattgttgttgaagctggcagcccaatccgtattgtcaagaaccttagtgtgtgtggtgattgtcatgagttcagtaagatggtgacaaaggtttttggcagggaaattgttgtgagggatggtagtaggtttcatcatatgaaagatggaaagtgttcttgccatgattattggtgattaatcattcgatatgtttcttctcaactatgatgtggagtttaggccatgatttcaatatatttgattggcaagctggtaattgacatgagttctgtttctgagagattccgatataccatttcagatgccatgtaaggcctctcctcacgagttcatagctccacttataagaggcagccaatgatccctacatcttgttgcctcctaagaaatttctggggcatcggtgcagcggtagagcctaccgtctgtaaccggaaggtctcgggttcgagccccagcctctgcatattacgtgggtaagacttgtcgcttaaagatacccttccccaaaccccgcacagtgcggaaagcctacaacactgggtgcgccctttttatcctcatgaagcaagagtgtgctttatcttttctgggatactgaaggcaatggttaaaaagtgcatgatggagttggatcatttctatggatacatcaaagaacagattgaaagcagtgcaacctttacaaatactgaaggtcaagtgttttactatccacttgcataaattatactccttcctggtgacgaaggataagcaaaggaatatttgctaggacctgggaagccacaattatttgagataggaacagggggctattatgaggtatcaacatgaattttatgtaaatcaactctcagtcaaccaaattgcaagttttgtagttgaactgcctcctaggaggctaggacttgatcctccctgcctcttgttagttgtcccgttacctttccaaggtatctagaggttagagttgatctgagctgccatgttaacacctcaatcttctaattgatataactaactgtttgaaatccaccagtatcatgtagcaatagcatccttgcataaagctgtttcttg

SEQ ID NO: 1954 - DNA, 2389 bp, Zea mays
gaccgccttatcgtcaccatcttcttcggtccggtcccagccaaaccttcctcttcttcggtctcctcgtcgccatctcgtttgtggccgccaccgcgccccatccctaccctacccgggacatacatttgctatttaaaagcctagcgacagagccgagtgtgcctctgcttcctcctccctccccccctcgtctgccctcgagatcccacaccgcgcgcgtgccacgttgtcttcgtcctctgcgcgccttcggtcaccccgccgcctgtactgtacatgcggtagtacggcgcaggaacaagaaggatttgccagcatgagcggggagctgcaggtgcatgcatctatcgttgggttcttggcttggttggggggtgaactgagtctggatgcgccgaacgggatgttgggggaggcgagagtgagagcacggtcgctcgcttgaggtgcggcgccgtctgccgtgcggtgtcgtggcggtctagtagaggaagctaggaagaggatgatgggagctctgcagctgcagagcaatggcgacggcgctgctgagggactcttaccggacccgggctacgtcgaggttgatcctaccgggaggtatggcaggtacaacgagattctcggcaaggggtcctcaaagactgtgtaccgggccttcgacgagcaccggggcatggaggtggcgtggaaccaggtgcagctgcacgacttcctgcgcggcccggcggagctggagcgcctctacggcgagatccacctgctcaagtccctccgccaccgcgccgtcatgcggctccacgcgtcctgggccgacgccgccgcgccccgcctcgccgtcaacttcgtcaccgagctcttcacctccggcacgctgcgccagtaccgcctccggcacccgcgggccggcgccgccgcggtccggcgctggtgccggcagatcctcgacggcctcgcctacctccacgcgcgcggcgtcatccaccgcgacctcaagtgcgacaacatcttcgtcaacggcagccagggccaggtcaagatcggcgacttcggcctcgccaccgtggcccgccgccgcggctcgccgcacgcggcgcgctgcgtcgtgggcacgccggagttcatggcgcccgaggtgtacgcggagggctacgacgagcgcgccgacgtctactcgttcggcatgtgcgtcctcgagatggtcacgctcgagtacccctacagcgagtgcgtgcaccccgtgcacatctacaagaaagtcacctccgggataaagccggcggctctgtacaaggtgaaagaccccgcggtgaggcggttcatcgacaggtgcctggcgccggcgtcgcggcggccgagcgcggccgagctgctcagcgacccgttcctgcagctggaagacggctgcggcctcggctacggagacgacgcggactacagcgccatgtacaactacctgcaccagcccgcgtgcctggaccaccaccaccatgccggcagcattggctccacggcgagcaacggggtggtgtccaatggcggcggcggcggcggcggcagatgggacgacgagtccgaggacgaggacgacgatggcagcatgttccaaggcatcgaccagctgttcaacgagcacgaagacgacgagctgcacgttgctggtgtcgacatcaccatcaagggcaagaggatgcaggacggacgcatcttcctccggctgcgtatcgccgacaaagatggcacagggagggtccggaacatctacttccccttcgacgcggacgcggacacggcgctgagcgtggccaccgagatggttgcggagctggacatcaccgaccacgaggtgacccacatcgccgagatgatcgacggcgaggtgggcgcgctgctgccgcactggaggccgggtcctggcatggacgacgacgacggcggcggcgccggtccggacacgtcgggcgctaccgaccgctgcaagaactgccggtccagcgcgtcctccgccgggtcgctggacgactacatgtcggcggcggcggcggcgcggcgcggctgccggtgcgcggagctgcacggccggttcgaggagatcacgttccaggccgacgaagagcaggtgcggttccagggctctgggtgcagctccgacgacggaggcgggcaggctgagcagtgcgccggggacggaggcagtactgtaactgaacgttcagaccagccatgacctggttcctcgcaggagcaactcctgttttaaaaatctgaaaatgtcaccagtgcagccgcacagctgcttgtaagtgaacttttttgtggctctggttgagcatacgatcgttaagacggatatagtttgaagtttcaacaggcaggtgctttccct

SEQ ID NO: 1955 - DNA, 1220 bp, Zea mays
ctagaagcggggcccacccgaaacgctagacctatcctcttcttcccgtggcacggccaattttgcttccggctgccgctcttctccgccgccgccccgatccccttcctccccaagcccttcaactatccactcccgcgtccccggagaagcggcgagatgtacggcatcctgacctccccctgccctcgagccccgcttctccgcgctctcccgagcccatccgcccgcgcattccccagaacactagccttccccgcgaggcccctcccccgcggtctccgcctgacccctccgcacgccgccgcggaggcatcggcggcagccacggcgttgggcgggcttctggcgtcgccgctctcgactctggaggccgccctgcggggcctcaacctcgcgccccttcgcgcccccgtggcggcggcgatgtcggcggccgtgcggtggctgggagtgtaccgggaggtgctgctcgtcggcgtgctgctctcctggttccccaacatcccctgggaccgccagcccttctcggccctgcgcgacctctgcgaccccttcctcgccctgtgccgtgaggtcatgccccccgtgttcgggcgcaagctcgacctcagcccgcttgttgcattcatggctattgacatcatcatcatgatcctgcgcccgcagccacgcatgtgatgactccctgcagcagtggtacgggttcacttgctctgatgatttcacttgagtacgagtgcacaagttatgctgtcatgctgtgaaagcttattagagcaattgaccatgttatgatgactctgttattgtcattatcttcacattttgcattaagagtgagttagattggtcgtgctatgtatggacattaacttgctggttgcttgtgcaatgatataacatgaattcatcttgtcatgccaggttgcatttcttaatgctacaacagggaacatgtcatttagacatttagttcatgataaagtgatagccataccaattgatatttcttgttcggtaaattcacatgcttgtgcaatgtgtaaactagatttcgtgtacaatgctaagtatttgagaatagcaatgtaaactgcattgatatatgagtgtttatgtgttaacttgtgcgtatgcaatgaatttggtcaggtcttgtggtaaaatttgtttcttgatcctgcatgtggataacctcactttcatgctgtacacaa

SEQ ID NO: 1956 - DNA, 1678 bp, Zea mays
atgaggctgagcagcacaatgaggagggtggagcacaatgaggaggtggaccacgtgacatgggaccaggccgcacagcatcaccagccatgggaccagtgggaccaccagagagagcagcaacaagcgtgggaccagtggggccaacagggcgaaccgactgacaacccgatggatgatggctcgggaggctcttcagcgacacgcacacgtcgctcaagaaaaagccactcagtaaagcctcgtcacgcgatagagcgagaggctgataggactttaatcatgccacatggagatcggaattgggaggacctgtcctttgacggcaagggacaccacactcaggttaaccttacgttgggttctctttgccgccttcactaccctggtatagtgaaggtgtcaaacggtgataccgaggatgaggtgctcgtcagtacctgggatgagtacaagtttaaaaaggaacgaaaccacaccgacagacagggacttgtgcgtaatgacttttggcttcgatatcggttgcctgacggagaggattacatggggcacgctgaacgtgtcttgcaaaacaatgcaaagaagctggtgaaggatgccatatactatgcgagaattcaggctacaaacctgtattttcaaaagcatccagaagaagcgggccccttgaataaaaagaaagggtcctcaaagatatatttgactgaggatcaatatcgtgaggtgatggttccatggatggcgcccgtgcctgatgcgtactatgcttggtgtcgatattgggctttcgaaggcttccagaaagcgtcagcgcatcacagacaatgtcgaggaaccaatcctaaccacaagtttggcggtgacgacatgatacgaaaagctaaaagaatggaagctacaagtggccaaaagcctagtgacattgaggtgtaccaggagggccacaaaggaccagacccgaacaaccctgaccagctctgcagccagacagccacggatcgcttggtgagttttggctcaaaagttcaaacgttcaaagtatataaattcctgcatttatacgcactcttcgacggattcattgactcgtcgtcggtgagatctcagaggacgggttcatcttcccgtagctcatgctctcgtcgaccgaacgagcaggagttggagattatgaggatgcgtgaagagatgagacaacaacgcgaatttatggaggcttgcaatgctcataatcaagcgatgtatcaattaatgcagcaacagggcatgacatcaaattttccaccgccaccacaatggagccaatttgcaaacacaccagttccaccaccacagttcaccacccctccgacacatatacctgcacctggagatagggttacgcctgaagcgggtggcagtgggtctgatccagcagtagggactggatttgttgactcgctcttcgcgttccctcctcctggtggtgaaggcggcagcggtcaaagctctaaccacccaagtggtggttatctctaaacacttaaacttatgtttgaaatgtcgtactcgttggtggatgttatgtttcaatactatgtcgtactcgttgtttgatgttggtggatgctatgtttgaatactatgtcgtacacgttggtggatgttttaattataaatgcaagtgtttatgtct

SEQ ID NO: 1957 - DNA, 2479 bp, Zea mays
ttctggttccacgaaggagagggaacactaggaaaccaagccagcatctgatctttattagctgcttctctgttcctagctcctcccatatgggagtacttcgccaaggcaacacacggggcaaacaggcattgcgagaactcagaagctgctctgctataatggctctgctataaggtggagaagagaagccgatggccgcagccgaggtcctgacggccgcatgggaggaatggggcctgcgggcgctggtgctgctcagcctaacggtgcaggtgacgctccacatcctggcggagttccggcgccacgtcgactccggcgcgctgagggccgtggtatggtcggcgtacatggcggccgacgcgacggcggtctacgtgctgggccacctgtccgtggccagccggtcgccggagcgcgagctgacggcgctgtgggcgccgttcctgctgctgcacctgggcgggcaggacaagatgacggcctacgccatcgaggacaaccagctgtggctgcgccacctgcagacgctcgtcgtccaggtggccgccgccgcctacgtggtctacgggtcctccgccatcgtcggcgcgcgccggctccccttgctcctcgcggccaccgtcaccatgtccgccgtcggcgtcgtcaagtacggggagcgagtgtgggcgctccggcgcgccggcactagcccgaccggcaactacagcagcgacatcgggaagaggaggttcaacctggcggtgcccgattctttcatcagccgcttggatcccgcggagacctacctgctgcacgctcacctgctgctggacatggccaaggacaggttcaagggtccgctaccgcgtctgtatctgtgcgggcccggcagccaggaaacgcagctgcacggcgaggaggagctgtacaaggtggccgagctgcagctgtcgctcctgcacgacgtcttctacaccaaggccgaggccacgcacacctggtgcggcctctgcgcccgcgtgctgtcgtcgctggccaccgccgccgcgttcgtgctgttcaacgcgctgctcctgggcgcccatcgccgcaagctggagggctacagcagaggcgacgtggcggtcacctacgtcctcttcgtcggcgccgtcgtgctggaggccgcgtcgctcgtgagggccgtgttgtcgagctggacatgcgcgctgcttgtcaagcacggctccgaaggcagcgcggtgtgcaactccctagcccccgcggccgtgtacctccgccggctggtccgcgcggcggagtggaggtggtggcgctgctggtcgcgctctatggggcagctcggtctggtccagctgtgcgtgcgcagcagggccagccggtacagcagggtcgctagatggatgggcgtggaggactggtggaacacgatggcctattccggcccgtccgtccccgtgtcgccggacgtcaggaagctgctgctcaagagcctgaaggcgaggccgtgggatcgagagcagttcgagagcagagggctgtacggccgggagctgggccttgactgggtcgcagagtcgaagctggaggcgaggatcctcgtctggcacgtcgccaccgagctctacctgtactggtttaacaaggatcagctgccgctgccgctgccggccgccggtgctggtgttgcggacctcgtcgaggtcgctcagtcgctgtccagctacatgctcttcctgctggcatcgcgcccacacatgctgcctcccgacgccagccgcaacgactacctcgtggtgtgctacgctctcaccacccacgagaggtacagcacagccgacgatctgctctcctcgctacagcgctttgcggacgcgctgtgggccaacaactctgcgccggagtacgaactgcgttgcaagaatactaatcggcgtgggtacaaggtgttgaggggaggatgctcgcttgctgcgttcctcatccaccaccaacaccaagaagactcctcctcctcctcctcctcctcgcctgccggtggcaccggcaccctggaaatgatctgcagggtgtgggcgcagatgctgtgctgcgttgccgacgagtgcagcgccaattctcatgcaaagcaactcagcggcggcggcgagttccttactgtcgttgctcttgtagccaaattcatgaggtccaagaggttgtcctggcacttgcacatagaatctcagcgtacagacgaatggtaaattatacgtactagctaggtagggcgactgcttctacaagtatggccatgcctgttctgtgtgtgcactggtcgtttgtttggtttactggtcatctgcaagctggccacaagtagtaggtggtgtttttagttggctgttttacaccatgcattgcattaagcaatacgccgtagccactctctggcccacaaaaaaaaagtctaaaatcaagaacaccttagccaattgagatcgatgccttc

SEQ ID NO: 1958 - DNA, 1930 bp, Zea mays
caagagacgtttggtcatcacttgaagttctgagcactagctggaggcatggctttgcagtgccttgtagactggaagggacagccagttaacccaaaaaggcatggtggggtcaaagccaccatgttcatctacttcctggttgtgatgacaaacattggaaacatcccgatgctgttgaacgtggtgagctacttgcatgggaagatgcacatggacatcgccgacgcctccaccaccgccaccaacttcttcggcgcagtctgtgtcttcaccttcctcggcgccttcgtctccgactcctacatcacgcgcttctacactatcctcatattcgccccgatcgagattttgggttacatgctgcttgcatgccaagcccacctgccgtcgctgcacccggcaccgtgcgacgtgaccaacagcagccccagcgagtgcaccacggtgagcggccggaacctgagcctgctgaccctgggcctgtacctgatcccggtcggcgagggcgccgtgcgggtgtgcgcggcggcgctgggcggcgaccagttcgaccgcgaggacccgcgggagctccgcggcgcggccagcttcttcaactggtacaccttctgcatctcgctgggcggattcgcggggctgctcttcgtcgtgtgggtgcaggacaacgaaggctgggacctcgccttcgcgctctccgccctcgtcgcgctcctcggcactctcgtcctcgtcgccggcatgccattctaccggcaccagaagcccacagggagccctctcacaagaattcttcaggtttttgtggcagctttcaggaagaggaatctttcagtgcctgaggattttgttgggacgcacgagatgaccaccggggaaacaggcaccatcgttgaagtgctggagaggacttcaggtttcaagttcctcgacaaggcggccgtgaacgacggcgacgcgcggcggtggtcgctgtgcacggtgacgcaggtggaggaggccaagatcatcctccggatgcttcccgtcttcgtgagctccgtcctgggctacctcccgatcccgctgctcctgacgttcacggtgcagcagggcgggaccatggacacccggctcggcgccaccaacgtgccgccggcgagcctcttcgtcgtccccatcgtgttccagatgctcatcctggtggtctacgaccgcgccgtcgtgccgtggctgcgccgcgccacagggtacgcgggcggcgtcacgcacctgcagcggatcggcgtcgggttcgcgtccaacgtcgtggcgctcgccgtggctgccgcagtcgagggccgccgcagggccgagggcggcgccgccgccgccgagatgtccgtgttctggctcacgccgcagttcttcctgctgggcgtgatggacgtcacctccttcgtcggcctgctcgagttcttctacagcgaggcctccgccggcatgaagtccatcgggggcgccgtctgcttctgcatcctcggcatcgcgtcgtggctcgggagcttcctcatccgggtggtcaaccgcgccaccgcgcaccacggcaccagcaggggcacagggtggctggaaggcgccaatctcagcgccggccgcctcgatttgttctactggcttcttgcgatctttgaactcgtcgccgtgcttctctacctgctgtgtgcgtggagatacacctataggcaacatccgaggatgcaggtgcagtccacggtggaggatcacaccgcagccatcaagcaagatgcagcactttgacgatggcatcgttaattgttagtagttcacgtcatccatacatgtgtcaccaaataagtaaggggtgtttatttgagattataatctacgtagattatataattcaacaaactttaaattaagttagtttaaagtttattgtattatataa

SEQ ID NO: 1959 - DNA, 921 bp, Zea mays
acgtcctcgctttcccttcctcccagctgcctgcccccccttccctaccctagctacgcacgctaccagctgccccccatccatgccgtccaggaagctggtggaggactccaaagggatcgcattgatctattctcacctgccgcctgctgcatgcgatgcgagtcgacgacaagatcagtgcaatccctttggaattttccactcgcgccttcacccccgccgcacgtgccacacgcccctccatcttccatggattccatctctcatcaggtatctctctctctatctgctcttgcaagctacttccatggatttgatttttgttaagttcgcctacttgctctccacgtacgtactggctacatcgtttctgcgcaccacacacccaccaggccatgaggaatcaatttgctcatgggagcatgatgatgcagacaagtacaaacatagtatataataaaaatagctgccgattcattctttcctttcgctcatcgttttcgtagttaattcattcattggcatggttaagtatgtgtaaatacttacatgtagatatatcagggtaaaggtccagacaggacccatttaagaggattgaatatgcctgcagcggtcggccgccccaactgcacctgcacgcgcatcagtgtatttcgatcaactctctctgtcctttctgctttctccaaattaatacacttattcctcagacgacactgtcgctcactagtcaaagcagtatctagtttttaccactttagagtgaaagatacatatatttttaaaatactctgtttagcattacattacattgtaatattcagttttgattgtgaattggagatgacagcattaagaagacaaattgatgatgagattactgttcgccaattcatgatgagattttcaaattca

SEQ ID NO: 1960 - DNA, 3177 bp, Zea mays
gctgtacaaaaactgatgccgaatagcaggggggaaaatggacagaaagccagccggtaaaaatagcttcaggcaacaggagaagcaggtgagcccaaatccgtgcctgctctcttgtttacttgctgttttttttcttcttctatggatctaaacgttgcttccgctgcaaaacttgcgcctgcattcctggctcttgctatggtgtttcataattttttactagagaaaaaaaatgagaggttggactggaatgacctggtcctggctgggccttttgtccttcattcacattcccaaactgctccatcactttataccgccgtctcatctcgtgctcgtggtgtccgtgttcctcctcttggcggggccggccagaaaagcttgctggacggttggctccggaaaccggatgcgtctcaggtcaggcgcctgatttttacttgggttcccatggttcgtttccacagcgcaaaccacctcccagcttttagtcagtatagtctgctggagcccatggaggtgcagctggcgacggagcaaccgggggacccgttcctgccgctgcggtgggagagcacgggcgaccagtggtggtacgccacgcccatcgactgggcggcggccaacggccactacgacctcgtccgggagctcctgcgcctggaccccaacctcctcgtcaagctcacctcgctccgccgcatccgccgcctcgagtccgtctgggacgacgacgcgcgcctcgacgccgccgccaggaaccgcgccgccgtcgcccgccgcctgctgctcgactgcgagcccgataacgacaagcagcccccatcccgcggaggcggaggcgacgccgccaaccgcctcctccgcgccggctacggcggatggctcctctacacggcggccgcggccggggacgagaggttcgcgcgggagctgctcgcggcgcagccgctgctcgtcttcggcgagggggagtacggcgtcaccgacatcctgtacgccggcgcgaggagcggacgccccgaggtgttccgcctcctgttcgacgcggtgctgtccgcggcgccggcgtgcccggtcgggggtgacgacggcgagtttaggcgcgagatgatgaaccgcgccgtgcacgccgcggcgaggggaggcagccttgccgtgctcagggacctcctgcgcggctgctccgacgccgcggcatacagggacgcgcagggatcaacgatcttgcacgccgcggctgcaaagggccaagttgaggttgtgaaggatctgattgcatctttcgatatagcgaactgtgtagatgaccaagggaacacggcgctgcatatagcagccttccgaggccatgtccaagtggtcgaggctctcatcaccgcatctccgtctcttatatcagcaacaaacgaagccggcgacacgttccttcacatggcactgactggcttcgggactcccgagttccaaaggcttgatcgccagacggagctcattaggcaattagcgagtggagcaatcgtggatatcagcagcagcactattatcaacgcgcagaatgacgacgggaagacagctcttcacttggccgtggtttgcaacctgcattcggacgtcgttaagctcctgatgagcgtgccttgtattgacctcaacatctgcgacaaggacggcatgactcctctggatctactcaggaagcagccacggacgacggcgtcagagatactgatcaaacaactgatcctggccggtgggttcacaagctcaagggaccacgagactaggtcggctatcgcttctcagctgaagatgcactccattgtaggaagcccggggacatcgttcaagataccagacggcgagatcttctttctccacgctgctggagtcgacgtgtcgggcggcatcggcgaaggaggagcagcagtaccgttttcctccgttattgctagggctgacgtcctgcatggacccaaactgaagaggctcaactctttccaagacgcggcgaagcatatcaaggtcctattcagatggcctcgccgcggatggaacaagtcaggcagcggcggccgaaagggtctggacgacgacgatgcctcgtctgtggactctgccaagacctggagccacgaggagaccccgacaccgctgaggcagaggtattccaggatcggctcgctgttcaacaagcggacctacgcagcaggcagggcttcacctagcgaagcagtgaagaagggtggagtggtacagccagctggttctactctactttcgacatctctgtcgtcgtcgtcggcgtccttggttgacaggttcgaatctgttcatcaggacaacgatcagtctccttatgtcagtaggttgatcaggcacacacctaagaaatctggatctctcaacagtagacttatgaaccagtccttgcgcctcagggcctaagataggcagcaacatcgacaaggcttcttgcttccctcactagctagctggttacattttacagcttcactggtagcagacacagataattctaaatatctagccgccctgccacagcagcaggtttgtatctctgtggttgccggagagtgggtttgagcttacttagggcttgttcggttagctctcaatccatgtggattgagcgggattggatgggtttgaatcccaaacagctcaaacttcttcacaattttttccaatcccatccaattcatgtgtattgagaataaccaaacaagcccttagtgtttgtgttatctcaaaatgcgagtaatgcgatcttgcaatgcgatcttgggatattcatgtacatgatatctcaaaatgctagcaatgcgatcttgcaaaaagaatttcagcatagcggggaaaccatacatagaaagataagcgagttctttggtataatccctactctaactcaaagatttgtgaagctcccaagtgtaaaccatccacatgtgaagattacatccaatcctcggttttggccttactttcagaattgtattggtgcaattgatgggacacacgtccccataactattagtgaagagagagcccctccatttagaaatcgaaaaggaaccctttctcaaaacgtgatgttggcgtgcgacttcgatttgaatttcacattcatctcatgtgggtgggaagggt

SEQ ID NO: 1961 - DNA, 2163 bp, Zea mays
ccgcacgcgagggcgagagcgaggcgccgaggcggcgcacacacagacacggcacgcgcgacgcacgcggcctcacgccgtcacctgctccactccgctccgctccgctgccgtccagccggtccaggtccatttagcgaggcggaaagggaggggggcgcgagcccagcggaagccccgaccccgaccccgaccgcgacccggaagaggaggaggaggaggaggaggaggaggaggagagagagagagagagagagggagagggagggacagacggggcgcggcgaggaggccggcgccggcggcccgcgctcgcggcgccggcgatgggggaggtggccgcgctgcgccagctcgtcggccaggttcaggagctctgggacctctacggcgccaacgcccaccccctgcccaggtggtatttacttgactttgaacatggttcaatcatggatgattattgtggaggaaggtctggatacaactcagaattactgaagatcatggaagctaaccaatctccccctcgcaagcgaccgcggagagatcgaaaccgtgaaaaggcaccctcctcaaacaagactgaagtaatgcaacaagagatctggagagatttccctgaagatctttttgaaactgtcattgcaaggcttccagttgctgcaatttttcgattccgcactgtctgccgaaagtggtcttctcttttgggctcagacagtttctctcatcagtactctgaagctccacgtgggctgccatggttctatacaatcacccatgagaacgcgaacaacaatgttgcaatgtatgatccttcgctgaagaaatggcaccacccatccgttcctctcactcctacaaagatagttattccagtggcatctgtgggtggccttgtatgtttattggatctgagccacaagaatttctacatttgcaaccctcttatgcaatcactcaaggagatcccaccaagatcagtccagggatggtcaagagtcgctgtagggatggtgttgaatggaagaagttctagtgatggctacaaagttatgtggtttggaaatgatgggacttttgaagtctatgactctacaaagaacatgtggtcttgccctggaacttttcctccaagcatcaaacttccacttgctctaaatttcaggtcacagcctgtggcggttggcagcacggtatacttcatgtgtgcagagccagatggtgttttgtcatatgatgtaagcactgggatttggaggcaatttgccatcccactgccaccgcatctgaccgaccacacacttgccgagttccagggaagggttatgctggtgggtctgctgtgcaaaaatgcagcgacctgtgtctgcatttgggagttgcagaagatgactctcctctggaaggaggtggacagaatgccaaatatctggtgcttagagttctacggtaagcacatgaagatgacatgcctgggcaacagtggtttgctcatgctctccttgaaggcgaagcgtatgaaccgccttgttacatacaaccttctgaaaagggagtggcaaaaggttcctgattgcgtgctaccatacagccgcaaaaagcaatggatagcgtgtggcacagcatttgatccggtcccctgcgccttggcctgacatggaatttaccttctttgcccgagtaccataatactatagtgaattcgtatcattggcctatatttttagatctttctaatgttatgatgagctctgcaaaaccgcgttcactgtggtttgttttctatcacgctgacgcatttgaaccgtttcctttgatcacctgctgctacttgggtcactgctacatcaattgggcaagtcgacctgaatatgtttcattgaagtaaaaaacggaacgccaggtgtctgtatttggtcttggttttggtatgtaccgtcaacttgtaatctttctgaacttgcagtttcctgtccagaaccgagtttattatacaataaagaccgggatgttgacgttttgattctggtgcatggagattgtgtttcttgttattaccatgaaaacacatgtacatgtacttctgtttcaggctgcctactatttatcaatttatgtgcctacttttgatgcctgaactatttgcttcaacttcgtatg

SEQ ID NO: 1962 - DNA, 2972 bp, Zea mays
tggcaaggcagttgtcgtgtcgccgttcgcgtcgcgctgcacgctcacccaactcccttcactcccaagccactaccataccatacttccggcgagcccgcgcacgctcaggcctcctatatactctgctcgcgtgctacgctactcatcgccccgagatccatcactcgcattctcaccggcgagctcagggctcagcatccgcgcgcctcctctccaagcagaccaccaccgccggaagcatggccgcgccgctgcttcggcaatggcgcagcctcgccgtgctcggcgccctcctcgggctccacctcatcgccgccgtggcgcagtcgccgccaactacacccacgacccctgccgcaccaacgactccggccgcacccacgacccctgccgcacccacgactccggctacacccacgacccctgccgcaccaacgactccggccgcacccacgaccccggccgcacccacgactccggctgcaccgacgacacctatcgcacccacgactccggctgcaccgacgacccctgccgccaccccggtcgcgccagcaaacccgccgccggctccgacaacgccagcgcccaccgccaccccagtcgcgccagcgaagccgccgccggtcgcgcccgcggtcgcgccggccaaacccccgccggtgacgccgccaccagtgacacctcctcccgcgacgcctccacccgcgacgccgcccgcggtgctcccacccgccgtgctgccgcccgccgcggcgcctccgccgacggcgacgcctccggccgaggcgcccgcgtcgctgcctcccgcgacgacgcccccgcccgtggccgaggcccccgcggagctgccgcccgccgaggcgccgtccaagggcaagaacaagcacaagaggaggaggaagcagcacggcaagaaggaggcgcccgcggaagcgccgcagccgctgagcccgccagctcccgccgcgccgtcgccggctgatctggaggacgtgtccggccctgcaccgtcagccgatgtgaatgcgagttgccggcagcaccagaactgggcctccgtcgtcgtgcagaccgccatggcggcgcttttgttatcgctagcgtggtaaactaataaatcccagagagaaacgaaagatccatatatcagcgtaccagctcagctcatggtttaattatttccgcccttcctgttcatgccgcaccatcatacataggccggtgagattatctgcgggatttgttataggaaccgttggattgtggcttgtggtatttgtttttgacacattctgtatccattttttcgttaatttttggaataaagacgcacacttgctcacacaaactactgcgaaatgcgattgcgatgcctcttatttacaccttgacgcatctaggaacgaacaaatgattcaagcatcttcggttacatagagacgccactccctgaaggaacgaattacacgcaagaacaggcgaacagctaaggatctgaacaattctccacgtcttgagttcaaaaaaaatttcagcagagtgttgaaggaacaaagctgttcgatctagcagtagcagtgacggtcagatggttcagtagatgtgcatttagtcgtcgtccacttcatgaaaaggcagtggaaccgtcttcaccgcacggaacttgccagcgttgttcagatgctcattctccagcctgaaattttcagtgcttggttcagtctctggctcgatgggtttgctgttcaagaacgggaccgtgcagagctgtagtattaattataggggttttttttacctatagaagttccaatgccctcgccggatcacctcgagggccgctaggaagaaggaagtgaccctagaatccaagctcccaaaatttggatggatgatggtctgcagccaagcgagcctcagcacaaggttcagtccctgcaaaaaaaaagaaaaaagttcagacaggaatcagaacatttcactccagccattggttcttctggaacgtgatgcttcgcttgtgcagaacaaatagcatgctcgtccatctagacattatggtggaaattttaatgttagatactgagtcgaaaatgcatttttccatctagacattatcgtgcgtgaccagagttctgttttgatccttgatatcgctcagtccagtcggtcagactgaaattctgaatgaccaagcactttgttctggaagaccgcaagacactgcaactgaaccttccacagcacgtacggtgattagctgagggacgtacgtaccattgacaggtagtatatggatttcctcctgaggatgaggtcgttcctgagccaggggttcttggagttgggctggagcaggccccagtccttgacgaagtcccagtacagctggtacaccgtcgcgccgctggacacggcgacgaggagcgacagcgacgccaggctcctgtccttctcgtacgccactttggcgccggcggcgagcatggcggagacgtacttgcccaggttcaccaggtggctcgtgtccccctcgtcgaaccacctccgtgcgcactgcccacccaacgatcacgtttcagacattcagagttcagacagccccatagactgatgagtctgcactctggatgcagcggggaagaactcgtcacgtcacctgcatggctctccagtagtacggcaggaaggagacggcgtaggccaggtctctgatgtgcttggtgttggtgcagtagccgtactcctgcgtccagtagctcccactgatgtaatagcacgccaggtactccaggctccgtagcataggcacctgcatgttttgccatctcttttgtcagactcccagatgttcatctttatatagattcgtttcaagcgatctacacaattcttgaactgactagttgtggactggtacctggctgcaaagctgatcggccatgaagaagtctaccattacaacc

SEQ ID NO: 1963 - DNA, 1827 bp, Zea mays
gaacaacgaaagagaccggactgtgaacgcactggactctgcagagttcagactgccccccgatccttcttgtgttctgtgctcgtgctcgctcgctacggcctatatatagagcctgttcagttcagactgaaccacaacgcacagttgcgtgcaggtgcagttagccagcgccagctgcacaagcttttgtcagcacaggaaggagaggagggtgagatatggcgagcctcaacgtgctgctcctccctgagccgggctccggccacctcatgtcgctcatcgaagccgggaagcgcctgctgggccacggcgcgggcggcggggacggcctgggccgggagttcacggtgaccgtcctcgtcgtgcggccgccgacgccggagtcggccgccgaggtgggcgcgcacgtccggcgcgtcgcggagtccggcattgctggcgtccggttccaccacctcccggccgtggagcccccggcggactgcgccggcaacctgcaggagttcaagtcgcggtacctggagctccacaggccgcacgtggaggccgcggcgcgggagctcggcgccgcggcgctcgtggtcgacttcttcgccaccgccgtgctggacgtggcgcgcgggctcgccgtgccggcgtacgtctacttcacctccacggccgcgctgctcgcgctcacgctgaggctgccggcccttgccgagactgtcgccgccgacttcgagacgttcgagggcacggtcgacgtgccgggcctgccgcccgtgcccgcggcaagcgtcccggggttcctgggacgcaaggacagccccaacttcacgtggttcgtttaccacggccggcgtttcatggacgccgacggcatcgtcgtcaacacggtggccgagctcgaaccggggctgctcgccgccatcgccggaggccggtgcgtgccgggacggccggcgccgccgctgtacccgatcggtccggttctcaacctcggtgcggggggaggtgcgtccggcgacgaggcgtgcgtccggtggctcgacgcgcagccgcgtgcgtcggtggtgttcctctgcttcgggagcctgggctggttcgacgcggcgaaggcgcgcgaggccgcggcggggctggagcggagcgggcaccggttcctgtgggcgctgcgcgggcctcccgcggccggatcgcggcacccgtcggacgccgacctggacgagctcctccccgcggggttcctggagcggaccaggggcaggggcctcgtgtggccgcggtgggcgccgcagaaggcggtgctcgcccacccggccgtgggcggcttcgtgacccactgcgggtggaactcgacgatggagagcctgtggcacggcgtgccgctggcgccgtggccgctgtacgcggagcagcacctgaacgcgttcgagctcgtggccgtcgtgggcgtggccgtggccatggaggtggacaggaggcgcgacaacttcgtcgaggccgcggagctggagcgggcggtgagggccctcatgggcggcggcgaggaggggcgcaaggcgcgggagaaggcccacgagatgaaggccgcgtgccgcaaggccgttgaggagcgcgggtcgtcgtacgcggcgctggagaggctgcgtcatgcgattcgcaagggtgcaaatacagctactgctcatttcaaggcgccgcagccgctcatttgagaattgaatgagtccaagattccagacgttcgcgacggtgtccggctgtccgcttcgtcatggaaggagtggacttccgtgtttgagcttcccggagtcgacagtcagtcagtcacacacacag

SEQ ID NO: 1964 - DNA, 1266 bp, Zea mays
gttgcctggttggcaaagaaaagcaccccgaaagccacacaaacaatttgttccccctgcctaggccgccgccggggaagcggggaaaaagatcccgtcccaatggctctcctcccccaaatcctccactctcctcaccccgcgctcgccgccgccgcctcctcctctcgcgcattctgccgagcaccacgccacctccatgtctcagcgtcccggggccggggccgcggccgcctcgccacggcggcgggggcgtccgggcccggaccatcatcgccggagccatctccccctgagtccgacgacgggctggtggagctcccgctgttccctctcccgctcgtgctcttcccggacgccacgcacgcgctgcacatcttcgagtatcgctaccgcatcatgatgcacacggtgctgcagaccgacctccgcttcgggatcgtcttcgtcggcaactcggggtccgccgcggaggtgggctgcgtcggggaggtcgtcaaacacgagcgcctcgccgacgaccggttcttcctcatctgcaagggccagcagcggttccgcgtcgcccgcatcgtgcgcaccaagccctacctcgtcgccgccgtgcagtggctcgaggaccgcccgcccgcagagcccccggcgcccggggaggacgccgaggcgctcgctgccgacgtcgaggccctaatgcgggacgtcatacgcatcgccaaccgcctcaacggcaagcctgagaaggaggtcggggacctgcgcaggggcctgttccccacccccttctccttctacgtcggcaacaccttcgagggcgcgccccgcgagcagcaggcgctcctcgagctcgaggacaccgccgccaggctgcgcagggagcgggacaccctgcgcaacacgcttaactacctcaccgccgcctccgccgtcaaggacgcattcccttcctcgccgtcttcggggtgaagtgaggtgaggtgaggtcgtcactcgtcagctaggaatggatgaggataaggagtttgtggtcgtgggtataggactgaactttgttatcactctttcaagccctttttctttcttctttctcttattattatatattctatggctaggttctatctgcatggggttagcatcttagcgtgtaaaattgtataatttggtgtgtgttaactcaagaaaaattggagctgtgatatataagtccttgaaaaggacgggaattttgctctcagagagtgacttatgcttctacccttaaattgg

SEQ ID NO: 1965 - DNA, 1506 bp, Zea mays
tctccggtgcacagtacacagtctggtgagcggtagagagagcaggcatggttctgtgcttcaagctcctcttcggccccacggccgccatcttcctgtcggcggtcgtgatcctctcctgcttcaccaacgtgccgcagctgcagctcagcctcaaatacaccggcgagctcgacagctcctacgtcgcgccggcgccggtgcccaagtgcgacatcttccggggcgagtgggtgccggacccggccccgccgcagtacaccaacgagacctgcgacttcatccaggagcaccagaactgcatgctgtatggccgcccggacctggagttcctcaagtggcgctggaagccggacggctgcgacctcccgcgcttcgacccgcacaggttcctccaggtcgtcgcgaacaagtccgtcgccttcgtcggcgactcgctggccaggaaccatatgcagtccctcttctgcctcttggccaaggtggagaagcccaaggacgtgtcggtcacggacagggcggacccgaacatgatcctgtactacgagggctacaacttcaccatgtacctcttctggtcgccgttcctggtgaggtcggaggaggacgtcgccggcgtgttcaagctgtacctggacgagcccgacagcaggtggctgtccgtcgcgtcccagctcgactacgtgctgctctcgggggccaactggttcacgcgccagtcctacttctacgagggcgggcaactcgtcggcggcgtgtacgtcccgctcaacttcaccagcagcctcaccaaccagcactcgcaccggatggcgttccggacggcgctgcgggcgctcgccggcgccaggttccggggcaaggtcatcctgcggacgctgtcgccgatgtcgcacttcgagggcggggcgtacgacgccggcggggactgccggcgcacgcggccgtacagggccgacgagacggcgccgatgggagggctggagctggagttctacacgtcgcagctggaggagttcagggaggccaagggcctggacgttgtgctcatggaccccaccgccgcgatgctgatgcggcccgacggccaccccagccggtacgggcactggccggacgagaagcggacgctctacaacgactgcatccactggtgcttgccaggacccatcgacgcatggaacgacatgctgcttcacatgctgtcacattctagttaacacagattacggtggttttgtttgtggtcattgatttggtgtagtttagtgtgtgtgtgtgtgttcttgcctcgacgtgatgtatacaatgtcctctactccgtgcaccgtgctggatggtttacccactcagcaaagttgctccatttgtaacgcaccaattggagcatttgcaagttacataaagttttcttgcagacactttttgagccattttgttgttgatgtatccgtttcgctatccaatgcaatgtttctttcaccaccgggagaaaatacagtgaca

SEQ ID NO: 1966 - DNA, 2185 bp, Zea mays
ctttgaggcaagtggcgagggcggcagtgccgggtggccgcagcagccgcgaaccgtagcagcagccaaaggccggtccactttatttactgctcgtctagacgtctagtgcagcctgcagcgcagaaaaaccagcggcgcagtgacaaaagcccacagcttcttctccctactcctccagtcctccgtcatccgtttcgctctctgccgccgccaccgcacaagaagctagctcctgcctgtaccgccccgtcatggcgatgctatcccgcgcagcctcctccgcggcccggcgcccgctgctgccgccgcctaggcttctggcggtgagggcgatggcgtcgtcgctcttcggccacgtcgagccggcgcccaaggaccccatcctcggcgtcaccgaggctttcctcgccgacccctcgtccgacaaagtgaacgtcggcgtcgtgcgtactttgcctgctccgtgaacctctgatcttctttcttttctccccccgcgcgatcgcgaccatgcgaatcttgctttctagcttgtcctcagtccccgaatcctgatgaaatggaacgggacgggtgcttttgttgcagggcgcctaccgggacgacaacggccagcccgtcgtgctcagctgcgtgcgcgaggccgagcgccggatcgcgggcaacctcaacatgtgagacatctcctcctcctttgcgaccggtcccctgccttgctttcttctccccttttccatgcgatccggcgaaaatggcatatttggaaattggaacgatgctgcgtgtttctgcccaaacggtgtgctcgatccagcgcattgcttagcttcaccttgcttactagtacaacgattggaggactaatatattccctaaatttgcaaatcagggagtaccttccgatgggaggcagcgtcaagatgattgaagagtcactgaagctggcgtacggagaagattctgacttcatcaaagataagaggatagcagcggtgcaggcgctttcaggcactggtgcctgccggctctttgctgatttccaaaagcgttttttgccggattcgcagatctacataccaacaccaacgtggtccaaccatcacaatatttggagggatgctcaagtgccacagaagacattcacatactaccatccagagtcaagagggcttgatttctcaggattgatgaatgaaatcaagaatgctccagatggttcattctttttgcttcatgcatgtgctcataatcccaccggtgtagatcctacggaggaacaatggagagaaatatcccatcagttcaaggtgaaaaaacattttccattctttgacatggcataccaagggtttgccagtggtgatccagagagagatgccaaggcaatccgaattttccttgaagatggacaccaaattggatgtgctcagtcatacgcaaagaacatgggactttatggacaaagagcaggatgcctgagtattttgtgtgaggatgagatgcaagcagttgctgtcaagagccaactgcaacagatcgcaagaccaatgtacagcaacccacctgttcatggtgcactggttgtttctataatcctcagtgatccagaattgaagagtttgtggttaaaagaagtcaagggtatggctgatcgtatcattggaatgcggaaggcacttaaggaaaatcttgaaaagctaggttcacctttgtcatgggatcatatcactaatcagattggaatgttctgctacagtgggatgacacctgaacaagttgaccgtttaacaaatgaataccacatttacatgacccgcaatgggaggataagcatggctggtgttacgacaggaaatgttggttacctagcaaatgcaattcatgaggttaccaaaccaaattgagttagggtcctaccttctttggtcgatggaagctgatggaatgagactgtgaagcggcgtttccccccctctgttcctgacagaaataagtttagcctgctgctaccatatacatggacacagactcagatgtagacactcaagttttgagagctgtgatcctgtttcatttaatcaaaaacaattttgtttttttttcatcttgtcatggcaaatgttacaccagctgcaaaataattacaataattgatcttgatccagcgtcacagttacttcgc

SEQ ID NO: 1967 - DNA, 1027 bp, Zea mays
gtctggctctcggctggtctcgtctcccctataaattaagccccccgccccctttctgcttcccatcgatcgccacacttgagagcttgccgtccagcgttcatcggatagctcctgagctcgatctcgggtcgcgcacagctgctctccccttcctcccgctcagctcgctcttcggtgctgctctcgatcgtcgtctcgctccatcaccggcggtcgcttagcctccgcgatcccggccggtggtcttcttcgccgcattatctctctctctctctctctaacacaaggacgatgtcgagccggaggtcccgcgcgtcgacggtctcggaggaggagatcaacgagcttatctcgaggctgcagacgctgctccccagcgcgcgccgccgtggcggcagccaggcgtcgacgacgaagctgctcaaggagacctgcagctacatcaagagcctgcaccgggaggtggacgatctgagcgaccgcctgtcggacctcatggccagcatggaccacaacagccccggcgccgagatcatccgcagcctcctccgctagcccaagtccgtccgtccggccatggcgtgacggccggcctctcgccatcgccagatctcagcgcattgccgagtgtgtgtgtgtgtaccacatatagcagctgaatatacccaaggacgacgtacgccgacgacaggctaaggctggtttattaattggtagggcattattaagtactactccgtattaactagggctgcctagcttaagtatggtttctctctcttccactcttggctgtttgtttccttgctatactctcctagtagcttagctccttttccatttgtttgtacttggctgcttcgtcccatgttcgtcgtcgtcgtcgtggtggtggtgtaaacctatgtgtgtggtctggatcgagttgtttcctccttgacagacaaccgaccaaccccgatcgatctgtcaacttgtactacgtacgtactggtaatatatcaatatctatatatatatctac

SEQ ID NO: 1968 - DNA, 3385 bp, Zea mays
ccgcgaccccaggtcagtcgggactacccgctgagtttaagcatataaataagcggaggagaagaaacttacgaggattcccctagtaacggcgagcgaaccgggagcagcccagcttgagaatcgggcggcctcgccgcccgaattgtagtctggagaggcgtcctcagcgacggaccgggcccaagttctctggaaagggacgcctgggagggtgagagccccgtccggcccggaccctgtcgcaccacgaggcgccgtcaacgagtcgggttgtttgggaatgcagcccaaatcgggcggtaaactccgtccaaggctaaatacaggcgagagaccgatagcgaacaagtaccgcgagggaaagatgaaaaggactttgaaaagagagtcaaagagtgcttgaaattgccgggagggaagcggatgggggctggcgacgcgcaccggccgtatgcggaacggctcctgctggtccgccgatcggctcggggcgtggaccgttgtcgcccgcgccggcggccaaagcccgggggccctaggcgcccccggcagccgtcgtcggcgcggacggtatccgcgcgcctctggcgcgcccctcggggcgctgcgctgcaacggcctgcgagctccccatccgacccgtcttgaaacacggaccaaggagtctgacatgcgtgcgagtcgacgggttcagaaacctgagatgcgcaaggaagctgacgagcgggaggccctcacgggccgcaccgctggccgaccctgatcttctgtgaagggttcgagttggagcacgcctgtcgggacccgaaagatggtgaactatgcctgagcggggcgaagccagaggaaactctggtggaggctcgaagcgatactgacgtgcaaatcgttcgtctgacttgggtatagggcgaaagactaatcgacccatctagtagctggttccctccgaagtttccctcaggatagctggagcccacacgagttctatcgggtaaagccaatgattagaggcatcgggggcgcaacgccctcgacctattctcaaactttaaataggtaggacggcgcggctgcttcggtgagccgtgccacggaatcgggagctccaagtgggccatttttggtaagcagaactggcgatgcgggatgaaccggaagccgggttacggtgccaaactgcgcgctaacctagaacccacaaagggtgttggtcgattaagacagcaggacggtggtcatggaagtcgaaatccgctaaggagtgtgtaacaactcacctgccgaatcaactagccccgaaaatggatggcgctgaagcgcgcgacccacacccggccatctgggcgagcgacatgccccgatgagtaggagggcgcggcggccgccgcaaaacccggggcgcgagcccgggcggagcggccgtcggtgcagatcttggtggtagtagcaaatattcaaatgagaactttgaaggccgaagaggagaaaggttccatgtgaacggcacttgcacatgggtaagccgatcctaagggacgggggaaacccggcagatagcgcgatcacgcgcgtcacccgaaagggaatcgggttaagatttcccgagccgggacgtggcggcagacggcgacgttaggaagtccggagacgccggcgggggcctcgggaagagttatcttttctgcttaacggcccgccaaccctggaatcggttcagccggaggtagggtccagcggccggaagagcaccgcacatcgcgcggtgtccggtgcgcccccggcggcccttgaaaatccggaggaccgaattccgtccacgcccggtcgtactcataaccgcatcaggtctccaaggtgaacagcctctggccaatggaacaatgtaggcaagggaagtcggcaaaacggatccgtaacttcgggaaaaggattggctctgagggttgggctcgggggtcccggccccgaacccgtcggctgctggcggaatgctcgagctgctcgcgcggcgagagcgggccgccgcgtgccggccgggggacggaccgggaacggccccctcgggggccttccccgggcgtcgaacaaccgactcagaactggtacggacaaggggaatccgactgtttaattaaaacaaagcattgcgacggtcctcgaggatgctgacgcaatgtgatttctgcccagtgctctgaatgtcaaagtgaagaaattcaaccaagcgcgggtaaacggcgggagtaactatgactctcttaaggtagccaaatgcctcgtcatctaattagtgacgcgcatgaatggattaacgagattcccactgtccctgtctactatccagcgaaaccacagccaagggaacgggcttggcggaatcagcggggaaagaagaccctgttgagcttgactctagtccgactttgtgaaatgacttgagaggtgtaggataagtgggagcctccgggcgcaagtgaaataccactacttttaacgttattttacttattccgtgggtcggaagcggggcaccgcccctccttttggctccaaggcccggcctcgccgggccgatccgggcggaagacattgtcaggtggggagtttggctggggcggcacatctgttaaaagataacgcaggtgtcctaagatgagctcaacgagaacagaaatctcgtgtggaacaaaagggtaaaagctcgtttgattctgatttccagtacgaatacgaaccgtgaaagcgtggcctatcgatcctttagaccttcggagtttgaagctagaggtgtcagaaaagttaccacagggataactggcttgtggcagccaagcgttcatagcgacgttgctttttgatccttcgatgtcggctcttcctatcattgtgaagcagaattcaccaagtgttggattgttcacccaccaatagggaacgtgagctgggtttagaccgtcgtgagacaggttagttttaccctactgatgaccgcgccgcgatagtaattcaacctagtacgagaggaaccgttgattcacacaattggtcatcgcgcttggttgaaaagccagtggcgcgaagctaccgtgtgccggattatgactgaacgcctctaagtcagaatccaagctagcaaccggcgcctctgctcgccgcccgccccgacccacgttagggcgttcgcgccccaagggcccgtgccattggctcagcccgcccggccgacgcgccgcggcgggccgcctcgaagctcccttcccaacgggcggcgtgctgaatcctttgcagacgacttaaaacgcgacggggcattgtaagtggcagagtggccttgctgccacgatccactgagatccagccccgcgtcgcacggattcgt

SEQ ID NO: 1969 - DNA, 1813 bp, Zea mays
tacctggttgatcctgccagtagtcatatgcttgtctcaaagattaagccatgcatgtgcaagtatgaactaattcgaactgtgaaactgcgaatggctcattaaatcagttatagtttgtttgatggtacgtgctactcggataaccgtagtaattctagagctaatacgtgcaacaaaccccgacttccgggaggggcgcatttattagataaaaggctgacgcgggctctgcccgccgatccgatgattcatgataacttgacggatcgcacggccttcgtgccggcgacgcatcattcaaatttctgccctatcaactttcgatggtaggataggggcctaccatggtggtgacgggtgacggagaattagggttcgattccggagagggagcctgagaaacggctaccacatccaaggaaggcagcaggcgcgcaaattacccaatcctgacacggggaggtagtgacaataaataacaataccgggcgcgttagtgtctggtaattggaatgagtacaatctaaatcccttaacgaggatccattggagggcaagtctggtgccagcagccgcggtaattccagctccaatagcgtatatttaagttgttgcagttaaaaagctcgtagttggaccttgggccgggccggccggtccgcctcacggcgagaaccgaccggctcgacccttctgccggcgatgcgctcctggccttaactggccgggtcgtgcctccggcgccgttactttgaagaaattagagtgctcaaagcaagccatcgctctggatacattagcatgggataacatcataggattccggtcctattgtgttggccttcgggatcggagtaatgattaatagggacagtcgggggcattcgtatttcatagtcagaggtgaaattcttggatttatgaaagacgaacaactgcgaaagcatttgccaaggatgttttcattaatcaagaacgaaagttgggggctcgaagacgatcagataccgtcctagtctcaaccataaacgatgccgaccagggatcagcgggtgttactaataggaccccgctggcaccttatgagaaatcaaagtctttgggttccggggggagtatggtcgcaaggctgaaacttaaaggaattgacggaagggcaccaccaggcgtgggagcctgcggcttaatttgactcaacacggggaaacttaccaggtccagacatagcaaggattgacagactgagagctctttcttgattctatgggtggtggtgcatggcccgttcttagttggtggagcgatttgtctggtttattccgttaacgaacgagacctcagcctgctaactagctatgcggagccatccctccgtagttagcttcttagagggactatggccgtttaggccacggaagtttgaggcaataacaggtctgtgatgcccttagatgttctgggccgcacgcgcgctacactgatgtatccaacgagtatatagccttggccgacaggcccgggtaatcttgggaaatttcatcgtgatggggatagatcattgcaattgttggtcttcaacgaggaatgcctagtaagcgcgagtcatcagctcgcgttgactacgtccctgccctttgtacacaccgcccgtcgctcctaccgattgaatggtccggtgaagtgttcggatcgcggcgacgggggcggttcgccgcccccgacgtcgcgagaagtccattgaaccttatcatttagaggaaggagaagtcgtaacaaggtttccgtaggtgaacctgcggaaggatcattg

SEQ ID NO: 1970 - DNA, 1967 bp, Zea mays
ccaaaattcatgcgcggcagaccggccgccagtgtgccagaaagactctccaagcacgtcgaaaagccgcgagtattccagttgacttgcattgcgcgcaatttgcaacacgacgacgaccggagctgatcacaccggcggttcagaaagcatatatatgtgtgtgtggatgtggttacggttcatcgaagaagcgagtataagacgatgcagctggaggcgatggatggcaacaacaagcgagcgaggtggatggtcggcgccgcgctcaccgctgtcgtcgtcgtcgtcgtgacgaccgtgctcatcctcggcgggcgaaacgttggaggagccccggcgacggctagggtgtgggcagcagtagccagcttccgccaaggttccatcgatctctcctcctcgcctccggcggcagcgcgccacgacgacagactgtacaacggcctactgaccgacagcttcgacgaggaatcctgccacagcaggtaccagtccgccatgtaccgagggaagcccggacggcgaccctccgcgtacctcatctccaagctgcggcgacacgaggctctccagcggcggtgcggcccgggcaccaccgcgtacagcaacgccctagagcagctcagggcaggcagcatgagcaccatcgcgccaccggagtgcgcgtacatcgtctccatctcgtacagcgggctcgggaaccggatcctcgcggcggcctcggcgttcctgtacgccgtgctcacggaccgcgtcctcctcgtcgaccccagcaacgacatggacgaccttttctgcgagccgttccccggcaccacgtggctgctgccgccgggcttcccggtggcgaactacaccggcttcggcgtggacaccgccgagagctacgggaacatggtgaggaacaaggtggtcgtcgagagcggcggcgttgccgatgctgcttcgacggcgggacgacgactgcctctgcctgcgttcgcgtacgtccatctccacaacgacgccaccgtcgaggacaactacttcttctgcgacggcgaccagaggctgctccggcgcgtccagtggctggcggtgaggacggacagctacatcgtgccggggctgttcctcgtgcaggcgttccagggcgagctggaccggatgttcccggagcgcgacgccgtgttccaccacctgggccggtacctgttccacccgagcaaccacgtctggggcctcgtcacgcgctactacgacgcctacctcgccactgcgcagcagcgggtgggcatccaggtgcgcgtcttcggcgcgcagcccaactcgcccgagctgctggagcagatcacctcgtgcacgcagaagcagaagctgctcccggaattgcggctcgccacgggagagccgacgccgccgccgccgccggtgcccgcgtctcgtgccaggtctaaggccgttctcgtcacctcgctcaagtcgtggtactacgagaaactcaagagcatgtactgggagcacgccgcggccaccggcgaggcggtcagcgtgcaccagcccagccacgaggagtaccagcgctccggcgccaggtcgcacgagcacaaggcgtgggccgagatgtacctgctgagcctcactgacgtgctggtgaccaccggcgtgtcgacgttcggttacgtggcacaggggctcgccggcgtgaggccgtgggtgctgtacaagtctaccaacagctctgccgtgcccgatccgccgtgcggctgggacgtgtccatggagccgtgcttccacaaaccaccaagctatgattgccgcctcaagcaatggacggcggacatctcaaaggatgtgccgtacatccagcactgtcacgacttgacctgggggctgaaacttgttggtcggaacaaataggatatgtaccaaaggggactcaacataaggctgatctgagtcgtaagttttatcttgttgtttct

SEQ ID NO: 1971 - DNA, 1826 bp, Zea mays
tatagatgccacaactagaacccgcacactgacacactaacctcactgcccccaccccctatccggtcggccacgccacgacgatcgccagaaatcaggatgggtagccaaggacaagcggcaaccaacggccggggagacgacaccggcggcggaagaacccagcaggcggcgcacttcgtgttcgtcccgctgatggcccagggccacctgatcccagcggtcgacaccgcgctgctactctccacgcacggcgcggtctgcaccgtggtcgggaccccggcctcggccgcgcgggtgcgcccgaccatcgagtccgcccggcagtcgggcctgccggtccgcctcctcgagttcccgctggactacgccggggccggcctgcccgaaggcgccgacaacatggacaacgtcccgccggagcacgcgcggcgctacttcgacgccgtcgcgctcctgcgcgcgccgatcgaggcccacctccgcgcgcacgcgcgcccctacccgacgtgcctcgtggcggacttctgccacccgtggaccacggtgctggcggccaacctcggggtcccgcgcctcagcttcttcagcatgtgcgccttctgccttctgtgccagcacaacgtggagcggttcggcgcgtaccggggcgtcgcccacgacgacgagccggtcgtcgtgccggggctggagagacgggtcctggtcacgagggcgcaggcctcgggcttcttccgcgaggtgcccgggtgggaggacttcgcggactacgtggagcgcgcgcgggccgaggccgacggcgtcgtcatgaacaccttcgaggagatggagcccgagtacgtggccggctacgcggcggccagggggatgaaggtctggacggtcgggccggtgtcgctgtaccaccagcgcgccgggacgctggcggcgagagggagggctaccgacgtcgacgtcgacgcgtgcctccggtggctcgacggccaggagcccggctccgtcgtgtacgtcagcttcgggagcatcgcgcaggcggacccgaggcaggccgtggagctcggcctcgggctggaagcgtcgcggcacccgttcgtctgggtggtcaagagcgtcgacgagtacgacgggaccgtgcgcgccttcctggacgacctcgaggcgcgcgtcgcggggcgcggcctgctcgtcagggggtgggcgccgcaggtgctgatcctgtcccacgccgcggtgggcgggttcgtgacgcactgcggctggaactccacgatcgaggccgtcaccgcggggctgccggtagtcacgtggcctcacttcacggaccagttcctgaaccagaagatggccgtggaggtgctgggcatcggcgtcagcgtcggtattacggagccgctcatgtacaggaaggtagagaaggagattgtggtcagccggaacgtggtggaggaggccgtgaggagcttgatgggcgccggggaggaggcagatgagaggaggcggcgggcccgcgcgctcgcggtcaaggcgagagcggccatgcaagagggcgggtcgtcgcaccgcaacctgctggatttggtcggtcgcttcgagggtgtcatgaccaaggacaccaaaggcgcgtgaagaaagatagcatggtagtaattgttggcgccggccgccggagtggctgtgccgacgacgatctcgcaacgtccgcggtgctcgcgcttcgatggacacgacgttgccactcactctctgaactgaacgagcgaagaatatggggctgccaaacgttgcagcagactcgatctcagtttccattatttattgtggtgttt

SEQ ID NO: 1972 - DNA, 6589 bp, Zea mays
taacaacatccaaaaatatgataacatatcaaaataattgattggcaaataatgctgaaactcatcaatacggttattctggtctagtaacaagcaaacataaatgagagcattttctcacagatagcctttcagcagttaccgcgaactagaaacatcaagatatcaaacactgcttcaacagaagatattccagcacaaacaataacaagcacagaaactattaagaatctaatcgacagagctagtacactagatcgtatagcttgtttgcttcagtgatgatccaggaaaatggaatgaatcacgttgtatatcatgaggatatcttgcaaatgtcctcgtattcgacagccctgagaaccttcccatcatagaggcctttctcaacctgcacttttgcacagaatttctcagtgtccactgaaagcaacctggcatttgacccccgataagccccattgacaatccgcacaagtccaccaatctgagggatcacggtctcaagctcatcttggtcgaccctgagaacatgcttgctctccaacatctcaatctccccaacatatttatcaataactttcttcaccacccctttctgcttgtagtaccccttctctgccaatgacttgctcatcactttgaccacaatcccagggcacagccagtagtccttcctattgctcctctccttggccttctcctcctccttcatcagctcgtccaatgctgacctctttgcctctgctgccttcacatcctttcccatcttcttggtcaactcattcttctcctggtctcgggtgcctgagccatcctcctcatcaaaaccaaatttcatcttcggcttatcgtcaaaaggattaaccttgggccccggcacagccttctgaagcgcaatcgcaatcttacctgttgccttatctgcctctttcgagtcatcctccggctcctgctcatcatcatccgaacctgaatactctccttcactgccagactcaggctcgccctcggcagcaccaccaccattgggtttagctaaggacttgtgcgcacgctcaatctggcgggcaatcatgcgctcctggcgctcgtcgtcagccatgtctgacttgatcctcttgcgcttgaggcgttccttgacggcctgctccgagtcacggtcgatgtaggtcatgaaccaccccttgggcgtgtcctcgaccttacagtacccctcgcgccccaggaacttgacgaactcggtgagcgtggcccaccgcgtggagttcatgtggacgtggtgccggtcggcgatgtactcgttgtagacgacggtggcggcgacgcgggagtggcggtgcgcgcggcggatgagggagaggaaggactcgaggaactcctcggagaagccctcgacgacgcggtcgggggccatgccgaacacctgcatctgcctctggtgcgactccgacatgcagtggcacttgaacccgttctcgtcgcggcactgcttctgacacatctgacagtaccaccgcagcttctgcagccccttcgccttgatccggtttgcgatcgccttcggcgtcaggaactcgtgcttccccatcgtgcgggagaggcccttgccgcacaagcaggatgggaattacaggtagaagaaggggggagcacgttggtcaaggagacggacgcgaggcgacgaggagtggattattattgtggagagaggcagcggcggaggccggagaggaggccggcgacggcgagattggggagtgcgtgaacggattggggatcgattggattggggcgagggctttgtttttttttgttgctttttttgtttttttattagacaggcgagggctttgttgggacttgggaataagtccaaggctagcaccacaaatgaacgatccggatcgcgtaaacgatcaatcaacggacgagatccagccaccgtgccagatttttcaacccaacgcatgtgaagggcgcgcatcgtatcttatcttcactctccgtccaccaaagcaaaccctacccgctcccttcccgcgccgccgccgccatggactcgatcgacgcagatctcgcgcgcacgcaagaggagcggcgcaggatggaggaggcgctggcggctggcgcgcccatggccgtgtcctccgtcaccttcgacaccgacctctacggcggcgggggcgccgaccccaaccgcttcgcgggctacgacacctccatcccggcctccgaggacgacgccgcggaggacgacgcggaggccgccaaccctgcgccgcgccgcctcgcggcctacacgggccacgccatcgccgccgccgacatcccgcggtcggccgacgacgacgacgggctgcccaagaggtcccagcgcatcatcgaccgcgaggacgactaccgccgccgccgcctcaaccagatcatctcgccggagcgccatgacccgttcgccgctggggaggccaccccggacccctcggtgcggacctacgctgacgtcatgcgcgacgcggcgctgcagaagaagaaggaggacctgctgagggagattgccaagaagaagaaggaagaggaagagaaggagaaggagaggaaggctgccgctcctgagcagcctgccgccacaacaaagcggcgcaacaggtgggatcagtcgcaggacggcgacgctggtgccggtgccaagaaggtgaagacatcctcggactgggatgcccctgatgcgactcctgggattggccgttgggatgccacccccggacgtgttggagacgccacaccctccgtgagaaggaacagatgggatgagacaccgactccagggaggatggccgatgctgatgctacgcctgcagctggcggtgccacccctggggctactccttctggggcttgggacgcgactccaaagctgcctggtggtgtcacgccaacccctggtaagaagcagagatcaaggtgggatgagacaccagcaagtatggggagtgcaacccctggtagtcttggtgctgcaacacctgctggttatactcctggtccaacgccatttggtgcagagaaccttgccacaccaactcctagccagattgctcgtggaccgatcactccggagcagtaccagctcatgcggtgggagcgggacattgaggagaggaacaggcctctcactgacgaggagcttgatgccatgttcccgcaggagggctacaagattcttgagcccccggcttcctaccagcccatcaggaccccggcaaggaagctccttgcgacaccgacacctctggggacaccactttatgctattccagaggagaatcgtgggcagcattttgatgtgcccaaggagctgcctggtgggttgccactcatgaagcccgaggattaccagtactttggaactttgctgaacgaggaagaggaggagcagctatcgccagaggagcagaaggagaggaaaatcatgaaactgttactcaaagtgaagaatggcacacccccacagcgtaaaacagcacttcggcaactgacagacaaagcccgtgaatttggtgcaggaccgttgttcaacaaaatactgcccttactcatgcagccaacactggaggaccaggagaggcatcttttggtgaaggtcattgacagagtactttataagctcgatgagctggtccgtccttttgtgcacaagattcttgtggttattgaaccactgttgattgatgaggactattatgctcgtgttgaaggcagggagatcatctcaaaccttagcaaagcagctgggcttgctactatgattgctgctatgcgacccgacatcgataacattgatgagtatgtgagaaacaccactgctagggcgttcagtgtggtggcttctgctttgggtatccctgcccttttaccattcttgaaggctgtctgtcagagtaagaagtcttggcaggctaggcacactggtatcaaaatcgtccaacagattgctattctcatgggctgtgctgttttgccacacctcaagtcactagttgagatcattgagcatgggctgagcgatgaaaaccagaaagttcgtacaattactgccctttctcttgctgcacttgctgaggctgctgcaccatatggtatagaaagttttgatactgtattgaaacctctgtggaagggtatcagatctcaccgtgggaaggtccttgctgccttcctaaaggccattggtttcatcatccctcttatggatgctctgtatgctagctactacacaaaggaggtgatgcaggtcctcattagggagttccagtctccagatgaagaaatgaagaaaattgttctcaaggtggtgaaacagtgtgtcagtacagagggtgtggaggctgattatatccggaatgacatccttccagatttcttcaagcacttctgggtgaggagaatggctctagatcgcaggaactataagcagcttgtggaaactacagttgagatggcaaacaaggttggagttgctgatattgttgggagggttgttgaggatctgaaagatgaaagtgagccctacagaagaatggtgatggaaacaatcgagaaggtggtagccaacttgggtgcatcagatattgatgctcgtctggaggagctgcttattgatggtatcttgtatgctttccaagagcagactagtgatgacgcaaatgttatgctaaatggttttggagctgtggttaatgcacttggacagagagttaagccctaccttcctcagatttgtggtactatcaagtggcgattgaacaacaagagtgcaaaagttaggcagcaagctgctgatctgatctccaggatagccatagtaatgaagcagtgccaggaggagcagcttatgggtcacttgggtgttgtgctgtatgagtacttaggagaggagtatcctgaggtgcttggttcaattcttggagccttgaaggctatcgtcaatgtcattggtatgactaaaatgactccaccaatcaaggatcttcttcctcgtctgacccccattcttaagaacaggcatgagaaggtccaagagaactgcattgatcttgttggtaggattgctgatcgtggagcagaatttgtgccagcaagggaatggatgaggatttgttttgagctgctcgaaatgttgaaggctcataagaagggtattaggagagcaactgtgaacacatttggttatatcgcaaaggctatagggccacaggatgtgttggccaccctgttgaataacttgaaggtgcaagaacgacagaaccgggtctgtacaactgtagctattgctatagttgctgaaacttgctcacctttcacagttttacctgcccttatgaatgagtaccgggtcccagagctcaatgtccaaaatggtgttctgaagtcactctctttcctctttgagtatattggtgagatgggcaaagattacatatatgccgtcacccccttacttgaagatgctttaatggatagagatctggttcaccggcagactgctgcatctgctgttaagcacatggctctaggtgttgctggcttgggttgtgaggatgctcttgttcatctgcttaactatgtttggcccaacatatttgagacatctccccacgttataaatgctgtcatggaggcaattgaggggatgagggtcgcactaggtgcggctgtgattttaaattattgcctgcaaggtctcttccatccagcaaggaaagtacgagaagtgtattggaagatatacaactctttgtacatcggcgcgcaggatgcacttgttgcttcttatcctgccctggaagacgatggggataacatctttagtcgtccagagttggcaatgtttgtctgattaacgctggatgtgcatgtccatgtgtcttcatccatattcttatgaagcttgaactgggtggtactctgagttagagctttgtattttacttggtgacacctcttgtgatgcatgtaattgaagttgcatctatttttttgtatttgcaggattgttccttctgaagggggtgcaatgtttaggaattttttttcctggtttactataatgcaactcaaaatctctatcatagtctggtcttactaacgatttgggaactgttttgttttcagggtacctcatgttgcagctgctgaagcgttacactggatttaggaccaatcctaaggctgcagcatgccaattaatccatcaagatcctatattgtgaaggacaaatgacaatcctagcgcgctgtcatctttttatgaatattaggcgttgggcatttaccgtgttttaaaactttgtattacacatggatgttgtattatgtggtgtggacaatggaacgttgcaagctgacctgaacctgattccttactgtattactgagatgttgatatgcatgtcatgttagtgtacgttgtgttctccttgtcattttgtttgtgatatcgacatgctatgtttgttgctgaagttgagcacaaatgatttgttggtcacgtctttccccgggtgccattcttaccagaaaggaaatt

SEQ ID NO: 1973 - DNA, 4378 bp, Zea mays
cacacccactttccgctacagttcactcgtacctttttccgctctccccctctccctgcgctggatccacaaaagcggcggcggccccctcgcctgcctccgtccgtccgtccagccgagatccgcgcgcggaggcggaccccgggtcgccgctcagtcgtactgctcctcagattcggttggtgcgcttcgcacccagatccaaatctcatctccccctcgcctcggcttgcttgttttgcttgttgcctcccctgctgatccgaacccaccgtgtttccggttgcttttaggtgtttccttctcttcttcggtgacgtcgacggcgcagcttctgccatcgccggccttccactcgtcaccgagccccccccccccccccccccccgccgccgctccggctccaggttactgagggaatcatctgttcaacttctgcagataacggttgcgacgtggatgagttgaactccaaacgactctgaggggtggacagagctcaaaaatggttttatgaagcttcaacatgaaacctctgatgccgaggtgctggtctcggcagcatcaaggaacctgtcgtcctcttcatcagcatttgtttcagcaaaccagtcccctttcttcacgccacggtcactgtctgcccgtgtcccagagcacactgaccctgagaacaattgctcctccaatggtattgtgctgaaaatcagtgatatactctctggtgattccttcacaccacaggaggagttaccatcagctagcgttggggtcttgccgtcagatgtgtctcctcctattagcctgtgcacttcaagcaactttggcactccagcaattgtctacaacaatcccagctttgtttctactttcaatggcccatgccaaggcagttcatcagcaaccagcaatggtggtcgttcggctccaaaggaaaagcacaagaggctagggggaatatatcggaaatcatcatcgtgccaaccgacaacgtcgtctgcctctgtcagcaggcttcgcagttacgatgtgtacgttggatttcacggccgcaaggcttcactgctgaggttcacaaactggctccgtgcagaactagagatccatggaatcagctgctttgtttctgacaggtctagatgccgaaattctcgcagccatgatgctgtcgagaggataatgaatgcttccacatatggagttgttatcctcacaaagaagtcattcggcaacccttataccattgaggagctcaggaacttctttggcaagagaaatcttatccctatattttttgatttggatgcagctgattgccttgccagagatatcgtcgagaagcgaggagatttgtgggagaaacatggtggtgagctgtggatgttatatggtgggatggaacacgagtggatggaatcggttgatgctctttcccgggtggtagatgtgcaactagaagcgaatgatggcaactggagagattgcatactccaagcaatcattctcttggccacaaaattaggcagaaggagcgtggttgatagggtgtaccggggaaaagggaggttggagaaggaggaattccctttcgctcgtaacaatgattttgtcggtaggaaaaaagagctttccgaattggaactcattttgtttggtgatgtcatgggagatggagaaagagaatattttgagctcacgacaaagcagaggagaaaaggccttgcagttaggcggtctgctaacaatcatgagcacatgaatactgatgacagcaaaggtaaggagcctgttatttggaaggagactgagaaagatattgagatgcagaggctgggtagtccattgtggcatgggcgtccactgagagtgaagaatggcgtaaggtgtggaaggaaaaaaagatctaggaagatactttatggtaagggtattgcttgcatatcaggggagcctggaattggcaagacagacttggttttggagtatgcatatagattctttcagagatacaagatggttctgtgggtcagaggggaaagccgatatattcgacagaactatttggctctgcggacttttctggaagttgacttaagtgtagatagtcacttgcatgaaaagggaagcgatcgatgctttgaagagcaagaagaggaagccattgccaaaattcgtcaagaattgatgcgtgacataccgttcttagtcataattgataatttggagagtgagaaggattggtgggataagagagtcataatggaccttctgccacactttggtggggagactcacttcatcataacaacacgtcttccacgagtgatgaacttggaaccaatgaagctttcttatttatctggtgctgaggcaatgactttaatgaagggaggtgtcaaggaccatccactggtggaaactgatgcactcaaaatcattgaggaaaagcttggaagattacctcttggcctaagtattgttggagctatactctcggagcttccaatcactccaactaggctacttgacacattgaatcgtacaccgctcatcaggaacttttcatggaatgatagagaagttctcagcttgaaaaatcatgaaatccttgtccgcctgctggatgtgtgcttatcaatatttgaccatgcagatggtcctaggagtctggcaactcggatgtttcaagtatgtggttggtttgcaccctctgcagttccaattcacatgttggctcgtgctgcacacaaagtcccaaagaagcaatggaggggtccaaggtggagaaagtggtggcgaccacttacttgtggccttgcaacttctaggatgaagaaatctgaagctgaagcagctgcaatgttaatgaggtttggaattgccagatgcagtgcaaagcccgaacatgtacagttccatgatctgatcaggctatatgctcgaaagctaggaggcacaagaacagctccggccatggtccagtcagtgtacctccaaggctcaatcaaacattcctctgagcacctgtgggcttcgtgcttcatggtttttggatttggttctgatcctctgttggtagaactgagaccatctgaactaatgttctatgttaaacagattgtcatgccacttgcaatacaaacatttataacatactcccgctgtaatgcagcactagagctgcttcgcctgtgcactgatgcattagagagagcagctgagtccatgcttgctcatgctggcaaatggagagaaacatcattctcctgctttaggcaagctcattcagaagcccagtacacttatctttggcaggagctggctcttctgaaagcttctgtactggaaacaagggccaagctgatgctccggggtggacaatatgacattggagatgacttaataaggaaggccatatttatccgtacttctatctgtggcgagcaccatcctgacactgtttctgctcgagaaactctcagtaaactcacaaggcttcttacaactgttcagcttagttgattcttatagtttaggagttcacaatatattcttttcagtgtgccttttcatgaacgccgtacaaaatgcaccagatcttgaaataacaaagtaaatttgtcttatatatcttgactgccttttgttgcttgatggttctgtctttctatcattcttggttcatcaatgtgcaacattggattgaactactgtattccagttttctgggctatacttttgatggcacacagaaaataatactgagctaatgtgtatgtaagtttgcatacctcaatgataaggtatcatagattgtgtccagttgaactcatacatggaatgttttgatttattgtgttgttagttgaagagttcggcattgcttttagttctgtagttgcatcaagtgcagctaatgttaactttagaagaacttggtgccatggatttgcactaggctattatcaacttccacattcctttgcgatgaacttgctgcatgttggactactctcagcatctgtcatgattgcaaccttcagctcagggacatatgtttttgttactaatttgctaaatcttggttgatggttggactattctctctctcgctctctctctctgactgatcttcatgtttgagagtaacctgcttatggagacttgagacagttttgtcaattggccagtctcttttgaaacgcagaggtgatatgagatcatttttgtatgttcaaatactgtcaacgggccatgattattggatacctttctttttgtgcaagttaaaggacacatttgtatctccatgcattactgtaatatctatggcagaattagcattaaatatgaaccaggtaatgtaaatatgatattg

SEQ ID NO: 1974 - DNA, 3210 bp, Zea mays
gcacgaccaaaggcaagtgggcggcagactgccttcactctcactcccgcccgtgtccctcgccctgtccgcgctgcggtgcgccctccctgcgccgctgttaatggaaacggcgcggcgtttccttcccaccacctcctcctcctcctcctgcacggcctcttcttcgctacgattcgccgcttctccgctcttcttctccttcccctgcagataaagcggctggttgccctggaagccttgcggtggagacggtctcggtctcggatccaggggagacacgcggatttgctgccatggtgaggtggggcgagatggtggaggaggaagaggacgacgagtacgctaagctggtcaggaggatgaatccaccgagagtggtcatcgacaacgactcgtgtggcaacgcaactgtcatccgggttgatagggtcaataagcatggcattttactggaagcagttcaggtccttgtcgatctcaacctcgtcatcaccaaggcttacatttcttcagacggcaactggttcatgcatgtgttcaatgtgaccgatcaggacgggagtaagcttcataacagggaggtcattgaccatattcagaaatgcctggaatcagacggctaccttgttcctccggcgaacggttatgcgctgccggaagaccagttcacctccattgagctgacgggcgcggaccgcccgggcctcctctcagaggtgtgcgccgtgctcgccaccctgagctgcaacatcgtgaaggccgaggtgtggacgcacgacgggcgcaccgccgccgtgatccaggtcaccgacgaggccaccgggcgcgccgtccacgacgcgggccggctgtccagggtgcaggagcttctccgcgacgtgatgcggggcgacggcacgtgcaaccgcggcggcacgggaatttccgcggagaggcgcctgcatacgctgatgctggacagcgtcggcggcggcggtgccgaggaggctggtggcggccgtgacgagagcggtggatgtggcgtggcgaggcccaaggtcgtggtgatggactgcgcggagaggcggtacacggtggtgatcctgcggtgcagggaccggccgaagctgctgttcgacacgctgtgcgcgctcgccgacctgcagtacgtcgtgttccacggcacggtcgacgccgagggagccagcaaggacaaggaggcctaccaagagtactacatccggcacgtcgacggccacccggtgcgctccgacgccgagcgggcccgcctcgtccggtgcctagaggccgccgtcgagaggcgcgcgtccaacgggctggagctagaggtgtggacggaggacagggtggggctgctgtcggagatcacgcgcgtgttccgggagaacagcctctccatcatccgggcggcgatcacgaccagggacggcaaggccgaggacacgttctacgtgtcggacgcgtacggcaaccccgtcgacggcaggaccatggacgcggtgggggagcagctcgggcacgccgtgctgagggtgaagcgcggcggccacgacgcgcccgtcaagcacgaggccgagggcggcgcggtgtccgtccttggcagcctgctcaagagctcgttccagggcctgagactcatcagatcctactcgtaaaccgtaatcgaagaacataataaagccctgggccttgtacatatataaaatctcacgtaggttaggaaatagtgaagcagcattgtaaatatcatatcagtcgcatggtaaatatcataccgttacaagtgcataaatctcattacattacagcaggtacagtgcagcagaaatctggccatttcatcagcttggaggaaaaccttcaggtacattcgttcgtactgtaggaagtcaaatcatgcaaattgcaggcggcaatacatgataaaatgacatttaattctgaaatagctatgcgcataaacatcatagccatcatagaagatgattcacatgaactagatggtacagaaccaaaactttgaattcttacatgatgtctttctgtcatggtcggtgactcggtgtctctccctgaagcaaaactctcaaaaactagatctgacaaccaccgtgattgcacacgatcgcaagtacacgaaaattttaatttaacaggacaagacttaggtcatccgctgggcagcttccttggcaagcagcttttccctggccttggttttcgcctgtgatttggagcccatgataccaccaccccacttcttcctgacctcatcaaacttgtcgttgaagttagcctagaagtgaaccagagttccagtcagtacacaaaccaatagcacccagactagatgctgagagaaaagatattcatgacatccaaccttgatagcctccaggattttgctgaactcaagcttgtcctcgttcttgacggtggtcaagcaaagaacagatgcagtcttcttgtgaacgatctacatgaagttatttatcagcgcacacttttggcaagccattcgacacatatagcaagcaaaaggaagttggtcgggttaaaataccgatccaaggcgtgcttttcccttgacaatgcagtatggaacctccattttcctgcaaagggccgggagccacacgaccagctcgatcggatcaacatcatgagctatgacaaccagctgggccttgctctgcaaaaagaacaaataggtaaacaaagtacaaagttttatagccagagacaccactctgttatcaatctaccactaatcactaaaagaagaagaaaacaaccaagttggtgcacacacctgctcgatgaggtaagtcacatggttaaggccgtacttcacaacaattggtttctttgactcaacagttttcccctcgttttcagcctgggccctcttcaagagcctctccttcttggcagctttgtcctcggggcggtacttaagaagcatcttgaacaagtttgttgctgaaaagcaaaatcagacagaagacaagttatacaaccacaaagcctttgtctcaagcaagttagggtaggctagagttgaaacctaacaaaagccacagatcaagaaggttcaaacatgtagatagctgttttccatgcactcttattcaaagctaaatctttgggtatattacatcctttcaagtctccttttattgcctcttccaatttaagaaaagcaaa

SEQ ID NO: 1975 - DNA, 402 bp, Zea mays
atggagcaggagagcgcgtgcaatctagggaggaggaagatgaattcgagcgagaggtggataggcctcggctcgtgcaaagcgttggaagaaagagcggagattggagctccctccgcattcggtgtggagattaaaggcggcggctgggggcggagacacgattcagagcgcgctcgcgatggggagggccggacgggagggaggcaaagatggcaggcgtccggtgcacgctcggaggagaacggggatgtcaggttgtgcgggtgggcatgggtccggcgtctacttgcgggagcggcagcgccggagacgggatgtgtggggcgcggatggcgcagagtgggtggggtggaggcgggggcatacacaggtgtggacgcccacactgctgtcttatag

SEQ ID NO: 1976 - DNA, 3388 bp, Zea mays
ccgcgaccccaggtcagtcgggactacccgctgaatttaagcatataaataagcggaggagaagaaacttacgaggattcccctagtaacggcgagcgaaccgggagcagcccagcttgagaatcgggcggcctcgccgcccgaattgtagtctggagaggcgtcctcagcgacggaccgggcccaagttctctggaaagggacgcctgggagggtgagagccccgtccggcccggaccctgtcgcaccacgaggcgccgtcaacgagtcgggttgtttgggaatgcagcccaaatcgggcggtaaactccgtccaaggctaaatacaggcgagagaccgatagcgaacaagtaccgcgagggaaagatgaaaaggactttgaaaagagagtcaaagagtgcttgaaattgccgggagggaagcggatgggggctggcgacgcgcaccggccgtatgcggaacggctcctgctggtccgccgatcggctcggggcgtggaccgttgtcgcccgcgccggcggccaaagcccgggggccctaggcgcccccggcagccgtcgtcggcgcggacggtatccgcgcgcctctggcgcgcccctcggggcgctgcgctgcaacggcctgcgagctccccatccgacccgtcttgaaacacggaccaaggagtctgacatgcgtgcgagtcgacgggttcagaaacctgagatgcgcaaggaagctgacgagcgggaggccctcacgggccgcaccgctggccgaccctgatcttctgtgaagggttcgagttggagcacgcctgtcgggacccgaaagatggtgaactatgcctgagcggggcgaagccagaggaaactctggtggaggctcgaagcgatactgacgtgcaaatcgttcgtctgacttgggtataggggcgaaagactaatcgaaccatctagtagctggttccctccgaagtttccctcaggatagctggagcccacacgagttctatcgggtaaagccaatgattagaggcatcgggggcgcaacgccctcgacctattctcaaactttaaataggtaggacggcgcggctgcttcggtgagccgtgccacggaatcgggagctccaagtgggccatttttggtaagcagaactggcgatgcgggatgaaccggaagccgggttacggtgccaaactgcgcgctaacctagaacccacaaagggtgttggtcgattaagacagcaggacggtggtcatggaagtcgaaatccgctaaggagtgtgtaacaactcacctgccgaatcaactagccccgaaaatggatggcgctgaagcgcgcgacccacacccggccatctgggcgagcgacatgccccgatgagtaggagggcgcggcggccgccgcaaaacccggggcgcgagcccgggcggagcggccgtcggtgcagatcttggtggtagtagcaaatattcaaatgagaactttgaaggccgaagaggagaaaggttccatgtgaacggcacttgcacatgggtaagccgatcctaagggacgggggaaacccggcagatagcgcgatcacgcgcgtcacccgaaagggaatcgggttaagatttcccgagccgggacgtggcggcagacggcgacgttaggaagtccggagacgccggcgggggcctcgggaagagttatcttttctgcttaacggcccgccaaccctggaatcggttcagccggaggtagggtccagcggccggaagagcaccgcacatcgcgcggtgtccggtgcgcccccggcggcccttgaaaatccggaggaccgaattccgtccacgcccggtcgtactcataaccgcatcaggtctccaaggtgaacagcctctggccaatggaacaatgtaggcaagggaagtcggcaaaacggatccgtaacttcgggaaaaggattggctctgagggttgggctcgggggtcccggccccgaacccgtcggctgctggcggaatgctcgagctgctcgcgcggcgagagcgggccgccgcgtgccggccgggggacggaccgggaacggccccctcgggggccttccccgggcgtcgaacaaccgactcagaactggtacggacaaggggaatccgactgtttaattaaaacaaagcattgcgacggtcctcgaggatgctgacgcaatgtgatttctgcccagtgctctgaatgtcaaagtgaagaaattcaaccaagcgcgggtaaacggcgggagtaactatgactctcttaaggtagccaaatgcctcgtcatctaattagtgacgcgcatgaatggattaacgagattcccactgtccctgtctactatccagcgaaaccacagccaagggaacgggcttggcggaatcagcggggaaagaagaccctgttgagcttgactctagtccgactttgtgaaatgacttgagaggtgtaggataagtgggagcctccgggcgcaagtgaaataccactacttttaacgttattttacttattccgtgggtcggaagcggggcaccgcccctccttttggctccaaggcccggcctcgccgggccgatccgggcggaagacattgtcaggtggggagtttggctggggcggcacatctgttaaaagataacgcaggtgtcctaagatgagctcaacgagaacagaaatctcgtgtggaacaaaagggtaaaagctcgtttgattctgatttccagtacgaatacgaaccgtgaaagcgtggcctatcgatcctttagaccttcggagtttgaagctagaggtgtcagaaaagttaccacagggataactggcttgtggcagccaagcgttcatagcgacgttgctttttgatccttcgatgtcggctcttcctatcattgtgaagcagaattcaccaagtgttggattgttcacccaccaatagggaacgtgagctgggtttagaccgtcgtgagacaggttagttttaccctactgatgaccgcgccgcgatagtaattcaacctagtacgagaggaaccgttgattcacacaattggtcatcgcgcttggttgaaaagccagtggcgcgaagctaccgtgtgccgggattatgactgaacgcctctaagtcagaatccaagctagcaaccggcgcctctgctcgccgcccgccccgacccacgttagggcgttcgcgccccaagggcccgtgccattggctcagcccgccccggccgacgcgccgcggcgggccgcctcgaagctcccttcccaacgggcggcgtgctgaatcctttgcagacgacttaaaacgcgacggggcattgtaagtggcagagtggccttgctgccacgatccactgagatccagccccgcgtcgcacggattcgt

SEQ ID NO: 1977 - DNA, 938 bp, Zea mays
  misc_feature (856)..(938): n is a, c, g, or t
ccatcggcacgggcgtggacgtaaaccaacgccagattctggtcgccacgcttggcagttggcaagcagcgagtggggggagacagccaactctctatcctcttcccccctcgtccatccccatcccaccgccttgctctcccctctccacttccagctgtccatggctgcagcagcgtgctcctctgcctcgccgctcctcctcccctcagggccgagacatgcgtcggcctccagggcgtggtttctcggcggcaggagcagggcgctgagatcagaggcgccgtgctgctgcaaggccgccgccgcccgtggaagcgctccgcaatgcgggacggtcggtggtggcagcagcagcacccggagggggctgctaggcgtggccctgggagcctctgccttggggctggccgcgtttgacgccgtcgccgccgggttgccgccggaggagaagcccaagctctgcgacgccgcctgcgaaggcgagctcgaaaatgtgcctatggtaactacagaatccggactgcagtacaaggatatcaaagtgggcgaagggcctagcccacccgttggtttccaggttgcagcaaattatgttgctatggtgccaactgggcagatattcgacagttcgctggagaaaggtcagccctacatattccgtgttggatcagggcaggtgatcaaggggcttgatgagggaattttgtcgatgaaggttggaggactacgtcggctgtacatacctgggccattagcgttcccctaagggtctttactttctgctcctgggaaggccaagagtacccccaaccagccctgtcgttgtcgacgtcaatttactgtacataccagnnnnnnnnnnnnnnnnnnnnnnnnnnnnnnnnnnnnnnnnnnnnnnnnnnnnnnnnnnnnnnnnnnnnnnnnnnnnnnnnnnn

SEQ ID NO: 1978 - DNA, 3382 bp, Zea mays
ccccaggtccagtcgggactaccccgctgagtttaagcatataaataagcggaggagaagaaacttacgaggattcccctagtaacggcgagcgaaccgggagcagcccagcttgagaatcgggcggcctcgccgcccgaattgtagtctggagaggcgtcctcagcgacggaccgggcccaagttctctggaaagggacgcctgggagggtgagagccccgtccggcccggaccctgtcgcaccacgaggcgccgtcaacgagtcgggttgtttgggaatgcagcccaaatcgggcggtaaactccgtccaaggctaaatacaggcgagagaccgatagcgaacaagtaccgcgagggaaagatgaaaaggactttgaaaagagagtcaaagagtgcttgaaattgccgggagggaagcggatgggggctggcgacgcgcaccggccgtatgcggaacggctcctgctggtccgccgatcggctcggggcgtggaccgttgtcgcccgcgccggcggccaaagcccgggggccctaggcgcccccggcagccgtcgtcggcgcggacggtatccgcgcgcctctggcgcgcccctcggggcgctgcgccgcaacggcctgcgagctccccatccgacccgtcttgaaacacggaccaaggagtctgacatgcgtgcgagtcgacgggttcagaaacctgagatgcgcaaggaagctgacgagcgggaggccctcacgggccgcaccgctggccgaccctgatcttctgtgaagggttcgagttggagcacgcctgtcgggacccgaaagatggtgaactatgcctgagcggggcgaagccagaggaaactctggtggaggctcgaagcgatactgacgtgcaaatcgttcgtctgacttgggtataggggcgaaagactaatcgaaccatctagtagctggttccctccgaagtttccctcaggatagctggagcccacacgagttctatcgggtaaagccaatgattagaggcatcgggggcgcaacgccctcgacctattctcaaactttaaataggtaggacggcgcggctgcttcggtgagccgtgccacggaatcgggagctccaagtgggccatttttggtaagcagaactggcgatgcgggatgaaccggaagccgggttacggtgccaaactgcgcgctaacctagaacccacaaagggtgttggtcgattaagacagcaggacggtggtcatggaagtcgaaatccgctaaggagtgtgtaacaactcacctgccgaatcaactagccccgaaaatggatggcgctgaagcgcgcgacccacacccggccatctgggcgagcgacatgccccgatgagtaggagggcgcggcggccgccgcaaaacccggggcgcgagcccgggcggagcggccgtcggtgcagatcttggtggtagtagcaaatattcaaatgagaactttgaaggccgaagaggagaaaggttccatgtgaacggcacttgcacatgggtaagccgatcctaagggacgggggaaacccggcagatagcgcgatcacgcgcgtcacccgaaagggaatcgggttaagatttcccgagccgggacgtggcggcagacggcgacgttaggaagtccggagacgccggcgggggcctcgggaagagttatcttttctgcttaacggcccgccaaccctggaatcggttcagccggaggtagggtccagcggccggaagagcaccgcacatcgcgcggtgtccggtgcgcccccggcggcccttgaaaatccggaggaccgaattccgtccacgcccggtcgtactcataaccgcatcaggtctccaaggtgaacagcctctggccaatggaacaatgtaggcaagggaagtcggcaaaacggatccgtaacttcgggaaaaggattggctctgagggttgggctcgggggtcccggccccgaacccgtcggctgctggcggaatgctcgagctgctcgcgcggcgagagcgggccgccgcgtgccggccgggggacggaccgggaacggccccctcgggggccttccccgggcgtcgaacaaccgactcagaactggtacggacaaggggaatccgactgtttaattaaaacaaagcattgcgacggtcctcgaggatgctgacgcaatgtgatttctgcccagtgctctgaatgtcaaagtgaagaaattcaaccaagcgcgggtaaacggcgggagtaactatgactctcttaaggtagccaaatgcctcgtcatctaattagtgacgcgcatgaatggattaacgagattcccactgtccctgtctactatccagcgaaaccacagccaagggaacgggcttggcggaatcagcggggaaagaagaccctgttgagcttgactctagtccgactttgtgaaatgacttgagaggtgtaggataagtgggagcctccgggcgcaagtgaaataccactacttttaacgttattttacttattccgtgggtcggaagcggggcaccgcccctccttttggctccaaggcccggcctcgccgggccgatccgggcggaagacattgtcaggtggggagtttggctggggcggcacatctgttaaaagataacgcaggtgtcctaagatgagctcaacgagaacagaaatctcgtgtggaacaaaagggtaaaagctcgtttgattctgatttccagtacgaatacgaaccgtgaaagcgtggcctatcgatcctttagaccttcggagtttgaagctagaggtgtcagaaaagttaccacagggataactggcttgtggcagccaagcgttcatagcgacgttgctttttgatccttcgatgtcggctcttcctatcattgtgaagcagaattcaccaagtgttggattgttcacccaccaatagggaacgtgagctgggtttagaccgtcgtgagacaggttagttttaccctactgatgaccgcgccgcgatagtaattcaacctagtacgagaggaaccgttgattcacacaattggtcatcgcgcttggttgaaaagccagtggcgcgaagctaccgtgtgccggattatgactgaacgcctctaagtcagaatccaagctagcaaccggcgcctctgctcgccgcccgccccgacccacgttagggcgttcgcgccccaagggcccgtgccattggctcagcccgcccggccgacgcgccgcggcgggccgcctcgaagctcccttcccaacgggcggcgtgctgaatcctttgcagacgacttaaaacgcgacggggcattgtaagtggcagagtggccttgctgccacgatccactgagatccagccccgcgtcgcacggattcgt

SEQ ID NO: 1979 - DNA, 584 bp, Zea mays
cagggcggcagcggccacctccatctcccagccccgctccccaaatctcagccccgctccttcccagtcccagtcccagatccaggatgtcctcctccgacccggacgacgcccccgacgggggcgaggactcgcccctcttccgccgcagcggggggccgtcctccggcggcaccgttggcgacgtccccgtctcgcagtcgctcatcaaggcggcaagcaacgtgtgcttctccctcttcgtgctcgccgtcctcgtcgtcaccgtcgtcgccgtcacataccagccgccggacccctggctccagtcctccgccgccatcaccacctcgctctcccgcgtcctccccaactccaccttcctcgtccccgacgactcgctcctccccaccggcgaggatttcaactcctccaccgccgtcccagccccggtgcgggatgaagatgacgcggctgcggccgtcagcgccgcctccgccgcggccgcgggcaacaggacctgcgacccggattcgcggcgggggggggggggggggggagtgcttcgcgcgtgcgcttcgcggcgggcggcgtgcgtgtggtag

SEQ ID NO: 1980 - DNA, 279 bp, Zea mays
atgctacttgacatgctgggggcacgatcagccgatgtggtatgctccgtcgacatggactgcgcagtggacttcatgccactgctcgactacacggaggagctcgcgcctaccgccatccaaggcagcaatgagccgttgcagccggccaggttccccggcactaggaggcgagtggatggcaagccagtggagctacccacgccatctccgacagcagtgagtgtcgtagcttctatatgtccttatagaaggtatctggtagctaaatcaatctaa

SEQ ID NO: 1981 - DNA, 3216 bp, Zea mays
accacgctccggtcagcctcgcctcctttctccgtctcattcccccaatcccacgccagtcccgcaggaatccccacccaaattcccgtctccccgatcgccgcccttctcggtgcccgtaaaccctacccccggagtcgcccgtgcgctgtcgtgcccgcgttgccaccgtcggtggtccgcggcgcccgtaaccaaaacctaaccgcagcctgcagatcccgattccgcagggaggcgggagaggtgaaggccgcctcgccgcagatggagcccgcgggcgcgcgcaaggagtggcgcgccgtccccggctcctcgctccgctccaatggcgccgaggatgccgcggagcacgggaagctggggcagtcggaggaccgagctatctacgaggaaggggcgggtggactggaggacttctgcgccatcaccattgatgggagcggagggctcagcgaggacatcctgcagcagcgcctgcagagcgttgtgcggcaaagggagcagctgcagcaggtcgagatggagctgcgtgcgcaggccattgcacacccgcagatcattcaggcgcaacaaagcttccaggctacttccaaggaacatgccgcagctgtggccaagatcaagcaggagcaactgcatgagcgggagcaatacattcttgaactagaaatgaaactcaatgacaaggatagagaactaaatgctctgaagattgatcatcaaacggtgtgggcaaatcaagatcttattagagaacagaccaaagagctggcaactgtcagaagggaacgcgacaactctgaagctgaaagagcccaacatcttacacaaattcatgagctccaagaacatctgcgagaaaaagaaagccagttcattgcattagaggaacagcatagggctgctcaagacaacattctttacaaagatgagcagttgagggaagcccatgcttgggtatctcaagttcgagaaatggatgctttgcagtctcaatccctacaagttgagttacgtgagcgcatggagcaatttaatcaatattggattagctcccagcagcagtatgctgaaatgcagcggagtcttctccatacaatacaacaactccagcaagaattaactgaggcaagggaacagtctggtgcacaaaaagatggtccacaagtttctcgggaagggtcagctgaatcatcactagttcaaagcatgggaaacagcgtggcttcaaatggtagtgcaactgcagatgggaaccagcaattgttgaaaaataatggaagcgtggatgtctctgttcaggccaatagtgcctcagctgtacctgttccttcttccctactgggaatcggtggtccggctgcgcatatcgctgcgatgcatgcttttatgattcatcctcaaggcattcctcaacccttagtagcatcacccaactctggtgttcctcaatttggcagttttcagtctcagtctacaattcaaccaaattcacaatggccaaatcagcaggaagtacaaaatgtctcacaaccacaagatgaaacaaactatcagacatcccaatcagaccggactgttttacaacaaggcgctattaatactgatgagttgtcctcaaagccaagccaggatagtcagccagaccatcttaatgcccatgtgaaacaacagcagagccctgcaagtgcacctactgaatcaactcatgaacttactgttgttgaagcgaatgtagctgaacatgtatcttgtgacgaacaacaaaaaatcttaaacgaacaggattcactgtcaaatatgaacaaccatattggaatagttgagcatctagagcaaaataccgaatccaaggatgaaagagctgcatctgataagcaacctgaacctgtatctaggcagcataaacatttgaactttcctccgttcactacccagattcacttgaaaaagagtgcaacagagaatcctaatgttgtaaatcaggttgatataatgaaatcagttgcaggtggttttagttcgcagttacctcgtgcaccaaaggaaccttctctcctagatgagagatctctattggcttgcattgtacgtgcagttcctgctgggactgagggtggaatcaggataagttcaactctgccaaataggcttgggaaaatgttggctccccttcactggcatgactataagaagcaatacgggaagctcgacgattttgtggctagtcatccagagctgtttgtgattgagggagacttcattcaccttcgtgatggagcacagcagattatttctgccactacagctgctgcaaaaatagctgctgcgacagcatcttctgcctcttactcatccttactgccttctgttgccgttactcctgtggcacaaaatactcggcaaaagaggaggcccgcagttgattccagatcatcaaatgcaattccctctggaaacggcttcacagatcaatttaacatcattcagggtgtcagcgacgtaacaatttcaggcaaagtaagaaatatccaagataatggcttcatagatgaagttcgcactgggcagccatccgtgctcacagctgctactgccaacggagcaagacatgacaaatgtgcaaataataccagacatggttatggtggaaaacaacaggggaggaccactgggacgacatacctttccagaagatgaaccaactttcactgggcgatgatgctgttggaattggaaaccatgcgagtggcgatgatgcggttggggaaaccatacgagtgacgatgctttggcttcgaaatgatggtgaagatgacctggattaaagttattctagattcattttttattttgcactattggtcttcacagagcctgtatggttgggggccttgttttggcaaagctgtactgatatatccctaccccaagaatcagaagcctgccaaagttttgcgactatgtacctcgtctgcgcttgtgtattgtggtgcacttgaatgatgcgaatgttatatcgaatccccgtccttgatcgtgatgttcttgaacgttcacctctgggaaattaactcgcatggtgagctgagctcgtgatcggtggcatggtcgatccaaggtcgggtgtcattgttgtatggtcgagctggacatgtaggctctgttactatttaggtaactatttagaccttattccaaaaagttagtaga

SEQ ID NO: 1982 - DNA, 1811 bp, Zea mays
tacaactccatccatcaggcttaggccatccgagttcttttcagcgtccagttgtgcagggcggtcgcacacacaccacacacgcgccccgtccattccattctcatcgcgatcgaggtggcctggcactggtactggcactgccctcgctggccccaggccatggcctgtcttcgctagcttccttccttacagtataaatattttggtgcgccactgcgccagctccggcctgtcccttagttgtaccatcgtgtccttttcctcctacctcctccttggctggccctcttccccgtcttcctccctcttccttcgtctctccgtttcaagccctaccgacaggcatttgcttctgctccagtgatcagccccctcccctcctggcctcctctccacccggccaaaaactgatctttttttttcggttctggtaccatagctattagtagtcgtagcggctaacttgcaagccgattgtctctagcacgcaagtgtttttccctcccctgagattggtgggtgatcgagagttcgagacagtgtacacatacatactctgctcgtctgctgaggatcgatcgcttggtctcgttgttgcgtagataggtactagaggactatagctactagtaggactaggagaggatccgagggagagagagtaaggccaagatgatgcgcgcgaaccgggagcagagagtggccttctcgtcgacgaaggaggccgccgcggtgcccaaggaggaggtgtgggaggtccggcccggcgggatgctggtgcagaagcggagccccgacgcggacccgccccccggcggcgcgcccgtgcccaccatccgcgtcaaggtcaagttcaacggcgtctaccacgagatctacatcaactcccaggcatccttcggtaataatgcctcctcatccgtcctccgactgtgcatgtgttgtagctgtttctttctactgagtgaattcgagccggtgaatgcgtgttcctgcaggcgagctcaagaagctgctgtcggagaagacgggcctgcacccggacgaccagaaggtggtgtacaaggacaaggagagggactccaaggcgttcctggacatggccggcgtcaaggaccgctccaagatggtcatgctcgaggaccccgccgccaaggccaagcgcctcctcgaggagcgccggaccggcaaggccgagcgcgccgccaaggccatcgcccgcgccgccctcgacgtcgacaagctcgcaaccaaggtgtcggcgctggagacgatcgtgagcaagggcggcaaggtcgtggacgcggacgtggtgacgctgaccgaggcgctgatgaacgagctggtgaagctggactccgtcgccgccgaaggggaggtgaaggcggcgcggcgggcgcaggagaagcgggtgcagaagtacgtggagacgctggacgccatccgcgccaagaacaaggcggcggcggcggcggcgccggccaaggcccgcagcggcagcaacaaggcgcggccgccgcgcccgcccccggcttcggcgcacgcgcatcagagccagcagcagcgccggcagttccagccgccggcgccggtgtcgcagacccagacggcgagctgggagacgttcgacctcctgtcgtcagtgccgtcgacgtcggcggcccccgtgacgaccatggcccccgcgaccagcaccacgccgtccccgcgcttcgactgggagctcttctagatggctcctcaaggcgccagcctgccacacccccctggcctggcccccatctctcgccacttgtgtgcctgtccat

SEQ ID NO: 1983 - DNA, 426 bp, Zea mays
atggagatcaacagggcacaaccctggcgcctgcatcgggtcacgacatggggaagggctagagctggactgagcgtggttgggaaggagatggggaaaaaaacaggggcgtcggcgctagggactggacgtcgagcagagggacaacggcgcgcggtgctgggcgagcccaccacggcgcagcggatcagaggcagaggatgcagccatgcgcagggaggagcagaggatgggcgagctcggaccttcctggtggccggcgagctgaagaagatgaagctagggcggtacatggagtccagggcgagcacgtctggggtgctcgacatggaggcaaaggaagggcggtcggcattggggaggcagaagatggcggctggagggaatcacctgagggagggggtggcgtggaaggatctagggtga

SEQ ID NO: 1984 - DNA, 2755 bp, Zea mays
ccagctacaaattgcgcccatgctgccggtaccagtccctaccaccagtgtcccgtccccggtttgactgccgagctgattcgtgtgggcgtcaatggtgaacaccgggcgcttcgtcgtcctcgtcctcgcctaccgcctcctggtacccctcctctcaggctcagctgaaccggaccacaccaccaaagagtcgtatgtcgtatacatggggagcccgtcgggcggcggcgacccggaggcggtgcaggcggctcacctgcagatgctgtcgtccatcgtcccgagcgacgagcaggggagggtggcgctgacgcatagctaccaccacgcgttcgagggcttcgccgccgcgctcaccgacaaggaggccgccgcgctctccgggcacgagagggtggtgtccgtgttcaaggaccgagccctgcagctgcacacgacgcggtcgtgggacttcctggaggtgcagtccgggctccagtccggccgcctcggccgacgggcgtcgggggacgtcatcatgggcatcgtcgacacgggcgtctggccggagtcgccgagcttcaacgacgccgggatgcgggacgtgccggcgcggtggcgcggcgtgtgcatggaaggacccgacttcaagaagagcaactgcaacaagaagctcataggcgcccggttctacggcgtccagcccgagtcgtcggcatcgaacgcctccagcagcgccgtggcgacgccggccgcaaccggatcgccgcgggacaccgtgggccacggcacgcacaccgcgtccacggcggccggcgcggtcgtgtcggacgccgactactacgggctcgcccggggcgcggccaagggcggggcgccgtcgagccgggtggccgtgtaccgcgcgtgctcgctgggcgggtgctccgcgtcggccgtgctcaaggccatcgacgacgcggtgggcgacggcgtggacgtcatctccatctccatcggtatgagctccgtgttccagtcagacttcctcaccgaccccatcgcgctgggcgcgctccacgcgcaccagcgcggcgtgctggtggtctgctccggcggcaacgacgggcccaacccctacaccgtcgtcaactccgcgccgtggatcctcaccgtcgccgcctcatccatcgaccgctccttccagtccaccatcgctctcggcaacggcgacgtcgtgaagggagtggcaataaacttctccaaccacagcctcagcggcgagcagtaccctctggtgttcggggcccaggtggccgcccactacgcgccggtcgccgaggcgagcaactgctaccctggatcattggacgcgcagaaggtggccgggaagatcgtggtgtgcgtaagcacggacccgatggtgtcgcggcgggtgaagaagctggtcgccgaggggtcgggcgccaggggactggtgctcatcgacgacgccgagaaggacgtgcccttcgtcaccggcggcttcgcgctttcccaagtcggcaccgacgccggcgcgcagatccttgagtacatcaactccacaaagaatccgaccgccgtaatcctccagaccgaagacgtcggcgacttcaagccggcgccggtggtggcgtccttctcggcgcgtggccccggcctcaccgagtccatcctcaagcctgatttgatggcgcccggcgtcagcatcctggccgccacgatcccgtccaccgatagcgaggacgtgccgccggggaagaagcagtcggcctacgccatcaagtccggtacatcgatggcctgcccgcacgtcgccggcgccgccgccttcgtgaagtcggcgcacccgggctggacgccgtccatgatcagatcagctctcatgaccacagccacgacgacgaacaacctcgggaaaccactggcgagcagcacgggcgcggcggcgacggggcacgacatgggcgccggggagatgagccccctgcgcgcgctgagcccgggcctggtgttcgacaccagcacgcaggactacctcgacctcctctgctactacggctacaaggagcagcaggtccggaagatctccggcgccgcgcgcttctcctgccccgcgggcgcgccctcgccggacctcatcgcgtcggccgtcaactacccgtccatctccgtgccgcggctgaagagggggagacccgccaccgtggcgcgcaccgccatgaacgtggggccctcgaacgcgacatacgcggccaccgtcgatgcgccccccggcctggcggtgcgggtctcgcccgaccggctcgtgttctcgaggagatggacgacggcgaggtacgaggtgagcttcgacgtggccgccgccgctgccgtgagcaagggctacgtgcacggcgcggtcacctggtccgacggcgcgcactcggtgcggacgccgttcgcggtcaatgtcctctgatctggtggagtcatcggcgtttttgcttctttcataatcatgttcttggttgcatgagtgtttgatttttgtgtcccccctcaatttggtagaaggggaataatttcaaattcagttttgttgtagcacccctgcttcgtgtaggttcatctcacagttaagattgtgatggccaaggctagaaaactagccatcatatttgtttgaaacctcttcttcttgatacaaacatgtgtaatgttcatgcgccttcgaaaaacaaaacatctaaaaaatatatctactgtgagtctaccgtgggtttgtttgacc

SEQ ID NO: 1985 - DNA, 1550 bp, Zea mays
acgccacatcgccgtcggccaccacatgatgcacgcgcacgccgccatataatactagtactactgaactacaaggggttcgccgtgcgagcgcaagcaacgacgcgccggcccgcctactactagtacggccgcatccaccatggctgcacccgccgcggccaagcgcccgtactggcaggcccccgccacggccgccggagcagctgagcccaacaagcggcaccgcacggccgcggcgccggcgcacatggacgcggagccggagcaggaggagcagcccctgctcccgggcctgccggaccacctcgcccagctctgcctcgccccgctcccgccgcgcctcctgcacgccgtctgccgcccctggcgccgcctcctctactcgccctcgttcccgccgttcctcgcgctctacgccgtgctcgacgacgccgccgccttcgccggcagcggcgtctcgttcgcggcctacgacgccgtggcggggcggtgggacgagcttcccgcgccgccgatgccgtcgccgccgcccaggctgtggcacccggccttcctgtcccgccggctcccgctccagtccgtggccgcggggggcaggctcgtgctcgtggccggctccacgcgggcgctcgccccggcgctgccccgccccgtggtcttcgacccggccgcccgctcgtggcggctcggcccgcgcctcccgttcgcgccgcgccggtggtgcgcggcgggcgcggcccgcggtcgcgtgttcgttgcgggcggagtcggcgcgggctacgacgccagcgacgcccggtccggcgccacgtgggacccggccgcggacgccgccgcggccgcggcgtgggagccgatcccgcccatgcgcgacgcgcggttcagccgcgacgccgcggaggccgtctgcgccgcggggaaggtgtgcatggtcagcctccgcggccgcggcgccaaggagggcgccgtcttcgacctgcgcgccgcgcggtgggaggacatgccgcccgggatgctcgctggctggaagggcccggccgcggccgcggccgctggcggcgacgaggacgagacgactatcttcgtggtggacgaggagcgcggggcgctgagcgcctacgattgggccggggaccggtggcgcacggtagtggagtcggagcggctcaagggcgccgccgagatggcggctggcgggggccgggtgtgcgtggcggcccagggtggcgacaaggtgctcgtggtcgacgtggcgccctcacggccacggcggtggggtgcccccgccgccgcggagctccggccccgcgtctgggaggtggcggcgccgccggggaagcgggtggtggcgctgcacgtgctgccccggatggcgcgcgcggactagcaggttcccgccacgtcgtctgggaatggcggattgcatgctcgttggattcgctacacgtgctgtacaagagacggcgcacacactgccacctgctgctcatgatccgactccacctccagacgttcgcatctccttccttgcagagagtttgattcta

SEQ ID NO: 1986 - DNA, 2375 bp, Zea mays
ctcggcccgtgtcgattccatcgattaaaaccctaacccgagcatcttccacgccgccgttgtctcgccgcttccagccgttgctcgctgaagaagatggggaggaggaagaagtccaaggagatggagaagaagccgctggacatcctgtcgggctccgacgaggacttcgacagcggggagaacctctccaagatccagatcaacgaggagtacgcgcgtcgcttcgagcacaacaagcggcgggaggcgctgcagcgcctcgaggagcgcaggaagcagggcctggtccccgcctccgacgacgacgagtcggagtccgagtcgtcgtcggaggaggaggacgaggcggccgccattgcctcgcgcctagtcgaccgccgcatgttcgaggtgatccgccgcatccgcagcggcgatccccgcatcctcgacaaggacgccaaggtctactcctcggaggaggaaggcggcgaggaaggtgaggacgccaagaagcaagaagagtccaagcaggagaaggaaaagaccaagaaggagaagcctctgtacctcaaggacgttaatgcccgccacctgctcgaggagggccccgagttcgcagcgcagcccagccggagcagcagcaagttcgagaggatcgcttatgacgagcagcagaagaagggattggaggctttccttgaggcacagaaagaagcattaggcgatggtggagacgatgatggcgatttattccaggtgaaggaaaaggctagagcaggagctgacgacgaagcggaggaggacgaggaggagaagcagacaaaggaccttgctggtgaggtctttgggaaggatgaggagctggatgagaacgagaagttcttgaaggaattttttcttaagaggccgtaccttgagacagagaagagtaagtcctatctagataatatccaggaattgtcagatgaagaggagctcgagattcaggaagagtatgagcatgcttataattaccggcatgaggaggccatggcatcaggggcagtggtggcggatcgggtgttgggacattcaagggttgttgaaggttcggtgaggaagaaggagagcagcagaaagcagcagcgcaagagcaaagaggagcggatggcccgtgttaagcaagagcaagcagaggagctgaagcatctcaagaatttgaagaagaaagagattgcagagaagcttgagaggatccgaatgattgctgggattgaaggagatgctgcttgtaagcttggtgctgatgacttggaggaggattttgatccggaggattatgacaaaaagatgcaggagatgtttgatgatagttactatgaggctgatgaggttgatcctgagtttggaagtggtgaggagatggatttggagaagccggattttggcaaagaagacgaattgcttgggcttcctaagggctgggctagtgaccattcaaaagaagagtctactgccactgatgcgaaaggtgaaaaagggaagatctctctcaaagacaaggtggagcttgagaaagagatggaagagtactacaagttagactacgaggacactattggagatatcaagactcggttcaagtataaacaagttaagcccaatagttttggtctgagtacctatgatatattggcatcagatgacaaggatttgaaccagtatgtttccgttaagaagctagctccttacagagaggatgaatggaaggttacacatcataagaagcagagcaaggatttgatccttggaggccagaagaaggaagggaagaaggacaaatctggcaagaaatctaggtctgaggaagaccctagttcttcaaaaacagagaacgacaggatgacaaatgggcaagagtcaacagatgccaagaaaaagtctaccagaagtgaacggcggaagcgtcgcaagtctgagctaaggccatccagtgatcgattagaggcatatggaaagataaattcaaagcgtcacaagagccattgaccttctgagattcatcaaagtacatctggggaattttgctgttctttttatgcattggacaggtgaaagtcttagatttagctgtccttgcttctattttgggagatgcaaaactagtgttgccctagtagaaacatctgttgtcttatagttttgcagacattgtgttgtgcgcctccttttgattttgattgttttatttgtagaccatatatatataatataatttccctgcaatttttcttgtcactgttgtgcacctcctttcgtggatggtcaggttatccgcttatcctggtgatgaattggaatatgatctcatgtctctgttgcatttgcatcgtaattatgtcactgttatt

SEQ ID NO: 1987 - DNA, 1607 bp, Zea mays
ccaaatgaaccaacttgtgatagccacttataaattgactgattaacaagcatgacaagatcgaaaggcagagctccactttgttaaaaaaaggcatgacaaacatggtaaccaaggaatccacagtttttttacaaaatgaactacatgaatgtatgtgactcctaaccatgttcttttggagagattcttaaaatgtgtacatagacacgagctgttatttcttagacctttttttgttgctagagcattttacacatgcatgtaggcatgtacagataaaacttgggggatgtaactacattttattttttgttgcagagagtataatgatattacatagtgaattaaagcgccagaggaagctcgtgaaaaatctgaagaagaaatccttgtggtctaggaccttggaagagattgtggagaaacttgtggacatcgtaatatttttgcacaaacaaatccgagattcatttaacgaaactggaactgacttctgcgcttccgagcaaactcagaacaaaaggctaggttcctgtggtctggcgctacattacgctaacattatcaaccaaattgaaaatatagtttcccggcccctctctcttcctcctagtgcaagggacaatctgtaccatggtctcccaataacagtgaagtcagctctgcgatcacgattgcaaacatataaccccgaagaagagcgcacggtagctcaaataaaagccgaaatgcagaaaactcttcgctggcttctgccgatagcagagaatacaataagggcacaccaaggttttggatgggtcggcgagtgggcaaatcttgggagcgacatgagcaagaaatcaggctcccagcacagcgtcacccgcatccagacgctccatcacgccgacaaggcgaaaaccgagcactacatgctggagctggtggcgctcctccaccacctggtgatccaggtgaagaacagaggctacgggaccagcaaatcgtcgaggcacgacgcgtcgtcccggtcccgcaaggcggcggcaacggacctccgaccggagacggagactcggcacaacacgtcgccggtgaacagccgcacggcctcgagcccgctgtcggactgcgagcgcgcggcgctggaccacctgagcttcaggaggacggcctacggcaggagccagagctgcgagcctccgcctggccaccgacggagcaaggcccacaggagctgggacccgtgccggagccacggcagctccccggcgacggagttcggcaggacccccgccgtgcagcagcgcggccggggcagggatcttgacgtaattgatggcctagatagactgccttcctactcgcacccgccctcccctacgttttgctagatgttaatggttaggtattcttttgctgtaactgtaacacgcgtgatatgtccatatgtacatataccatagtcttgttatagcgtgtggtgattgaatcaaagtatatagagcgagatcacaagtggtgttccgatcatctggcctttggagagaaaaaaaatatcgatttgtctgaattctttttttcttcttctgaatttaacgaccaaatgatttgaacattgt

SEQ ID NO: 1988 - DNA, 1722 bp, Zea mays
cgatcacgtctccgatacgcagagacgctttaatctttatttagtattaagtccggacttgtttcgaattgaaagcaggatgttcctacctttaaccaagtggaccaagatctctatcatcgactccctccctgcccccctcctcttataaaccatacattgaaacgacgtctaattgtgttgtgatccaggcagcagtgagctcagtacacagctaggcacagcgacggggtccggtccagggccatggctaaggaaagcaagctaacggccggggtggccgccgcgctgaccgtcgtcgccgcttgcgcgctatgcctgctgctgccggcgacggcccgcgcgcagctccgggtgggattctacgacaccagctgccccaacgccgaggcgctcgtccgccaggccgtcgcggccgccttcgccaaggacgccggcatcgccgccggcctcatccgcctccacttccacgactgctttgtcaggggctgtgatggatccgtcctcctcaccgtgaatcctggcggcgggcagactgagcgtgacgccctcccaaacaacccgagcctccgcggcttcgacgtgatcgacgccgccaagaccgccgttgagcagagctgcccgcgcacagtctcgtgcgccgacatcgtcgccttcgccgcccgcgacagcatcagtctcaccgggagcgtctcgtaccaggtccccgcgggccggcgcgacggccgcgtgtccaacgcgacggagaccgtcgacctacccccgcccacctccacggcgcaaagcctgaccgacttgttcaaggtcaaggagcttagcgtggaggacatggtcgtcctctccggcgctcacaccgtcggccgctccttctgcgcctccttcttcaagcgcgtctggaacacaagcacgaaccccgctaccgcaatcgtggacgcggggctgagcccgtcgtacgcgcagctactacgcgcgctgtgcccgtcaaacacgacgcagacgacgccgatcacgacggccatggacccgggaacgcccaacgtgctggacaacaactactacaagctcctgcctcgcggcatggggctcttcttctccgacaaccagctgcgcgtgaacccgcagatggccgcgctggtgagcagcttcgcgtccaacgagacgctgtggaaggagaaattcgcggcggccatggtaaagatgggacgcatccaggtgcagacagggacgtgcggagaggtccgtctcaactgcggcgtcgtcaacccgagttcgtactcgtcgtcgtcggcggtggagctgggttcgagcgcgccagcagccgtcggtgaagagggctacgccgcgagctagtagctcgcataccagtcttcggccgccgtcgttgtcgagatcaatgattttttttctctctctcgcatgcatccctcttctgcttttattttgtcgcgtggactgtggtttttgttgtgtcgatgatctttgttgtgtgccagtgccactaaacgtacgcatgccggccggcgaactcttaacttcggtggcgggtaataataagcatatgtatgagtaagatgagattgtgtcaatttagggtgtggatgcttttaaatcagtttgctgctggcttaggactatgcatcaacttgaacaagagtactgcatgcagtgctaattcatatggatgagttccccgccgacacataccatgtgtttggttacccg

SEQ ID NO: 1989 - DNA, 3186 bp, Zea mays
aaagtttgaaatatggagtgagagagataggctggtggagtagtcgtcgccacatcccgcttcccccgtacgccgtacccccgcagctcgctctcgccttctcctccggttcctgctgcaacctgcactccgtagtccgccctttctgcccgccgccggccacttcaagactactccccgccgcgttacctcctcctcgtcctcctggggttacccagctctgttcccctttcagggaacgccttgagaggcggggcgggtccttggtccggaggcgcggcgacggcgagtgatttttgttcgccagagggagagttttttttttcaccgggtttggtgggaagtaaggaggcggccgcgagtggcgagacgttcacgggttagatctggcggtacggcgtcgcggatctgagcgaggtaggctgtcgtttccccccctccggcgcctgttgcatttcccccctccggcgcgtgtctcgatatccttgcagttccctgtagttggcaagagctgaaggctacctaatctccatctgcaggtttcggtggagcgatcaggaggtggtcactatcttcgcctcatttcgagtagtttgggcgcctgtagtttgcctgtttccttttcggtgtctgatcaagaagatgatgtgctcagagggcttctagttgttgctgatatcttgtcttgtgttgtatcacccggaagctggaaaggagcgcatcactcctgctctccccttttactccttggttacttggtatttcttggatatccaggctggaaggggttagatccagttcctgcggccctagtaataaggtgcacttggggaaggtgccatgacctacttccccggtgaggtggtggagcacattttcagcttcttgccgtcgcacagcgaccggaacacggtctcccttgtgtgcaagttgtggtacgatgtcgagaggctgagccgacgaggtgtgttcgtggggaactgctacgctgtgctccctgagcgtgtggtgctgcgattccccaatgtaaaggcgctgacggtgaaggggaagcctcactttgcggacttcaaccttgtgccgcctgattggggtggctacgcggggccatggattgaagcaacagccaggagctgcctgagtcttgaggagctgcgcatgaagcggatggttatctctgatgagaaccttgaactgctagctcggacattcccaaaattcaaagtcctcgtccttatcagctgcgaggggtttagcacggatggtctagctgccattgccaatcactgcaagctcctgagggagttagatttgcaggaaaatgacgtggaggaccgtgggcccagatggctttccttccctgattcctgcacctcattggtttccttgaatttcgcttgcatcaaaggggaagtgaattctggtgcattggagagacttgtcgctaagtctccaaacctacgcagtttgaggttgaatcgctctgtttcagttgacacactctcgaagatactagagcgaaccccaaatttggaagacttggggacaggtaatttgacagatgagttccaagctgagtcctttgtcagacttactagtgctctggagaaatgcaaaaggctgaggaatttgtctggattttgggatgcttctcctatctttgttccgtttatctatccactctgtcatcaactaactggcctaaacttgagctatactcccacactggattattctgatctgactaaaatgatcagccgctgtgtgaaactccagcgtctttgggtactggactgcatttcagacaagggtttgcaggtggtggcctctagttgcaaggatctacaagaactcagggtgtttccatcagaatttaatgttgctggtgcttttacggtgacagaggagggacttgttgcaatatcatcaggctgcccaaaactgagctctttgctgtatttttgtcaccagatgaccaatgaagcactaactactgtagccaagaattgcccaagtttcatcagatttagactctgtatccttgagccaaagaagccggatgccatgacaggccagccgttagatgaaggctttggtgcaattgtccgtgactgcaaaggtctaagacgactgtcaatgtcaggccttctcacagacagggttttcatgtatatcagaatgtatgcgaaataccttgagatgctttctatagcttttgctggagatggtgataaggggatgatggatgtgatgaacggatgcaagaatctgaggaagcttgagattagagacagtccatttggtgattttgcactcttgggaaatgttgccaaatatgacacaatgcgatccctttggatgtcatcatgcaatgtcacattaaaggggtgccaagtccttgcatcgaagatgccgatgctcaatgtggagatcatgaacgaactagatggaagtagtgaaatggagaaccatggtaacctctctaaagtggataagttatatgtttaccgtacaactgctggagtgagggatgatgcaccaaattttgttcaaatattatagagctagctgcaattaccttggtatcttcccttcctacgagaatcgggaaaagccacactggtttgtgcccttatcctggagcaacatggccgggattcatcatcatctctgtaccaactgctcccctcttccagtgtctggtcatatggccacccaggccctttatcgccttgtgcattctcactcgagaggaggacagaatcagatgactttttttttcttcttttcacgccatgtaatctgtagtgtacctgtcttcatttgcttttcactttggcacggtggattgtgctgtcgcggtactgttctagtgttttgattcgtaaacctgagaactgtcgggacattccggtgacgatgatttctttcttgctcctgtgaatgcagtgtgtgtgcaaattttaggtttatactacatctctccacgtaaatttgctagatgtagccgactacccacgtagcggttcattaatgatcttggtttaattaatggctgagtattttttttctaatttatgtactttctctattttgtttacatattttattatattaggtttattctgagataaacatttgtgtttttttgcctatcgatgatataagatgtatgtttttgagttc

SEQ ID NO: 1990 - DNA, 4233 bp, Zea mays
gagagagagggtcctgcgttcccttcttctgctgcggcggcggaggctctttcagttccatccatcttctccctcgtggctctccttcctctctcccgtagtcccgccgaccccccgcgccggccaaggaaatcaagcgaaaacgccagattttgattgttccacatcttctttcatctctgaggggtttcccgtcttcctcgcctgctctaatggctaaagaacaggatggatcccccaaggtgcgccacccagaattccaaaggatgcgcgtaactctcaccataggtgtcattggcctctgtgtcacagcatacattcttggtgcttggcaaggtacctcgaacggcattagttcccccttaataagtaccagaacccagtgcaaagatcccgtgcgatcatctggtgctcgcctggatttccaagcccaccaccaggtgggcttcaatgaatcggcgcttgctgtggagaaattcccaccttgccagctcaagtacagtgagtataccccttgccaagatccaaggaaagctaggaagttcccaaagaaaatgatgcagtacagggagcggcactgcccaaagaaagaagacatgctccggtgcttgatccctgcgcctccaaactatagcaaccccttccagtggccaaaaagtcgcgactatgcttggttcaataacattcctcatcgggagctcagtattgagaaggctgttcagaactggattcatgtcgagggagacctgcttagattccctggaggtggcactatgttcccacatggtgccgatgcttatattgatgacataaatgcccttgtaccattaaatgaaggcaacatccgaactgcgcttgatactggatgtggagttgcaagctggggtgcttatcttatgaataggaacatcatcaccatgtcttttgcgccaagggattcacatgaggcacaggtacagtttgcattagagcggggggtaccagccatgattggagtgatggggactgagagaatcccatatccggctagagcatttgacatggcacactgctcgagatgtttgatcccatggaataagcttgatggtgtctatctaattgaagtagacagggttcttaggcctgggggctactggatcctctctgggcctccaatccattggaagaggcactaccagggctgggagaggacagaaggagacctgaagcaagagcaagatgagattgaggacttggcgaaacggctctgctggaagaaggtcgtagagaaaggtgatcttgctatatggcagaaatctatcaaccacgtagaatgtgttgacagtaggaaggtttatgatgctccgcagatttgtaagagcaatgatgtggattctgcttggtacaagaaaatggacacttgcatatctcctctcccagatgtgaagagtgaagatgaagttgctggcggagtccttgagacatggcccaaaagagcatttgctgtccccccaagagtaatccgcggttcagttccaggcctcacccctgagaagttccaagaggataacaaggtgtggtcagagagagtggatcactacaagaaattgattccaccactgggcaaaagacgatacaggaatgtgatggacatgaatgcggggataggtggctttgcagctgcattgatgaagtaccctctttgggtgatgaatgttgtgccttcaggcttggcccatgacaccctgggtgttatttacgaacgagggtttattggcacgtaccatgattggtgtgaggctttctcaacgtacccgaggacctacgacctcatccatgctgataaagttttcagcagttaccaggacaggtgtgacataacgtacatcctactggagatggaccgaattctaaggcctgaggggactgtgatcatcagggacaacgtagaggtgttggtgaaggtacaagctatcactggaggcatgaggtggaagagccaaatcatggaccatgagtccggtccattcaacactgacaagatcctagtggctgtcaagacttactggaccgggaagctcgtgcaaaaacaataatcgtcgccttgttactgtttttcgtctgcgaaaatgtaggcatgacttgcctgtcagttctgtcttcattgccatttttttatcctaacttcaggatatctgtatataggaggcatgtgaaccatgtagctggaattggtatcaaacatcattagccacgtagcgtatgtgacacattgcaatggtgtataagatgttcactcatatatttggtgtgatattgcaatctaataacatgatgcttggtgtgaaaaaaggagattgtaattgacaacatgttcctgtcaaaaatacgatgacaaggttgtggtacagacgaattctgaagattatactatggccaagtgctgtgaaaaaagagagacgaattctgagagccaagggctgtgataaaaactgtgtgaattgcagatagtgtctccatgcagatgtgtgctgagataatccatttaaccatcaaaactactaaatgagggctccagtctcagtaggaagcccaggcggctgcttcagggaatgagagacctggaggagcaggagctgatgcaccaccctgatcaatgataccgaagtgtgctaggaccttcgcgaggaggacgcctgcgacgtacgacagtccggagctgctgaatccaatggacaggtagtagaggagggttgtgaggtatgtcctatgcctcttaacatgtgccttcccgattgcgagcagcgcaatgcacaggagagatgcagcagcgaccaccagcactttgttctctctgttgtcgctcgtcctgaatgacagtccgtagatgactggtggcagcagcccgaagaggatgtatgacagtatggctatcaccatgtgcaactggtacttggatcgccttcccagctctagccagtaatgccccacttgctcactgctttcagctatatctcctgtgtttcgtagatcagcaatctgtttgtgacaagggagatcttgtcagatgtgtgtcatcgcagagactcgagattgagaggcaagaagcagtatgttacattgtggtaaagtacaggaagaccaccaataaggtttgctatgcccaggatgaatatatccactgcaaacggacgacataataatagcattaacaaacaccatggggatctgggtgatggcatccattaatggaagaaccaagaaagaaacttacaagtcttggcaccacttgctgcagctgctgatacaactgagaggctcgtgattgattcaacaaggccaccatacactacggctttcaggatatcccattcatccctctcagctgatggtgcaggaactagtgcctcggcctcagggactgccaatactctatgaggtggagcttctggctcagctggctgacgaataactgaagttggtttctcaaccgtctggttgtcctcccctgcaggccatcgtcatttactatgtatacaaaataatctcaaatactgtggcacgatactgttagagccaaatgtaggttaattaattctgagcatatgaacaccacatgtaaaatgagccttgaaatactgtgaacgagatactcctatgacaagcaaatacaccataccaggcaaaacttttattgggattgtaagtactggtttaacaaacgatgggctgaaaaatgtgctgttatcagagggcgccattatatcttccagaatatctgtaacaagaaaataaaaatcttaccaatgcaagcatgcatattctgttgatatagtttatacaaattaacagatctaccttgtttgtggccaaggtgcattgaatcattcgcagtatcaccagaaggctgcgagagaggaatttgctcttggcgtgctccatttcgctgcacagttaccacatgtcctgcttctgtttgcgtgaattctgcataagaggtttatacttcttgttacccattttcatcacaggtgtcttaaactaattgtggtgctgcaagtaatgtgggtacgttaatgagtctgacttccttacaattgtgtctaactaatcaataataccttctttgtggcctagatgactggtatcagttttagtatcaacagcaggccgtgagagaggaatttgctcttggcgtgctccgtttcgctgcacagttaccacatgtcctgcctctttttgcgtggatcctgc

SEQ ID NO: 1991 - DNA, 3594 bp, Zea mays
cctcgagctttttttccagccctagatggagggagtccgtggcccgtcgtgccgcgagatgccaacggcggcggatggacacgacccccggcccgcaacgaaacgacccggcctcttcctcgccatccctcctccctccgttcgatgctactagtaggtttggtggtgagcagctagtcctcgactgttgcttgcttctctgtacgcgctaggcggtacagtacagctacctacactgcacaagcaaggcgtcaggcatgtcggtgttggtgtttggtggtcggtgaagagtctgctgggctgtgaaccaatggagctctagcgtgcgtggtccgttaaaaaaatagtcaaatgggcgaagttatgccgctataatttataaagataaaaaatatcgtaaaaatagtagaattctgtacgtattaaacccaagttgatgatagcgcatcgccggtctgcggctctggcctgatcctgatcttgcgcctcattcctcgttgacttgttgctatcgcaacttggcgcaggtaaacgaggccaaagcatacactatagtaacagtagttgcagagggagagagagagagagtggccagcagtagttagggcgtcttatcaattacttgctccgtggcgaaacgcaatgcacatgccgcagccaaggctcttccagtagtcttgtctgacctcaacaataacaaaacatgatgatgatgatatcatactctagcaaggaaaagaagctcttgctgccacgctgcaccttacccaaacgcgtttgttttctcacgagaggaatcggaacgcactcgatcgcttgatcggtcgtcgtcttcttttggccccccgcccccggccccaagtcgcagcgccgacggattggccaccaaagcaaaaagcaaaccgactccgtttttttagaccagcaagcagggtgaactgtctcagcatgtactaagaactggtagactcatactgtcacggtacttggcgtgtaaatacgtagcacaagctgcgattatacttttgaccgcaggcttttcagcccaaaaaatctcacacgtatgccgatcgaaatgagtactagcgtgctccgcccccgcctcgtctcgtcgcacgcatcgaggcacggacacgcccccgccctgaacattgcgtcgcgaaccttgtgtgcgctgctgcggttgcgcacaccgacactagcctccgcggttcagcagatgccagcctgtgccctcgcactgcccgcccacgcggccccacccaccacaccgcgtctcacgtctctctccctccttccgtcggcggctttggctgtgcttccccccacctctctgtctctctctctcttcgcttataagcaagctctctcacacacacctcactctgctttctctctctctctctctctctctctctctctctctctctacatacaaagtggaaaaaacgcacccaaaagaaaggctcacaccacccacctccatagcagcctactatcctctccttcctccattctctcgctatcttccccactccccagccaacaaatcgaccttgctgggaacgagagggctatagagcctggggagggcagcgcaacacgcgccacggagcagcggcggcggcggcggcggcagagcagtccgccgggagcagaggccgcgcgcgcagcgcaggcagccatgggcgcgccggtgaacggcgccgtcgtcttgttcctcctgctgctggctggaacgggggcggtgaccgaggagacggctccgcaggaacccacattgcccgccgccggctccggctccggctccggcgccggcgccggcgcggcggtcggggtcaactccaactccgtgctggtcgcgctgctcgactcgcactacaccgagcttgcggagctggtggagaaggcgctgctcctgcagacgctggaggacgccgtcgggaagcacaacgtcaccatcttcgcgccgcggaacgaggcgctggagcgggacctggacccggagttcaagcgcttcctgctggagccgcgcaacctcaggtcgctgcaggcgctgctgctctaccacgtcctgccctcgcgcctgccctccggctcgtggcccgcggccccgcaccccacgctctccggcgaggacgtcgagctcgcctcggccggcgccggcggcatgcgcgtcggccacgccgccgtcacgcgcccggacgccgtgctccggcccgacggcgtcatccacggcatcgagcgcctcctggtcccgcgctccgtgcaggaggacttcaaccggcgccgcagcctcgcggcgatctcggccgtgctgcccacgggcgcgcccgaggtcgaccccaggacgcaccgcctcaagaagcccgcgccgccggttccccccggcgcgccgcccgtgctccccgtctgggacgccatggcgcccgggccctccatcgcccccgcgccggcgcccggcccgggctccgggaagcaccacttcgacgggcacagccaggtgaaggacttcatccagacgctgctcctctacggcggctacaacgagctggccgacatcctcgtcaacctcacctccctcgccaccgagatgggccgcctcgtctccgagggctacgtgctcaccgtgctcgcccccaacgacgaggccatggcgcgcctcaccacggaccagctcagcgagcccgggtcgcccgagaacatcctctactaccacatgatccccgagtaccagaccgaggagtccatgtacaacgccgtgcgccgcttcggcaaggtgcgctacgacaccctgcgcctgccgcacaaggtcgtcgcgcgggaggccgacggctccgtcaagttcggccagggcgagggctccgcctacctcttcgacccggacatctacaccgacggcaggatctccgtgcagggcatcgacgccgtgctcttcgcgccggacgacgccaaggccacgcagaccgccgaccccaacaggaagcctcccgccatcgtcacccacaagaagaagatcaagctccggcgaggcaagctgctggaagcgacgtgccaagtggctgggctcttcggtcagcggtcgcgattcgcaagctgccagtagacggagaaggggctgtgataccgaaagacgaacgaactgaactggtgggctggggctgccctggagaggcagagggagccgtccacattattacttggtttctttcttttttttgtttattattgagaataatgatgaatcaggtcaggtgggtgggggatgtggctgtaaactcggtgggctgtcggtgtgtccagggggaaaaaaagagagaaaaggcagcgaaagaaattgtccatacatgaagaagcccagggtcgtcgtctgtgtataggaagggattaaaaaagatgttttgttttcttctgtctttctttgctttgcttgtgttcccgttttgacaatgagaaatatcgggtaaacacacaaccttccctattatacatttcccttcattttattatacatatatactctctctctctctctctctctttctttgtcaagaatgcaacagtccgggcagtggggattgaggaatcttcagg

SEQ ID NO: 1992 - DNA, 2457 bp, Zea mays
atgtcgagcaccggagctggcgatgacatgccacctgtagcatctgtaaatacgccagcatgtacgtctgtttcaatggacatgaatcctgtagcgtctgcgatcgccccatacacagagggtgtctccgttactcccccggcagcattgagggcacctggacatatcgatgagcaaacaaaaacggcagatatggtcggcatagagaagcacatcctcatgagacatattgggccgcatgaacaggacacacctcatattcttcaaagccatccggacaatattgatataagattgatacctaaagtcggtatgacatttagtaacgtggacgaggcgtataatttttatagtcaatatgcatacgaggttggatttccgttgaagaaatatagggagcggaagaattgtaaatggttgaactgttcaatggaaggaaagaatgctgaaaggaaagatacagaaaaagggcaattgcaatgcaacaaaacacatgatcgtgaatatatggagttccttagtgcgatgcaagaaagcaggattccacaacattgcattatggattttgttacagaaatgcatggtggcccagaaaacgttccaataaccgtgcaggacatgagtaacctgaaaaaagcatggcaaagggaaagaaatgcaaatgatgtgtcaaagctgttatcttttttttcattatgcaagaaagataatccacaatttttttcagactttccactggacaaagaagggaaaattttaagcatattttggtcccatgctagccagcaagccgagtacattgattttggtgatgcagttacatttgatactacacataagactaatatgtacgataagccattaggcatgtttgttggctcgaaccaccacctacaatgcacaatatttgggtttgctttactaggagacgagacagttgatacattcgagtgggtctttaatacgttcaaaacatgcatgggatgtgacggaccacgcgtgatgttgacagatcaagaccctgctatgccaatcgcactaggcagagtattcccaaacacaatacatcgattgtgtttgtggcatgtgcaaaacaggtatatgccccacttgaatgaattgtatgcaagatttgaggatatggatttcaaaacaaggttccaatctataatacatcatccattgaatgaaatggagttcgaggctgcctggcaaatgatgctagatgatttccagctacacgagaacaacacccttgccagattatatgaaatacgcaaagattgggtacctgcatttttcaaaggagactattgtggtcttatggtctctacacaacgaagcgagagcatgaacaagttggtgaagagtgcccacgtggatgcaaacacaccgcttcatcaatttgcaaagcaaatgatgaagctcctgcatagtaggaagatgaaagaggccaaagaggcactaggatgcatgggtcaaaaggatacaactacattgtatatgtttgaaataagagttgcaagggcatacactagagctgtgatgacaaggttccaggagacagtaaaatatgcaactgcatatcgaatagaccgtgatacagagggtgatgaacatgattgggtggtctattttgtgttcatcttgtacgcgctttcatgcatctacaaattgaaaggatcccgagtgagtatattttgcaacgatacacatactccgcatcaagatgtggctttttcaagagacgataggaatttgaaaggaaaagatggagaaactagatcatatagacagaagatgttgcttaaaaaagcaatgaaagtagtacaccatgcgagtctgtctaaagctgggaatgataaagccctagagatgatggacgaattattagggttattgatgcgtgtggagcctgatataggtactggtgagagttgtggcacaagtgtttgcgatgacatccaggaaattttaatggggtctaatacaaatgaatgcaatactaaggatgatcaatgtaatatgccgatattaacattggaacataacactgacattcggctggttgatagtagttctatggatgtggaagctagaaagaaactggaatttcatatggaaggtgtaaacttagcaagaccagataaggccaagcctaagggaagaacaatcaaaagtagtgagcaacaagttttaaaattgggtgtgaaaggagctaagaagatgagcaggaaatgccagaaatgtggcataactgatggtcacaacagccgtacgtgtttaactgtcgaggataatagggttcgattggctaacctatctggacgtaagcgagaacgacctcctggttcaaggaacaaaatcaaagctgtagccccacaatggaatgagacatcaacgtcgaaaaaacgaacggtggatgtcggagatgatgattcatctcgtagagagtag

SEQ ID NO: 1993 - DNA, 1444 bp, Zea mays
gatgccaccaaaatcaaagaagtcagtgaaggggctgttcaagggcctgggcctttttcagggcagttcttcgagcagcagcagacgtcgagagctgttgagcgtggtacatggagatgaggatgagcagcacactgaggagcagcacattgaggaggagcagcacaatgaggctgagcagcacaatgaggaggtggagcacaatgaggaggtggagcacgtgacatgggaccaggtcgcacaacatcaccagccatgggaccagtgggaccaccagagagagcagcaacaggtttgggaccagtggggccaacagggcgaaccggctgacaacccgatggatgatggctcaggaggctcttcagcgacacgcacacgtcgctcaagaaaaagccactcagtaaagcctcgtcacgcgatagagcgagaggctgataggaatttaatcatgccacatggagatcggaattgggaggacctgtcctttgacggcaagggacaccacactcaggttaacattacgttgagttctctttgccgccttcactaccctggtatagtgaaggtgtcaaacggtgataccgaggatgaggtgctcgtcagtacctgggacaagtacaagtttaaaaaggaacgaaaccacaccgacagacagggacttgtgcgtaatgacttttggcttcgatatcggttgtctgacggagaggattacatggggcacgctgaacgtgtcttccaaaacaatgcaaagaagctggtgaaggatgccatatactatgcgagaattcaggctacaaacctgtattttcaaaagcatccggaagaagcaggccccttgaataaaaaggaatggtcctcaaagatatatttgactgaggatcaatatcgtgaggtgatggttccatggatggcgcccgtgcctgatgcgtactatgcttggtgtcgatattgggcttccgaaggcttccagaaagtgtcagcgcatcacagacaatgtcgaggaaccaatcctaaccacaagtttggcggtgacgacatgatacgaaaagctaaaagaatggaagctacgagtggccaaaagcctagtgacattgaggtctaccaggagggccacaaaggaccagacccaaacaacccttaccagctctgcagccagacagccacgaatcgcttgttaatgcagcaacagggcatggcaacaaattttccaccaccaccacaatggagccaatttgcaaacacaccagttccaccaccacagttcaacacccctccgacacatatacctgcacctggagacagggttacatccgaagcgggtggtagtgggtctgattccgcagcagggactggatttgttgactccctcttcgcgttcccttctccttgtggtggtggcggcagcggtcaaagctctaaccacccaagtggtggttatctttaa

SEQ ID NO: 1994 - DNA, 1533 bp, Zea mays
ctctatcttctcctagccaccacactcccgatttccccctcccagtgacctagccgccacactcctgatttccccctcctagtgacctagctgcctcacgctcgactcctgactcccagcgacccagccgcctccccctatttccccactggcatctctccctctctctcctcgttggctccctctctcttgtgtcgaccgctgctggaggagcctctagagccgccgcctcgtcgctgctggaggagctgccgtgccgcgctgctggagccaccgatggactctcccactcgccttaccaggtgtaaggcgagcaggatgccttacgtcgccgggcgccttaccgcttagacgacgcctcgggacacttaacaactatggttacaaatccctgttacttttactgtatcctattatctaccagtacgataagatgaatgaacctctaaagaaagagatggacgactgttcggctcccgccctccccttcgggcggctcttttgcttctgccctatccgctcaccttgccaacgatcctccttctcgcatccccgtctctgcattggcgcccagtccaggttcgacggccacctcgcccccagtttgtccatctgttcctcggtcgtcaggtccctctctccatctctgccttcctaggagcttgctgttggatggaacaaggagttgcgctggaaagggagttcgaccagtttgactgtgtgttcgtttgtagctggtgctgagtcgcttccctcattcaaagatgtggtctccaaactacaggtgaatcgtgttggttcatccaagcctcccaggccactctgctctgcctctgaggcaggggcagggccgacggatcttcaagcggaggatggtggtggttggatgctggtggtgtccaaaagttcaaggaagcaggctcaaaggaaacagaggatagcacacttggtggagttgaatgggcgatgcttgaaatggttggcgagaggtcactttgtaagattttgcaagcaggggacgaggtgtttttgctgcaaagcgcttggtcacaggtcctacaatttcccagaaggagatagtttgcaggcgactcggcatgctgtgagggtccttgtctgggagtggttgaccccggagttttttcgagagcctgcctgtcatggctttgttctcagaacttcggtgtggctgcgactcaaggatcatgtaggaagacgagtgttgaagcccaatgctgtttggagactcaaggatcacgcaggaaggcgaatgtcgaagcccaatgctatatggaaaagaatttctccttctggtgttgaaataggaggttcatggtgtgttgtgtcggaggttgcagcaccctcgaatggcttgcaccagcagggtcagaatcctgtgagtgctgaaccaagaggggatgatctctctccccggccatgatgaagacgatggtggaagaggcgaacctcgttggatgtctctaatcctgctcgggaccctcctagcctagtaggaagggatgagattcagag

SEQ ID NO: 1995 - DNA, 1113 bp, Zea mays
atgtccgttgcgtccccggcctcgcccacctcgccgcccgcgcccgcccctccgagccgcgtcatcgtctcccatcgcgtgccactacgcgcgttgccggacccgacggcgcccttcgggttcgccttctccgtcgacgctggcaccgtcgcgtaccagctccgctcggggctgcctgccaacgcgcccgtcctccacatcggcaccctcccagccgccgcggccgaagtcgcctcagatgagttgtctgactacttgctggccattttctcgtgctttcccgtgtacctccccaccgacctccaccaccgcttctaccatggattctgcaagcactacttctggccgctcctccattacctcctctcgctgacgccgtcgtcgctcggcggcctgccgttccagcggacgctctaccactccttcctctcggcgaacagggccttcgccgaccgcctcactgaggagagcaccgcgctcggagacgactcgcccaagcggagcgtcatcgtgctctcgaagttcgtcagttgctccccgtccctgagcagcgcgatccgcgtcaacccgtggagcgtggagtccgtggaggaggccatgaacgccgcgttgcggatgccggaggccgagcagctgacaacatcaagttatgattcattagattctagttttcttcaaacaagggataagctggagcttaaagccatgaaagacggttctgcaaactatgctactttggaaaagaaagcaaagttgtatgaaaagttatccagaggcgagctacctgatgaagaagacaaggagaaatactgtgtggatttcttccaaaaaggtttcgatcgtgtctatgagcctcagataccagagtgtagccatagagccactgatggtgcggaaccagtaaacgatcatgaagattctatgcctaatgccaaaccattggaccttggccgagcaggcactacaatcgacagagatgaacacaagcgctttgtgagggaagttcatgaggaagtaactgaggcaaggcagaaggcctcaacgaacatggaggtggcggttgagaggagcttgtggagcctgtcaagtggcagggaccgatggataggctag

SEQ ID NO: 1996 - DNA, 2868 bp, Zea mays
atggcctctccacttccacctccacctccacccccacctccctcccacgcccccaaccctcccacctccacccaccacccctgcccctcgccggcctccaccccggaaccggcgaccaacccagaaaactcccttggtgtccctctcgctccacatgtgggccgcctaaaggctcaacgttggagtgatactagtccagtctcatcatctggtgactcctggctggcaccccagtcctataaggaggccctgttagcatatcccttggctcccgcggctcctcccccggcaccaagtgtgaagcctgtctactcggcgaaggcggtggctgattcccttcctgtggtgcaaggccggcgggctggtccccggcatgacgacgacggatggcaagtggtgaggagtaagaggaggcagtttcgcggtgttcaactccctcgtcgagagcccccggtggttctccgaggacggcttgggcatcaggctgccaagtgtccaggtcgccttgaagtgcaaaggaagaagactgtgtggcaacgtttggaaaaacaacaatcgaaggtctctgtgtggcagcgcctttcggagcagcgtgaagactcgccagtggcctcgcagcgggctgatccctgtaggcgtcgctcggtgtgggtccagatcagcagacctgaggctgctgcgatgaaggaagatccccctaggatggctgatgatggggagtcacatagaagcctccgttacaaacgaaagagaagacgatccaaacatggaaaaggatcatcaaggtctgtggtcgcccctggccaggcgttatcggcctcgtcagaggatgaggtacctccgtcgattagacagacccctgttcagtgggatggcgatcaaggcgaaaggaactggggggctctttcttcctgtacccttgaattcagtgatgacatggctcgtgaagaagcaaatatgagaagagccctcttcgttacaatagtgggaaccagaccattagtgatggggcctgagattcttgaggaagttgctcacagttttaacgtcaagttggaggatatgaagattcatcacaccaagccagaggattttcttctgattttacctgacgaagatactgcttcaagggtgcttaatggcggcaagattctaagaggacctcgattcagcctgatattcaagcggtggacgagatgctctcacgcctcatcttcgataatgtcagggctggtagacttggaaatcagagggatcccggagcatgcttgggcactttctacggcaaaaagtattctgattgactcctgcttgatagctgaagtgcaccctgtcactttgctcaagcaagatctatcttcgtttgtcgtcaaagtttggtgttttaacccggagaaactccaacgtgactcagttcttcacattattgagcctgggttgcagatgtttgagaaaagatgcctcacatacaagattcaagttagcgtgctgagggcgggttcaagcatcacaccagcggaccccacttcatctgtggctggcggaaaatccccaggggatgaagacggaaatggaactcaagatccccaccctcgacgtccaggtggctctctggtccagcggaggccgttacatcttcgattgggcccacagtcgtcgtcaggccgcggcaacgaggcgcctgcgcagtcatgcgccttgaaggaagtagcgggagatgctgggcgagatctgcatttaacactgggcactgatatgtctccaacgtccgaggtgaggacgctgcaccttcgccaggccccgcagccgtctttgggccgcgacttcgaagcgcccgcgccgccatacgcctcgagggagaattctggagatactctgcgtgttatgcaattaatgccgctgacgaccgaggagccccttcatgctgaagcgcttccagaggcgtctcctcacattgatggcgcaccttcaccggattttgaagtggcgggacaagtaacgatggagaagagaaacagtccccaaggctgctactctgcggtgcacgaatctggcggggtgacttcccgccttgtgattaatggacctgtaaggtttctcaggccagatccggcctgttgcctggttgggtcgctagagacatctgggcctgttcctgtctcgcctcatgagccggctgggccgctagagacatgcaattccttgcctgtctcgccccaactgtgttctgggccgctgaagacgaacaccctcatgatagtctcgccccaactagtttctggtttccctgagtcatcatttccaagtgctgtcctgcctctacagatgctgggaatggctgggaggatggcagtaacagtccgacacaacgaagcaacaaaagctctcaaggtctactttcgcagaagaactaaggcacatcccctccaaatcagtcagaatgaagagacagaggccagtataattcagacaaacaacacttctcactcggactcgagacctctgaaccaatctttatcagggaaggaagaattcctcagaaaaatcagtaaagcagctgatgaaatactgccagctccaaagcaagccatgaatacctcatcagccccacaatcttctcaggtggctgctcctaggcgcagccgacgcattgcgggggctggggttgagtttaatatgcgagattggggtaataggtctactaaaaaggctatgagagctttgcatatcttatctgatgacaatggtactacccaggaagcactagacgcgtatgcaaagattttcaagcaacctttgtcccataaccaggtagaagctttggcagccctctttggttggacccctcctcctggacttgtttgttag

SEQ ID NO: 1997 - DNA, 2317 bp, Zea mays
gcggagcacaagagaatcgagaacgtcaccaaggccgtctgaaagcgaaaaggccctttgcctctcgctctaccccaaaccacagcagtcagcagcagaccctcgccatgggactgagatccccgctcgtgctcctgctgctcctcctcttcctcgccgctactttccgtcccagcgcggccgctttggcccctccaacaggcagcatcgtgaagcagctgtcgtcggtcgtcaggtggccgcgggccgccccctcgacgcacgggcccaaacagcccggccacccccagtacgccgatggccacgtgggggtagccctgcaatttgagagcggctactttgtagagacacttgttgagggtgacaagcttggtgtcacgccgcacaccgttagagtatctcctgttgagggcggggagctccttgcggtcgactcggcacatagcaacattgtgcggataaccccgccactttctgagtatagcaggggaagacttgttgctggttctttccagggccattctggtcatatagatggtaaaccaagtgatgcccgattcaagcgccccacaggcgttgccgtggatgatatgggcaatgtttatgttgctgatacagcaaacttggcgattcgaaagattggagaatcaggagtgaccaccatagcgggtggtaaatcgaatatcccaggatacagggatggccccagtgaagatgcaaagttctctacagattttgatgtggtgtatgtgaagaaaatgtgttctcttctggttattgaccgtggaaatgcagcccttaggaagatttctcttccacaagaagactgtacttaccaggattctgcactcctatcttcagatctcatattggtcattggtgctgttgtggctggatatatcttctctggtttccaacacgggtttggattctcaggctccgagaaggtagaggcacctgaaaacgagcagcacgagagcagcacaatcgggaagccacctctggtggtggagagcctgaaagaggaaccaggagctgggtggccatccctcgggacgctaattgccgatctcttgaaacttgccatcgagggagtggggaaactgctactcagcgtagtccctcaacgcatgcaacacgggaagaggaagacagatctcaccccgctcagggacaggctggtgatgcccgaggacagagaggagacggcagcggcggcgcagaagctcagcagcacaccaatgcggcccgagacagcccacgcccctaaccccgtaaccgagacggcagcacccaaggccccgaagagcacgaagccatccaagctcagggattcttcgaccctgtcaagcaagcacaggtcctccaagcggcaggaatacgcggacttctacggcacctccgagcccgctcccgtaggtgccgccgccaaggtccccaaggacaggctccgccaccgccaccaccaccgcgagaagagcggggaggtcgcctacggcgccgcccatcacgacctgaagcccgcggaagcgaagcctgccgattacagcgatccgagctacgatccgtacgtgaggagcaagtatgccgccgagagtgggtacaggtattgacgtgtcgctagctgtcctgtcctgtcctctcctgccgggggaaacagcggaatgaaaacctttcgccggcgtctgcctggcaatgttgtaagtgtgaagctatatagcctccacaagcgcaaagcgaggcgcaaacaaagctgctgctggtgcctggtgctgctcatggtttggtggtgcccatgagatgtggcaagtagtcatcctagttaggttaggtatggacggccaggacggggttggcatctggcccggtttcaggatatgctaagtgcgattttcgcagagggcgacatgtagagcctggcggcggttttgatttcgtatctgcagttcgatgtatccatccatggatcgatcccttgtgcctgcctgcctctgcctggcggcgcgtgtcggcacctgacagcaggtgatgcctcgtgacgggcagttaacccttttgccggtggctcactgatctgctgcctgcctgcctggcccggacgtctgttcgctgtccctgaatgcgatgcatcgtctccgtttcggtctgcacgtcaggtctagttgtgccgaagctgtagccatcacaggccgacctggcgtcgagagaagcgaggatggctgtgtgtagtcaatctctgtcgtactactactgtccactaccagctttggtggcgtcggtccgcatggcatgtgactggaataggctccagttagag

SEQ ID NO: 1998 - DNA, 1749 bp, Zea mays
cccgtcctgttctgctgcagacccgttctgttgtacggagtagtactattctactgctttcagaacacgaacacgatcaccagggttcctttccttgccctcgtccacatggcgtccctcctcgccgcctacatattgacagacagcagctcaattgtcaggattcaacagaggcaccgtatgtaagatcgaagcaagagattacacgtagatggagtcactactccagtcgcaaggcgtagccgccgccctgctcccggcctcgcgcccgcgcccgcgccgcggcaaccggctccggcggcgcacgcgggcccaggctaacatccggcatctggtcagcgtcgacgacctgcggcaggtcgcccgggacgccgccaccgtgggctgcggcggcgccgacgaccacgccttgaacggccgcgcgccagttgaaacgccgacgccggaggtctcccgcggcgcgggaaccgtggcccagaggctccgcgcaatcgccgaggcgtgtgcggaccgcgccgacatgcacgacatcatcggcaggcagcgggacaactggaaccacctgctgctccacgccaccaactccctggcgctcacggcgtccctggcgtccgcgctcgcgccggcctccccgacgctcccagcgctcagggcctcggccggggtcctcctggccacggcggccgtcaccatggccgccgtcaacaggatgcagccgtcgcagctcgccgaggagcagcgcaacgctacgcgcctctggaggcagctcgagcgcgacgtccgcgccgcgctcgaccaccggacggccaccacagccgaggccgacgacgacgtccaagaggccatggacagggtgctcgccctcgacgcggcgtacccgctgccgctgttccccggcatgctcgacaagttccccagcgccgtcgagcccacccggtggtggcccagacggcagccgaggaagaggccggctcagtcggccgccaagaccgtcaacggcgccacggccagcaactgcaacggctggacgcgggagctggaggacgagatgcgcggcatcgtgcgggtgctcagggccaaggacgagcaggagtacgtgtctaacgccaagctggctctgcgtctcaaccgtggcctcgccgtcgccggcccggcgctcgcgggcacggccgcgctggccacggccttcatcggctcctccggcgaggccggctccttggcccccggtgccgccgtcctgtgcggcgcgctggcggcggcggtgaacacgctggagcacggctggcagctgggcatgctattcgacttgttccgcaacgtcgccggcttctaccgcaagatccaggaggacattgaggcgtgcctcgacgaggttgacgtcgagcgcagggagaacggcgaggtgttccagaccaaggtcgccctgctgctcggccggagcacgtctgaccttagccacttcagggagatggcgtcgccgtcgttcaaggacgaggacatcaaggatttcgccgggaaactgttttagactctctcaccaagttcggtcgcgtactaactacgtagggtgctcttaactgttcatagttcatacgtgtagctatcatctcattttgtatattaggaaagtgtccggttttcatttataactaggtaaatacatgtgtgttgtaatgggaaaaaatagtacaacaataatatatgtatgaccatgtgttgtgttgttaatcaaaattaagctgcctctag

SEQ ID NO: 1999 - DNA, 3099 bp, Zea mays
taaaaaacagatggagtaatatatattagaagagtgttaactgttgaacacagtttgaagcaaaggcgtattgattactgttacgggtacagtcattcatgccatgatgccacaaccagtatagactatgctcccagatgctaatcggccttcttcagttgctgccacgtccgcggcctcgcggtggccgctgcctcccgccgccgccgaacccaccaccgcgcgcgctccagctgccgtggcctcctccaaccccaaacggcccgccaccggctcgccagccaaaaccgccagataggccaccgaagctgaattcaaatccgccacgcccgcttcctccaccaccgctgccgccgtagccgtaggcaaacccgtctgcagcgccgcgggggccctgcgccgagccgtggccatagccccagccaccttcgggccccgatgtccacccccagctgtaactccacgagccatcggggacggcgccctggccggacccggaaccgccgatccattccggcggcaccgtccacccttccccacgcccgcgcccgcgccccggcgcgaggcctctcgggccatccatgccgcccgtggacgaagatctgcttgacgagaggacggggccacgacgtcgcttggctatgtcttcgctctctattgcttgcgagttgcgacttagtcgacctctgtttcgtatctacgcaaacacacactttcacactggtgatttgttttgtttttgcgaaacacagaaaaactgtccggttggtaatgtttcttcacaattttttagactctaaataaaatctagttcaaaatggatagaaatatggtccgacattaatcctccgattcgatacaatctttaatattatactgtaaaatttagagtttattgtcacctaaccagacacaaccgctacatgttggactgacccgtctagctccatttgtctcttttggtgtcagtgacacatagatgctgaatcctgaaccttttattctttggatttgctattgactgctcaagttttttttgttaatgacgactcaagtttgaagtttgctttttcctttctagttaagtgaaattttggtgtaggacactgactcaccttgactcctagagtccttacaggctttgcagccctgagcccagggacctttttttaaccaaccaaactctgctcacacctcagtcacataaaggagaccgggcgtccggaagcaagtaaccaaaagggcagtatggtaaaataaagtcgggtctcctaggccagtcatacatacaaacaccatcaaacggcagcccatcggccgtagtatcttgctcctcgccctccatccgaacaacagcaggagcccgagcccgaacccgatattccgcattcctacccagcaatggtggcccttgtctaggtggacgcggtgcaagaggcgaagcgggggccgatggatgaggaggggcagcgaacgccgcagccgatggtggtcgcgcggaagcgccgccaagccacgccggatcacccaccctactgctggatgatcggcgaggcaaccgacgcgctggccgaggacggcggctcggaggaggactccatctctgcctttatccgcgccaggcaccccggcgtgccccccgcgcacgacaggctcctccggcactacctcggcaagcacgtcgccgagggcttcttcgtgcgaactgccacggggcggttcgagcgcagcccccaggagaacgctgatgaggaggagctcccggtggagcaggctgatcaggccggctcgtgcaagccggcgtccgttgggtcttcggtggtactggtagaggccaagcccaagcgtggccgaggcaggccgcggaaggatggctctccttcgacactggccgttgctgcaatgtcatcggttgctgttgccggcaaggacgaaatccatgcaccgtccttgaagcccaagcgccgtggccggcctcgcaggcaggcaggggcggaccacagggacaaggagcatgagcctccgcgtgagctggcactggtgatcctcggtgatagctctgccgcaccgatcatggacaagccatgcacaaccttggtccctccaaccacgccgcctgtggacggtggccagcctatcgacctggctctggcgaccaccacagaggtgcctgtgcctgaacctgcggcaacgcccgccatggacaaggacggtgccgatgccgatgcttcttcaatcgaatgacagcatttgcacagcgcccacttcgccagagcctggcagctgggcttgcaagctggcactcgtgcctgctgctaatggtttttgattgctgacaagaaggatggccttacggaggctccatctctgcaacctacaaggatgttcatcagcatcacaaggccggcactgctccaacactcaactctggcggcaagccggcaagggccgcaaatcagcggtggtggctagtggtgaccgtaattgactttagtgtgtcctcttctactgaattattaggtggcttagcgcttacgagaaactcagtcacaacatcgatttaaactgtggatgataactggcttatttgaatctcttctgcaacttttgcggataatttacatctggaatcttcaaacatcaaaccccggaccagaatctcattaagaacgaaaagatacatgaactctgtcgaaaccaaataaactttctaaatattataaaatggctaaatacaattttaataatcaccaccaagaactgtataaccaaccattggtaacctaggatcaacaaacgcaccactcagaatgttatttcaaccggactccttccaagccgtccctttctgatgaattttattgtatcaaaacactggtcctccaacactgttgaacatgaattacagctgaagaatctgtgatgtgcggtcaatggtctcacgcctcccagcctctgaagagggtggcgcgggcaaccctattaactcggtgaacgcccccatccagagacttgcacatggccttgatgtgctgaaaagcactgctcatgtacttctctagttcattgttcactttctgcttgtcccagattttggat

SEQ ID NO: 2000 - DNA, 2229 bp, Zea mays
atttttaggatgggagggcctactagatctaggaagcctagcggtagagaattttataataataaccgacgcgactttttctttttgttttctggcggcgtggtgttctttttcactgagaagagaataagggagatcaaacggggccgtggaaaaaggggggttagttttattcgactggcttcgcgtgcgccgatcttctatttagcacgcgacaggagcatctcgttgctcgattcggttttcttcgtgaattcgcccccagcgagccgagctagaattggaattggaactggacttgcggctgctgcgttcggcgggggctggaattctcgccgcatccccgtgtggtggtgagaggccgtggctcgtgttgcggtcgacgcgcgaggagggtcgacggcctcgcgccattggggtacgaagccggccgagactgagcggtgagttggcccggattcccgcgggtgtgttcgtaccggttgcggtggttgcttcggtgggtgggggcggctggccggctcgggccctctccggccgccgcccactcgcccagggtctcgatcggatcctcctcgggagtggggaaatgcaaggctccagcgggagcccggcgtgccggggcacggctcccgaggcgggcggtttcctcggtgcccgtgcagggccgctgatcctggtttgagcgcctcgggttcctcttggatttggttggcgtttttatgggcgggtagatcggtccggtgatttctcagctgctatcggtgcgatggcagctgactccagcatggggtttcaccaggggatcaccgcctctctgtacaaccatcacatgctctcgttccagtccaacagcgacgtcggcatcggcggcggcgacgacgctaccggtggcatggtcatggccccggggagtgtgagtgggggcagtggcaacgccgggctgttcctctccccaaacacaggggtcgtcggcaacgcaccgggggttgccccgttaatgaactcgtcgggggatgcgttccgtggcactgggacgcccaagtataagtatgtcactggttctccttccgattggagtgaccgtgaggtagacatactgaatgaagggcttgtgagatatgctcgtgaacctagtatcatgaggtacattaagatagcagctatgcttcctaacagaaccatcagggatgttgcgctgcgatgctgctgggctacacagggtaaagagagaaggaagaaacctgatggattctacacagggaaaaaaatgagagacgtgaagccaatccaggacaaaatggttgcatcagtcccaatagctaattttcacatgacacctacaaccaatgtaatccccttttcggtatcaacgcagcatccaaatcaacaaagtcaggttcccaaagaagctcctgttgtcgacagtgcaacccagcgtctcctggaggaaaataatcagttgcttaaccagatttctgcaaataatgaaacattcaagacagtggagaacacagatctttttctccgcacgagtaacaacatcaaaacaattttaagcagaatgagcgaaacgcctggtatcatgagtcagatgcccccattgcctttatccataaacgaagaccatataaattctcttattcaactgaacagactggttgcatcatatggcacaacaagcatttcccatcatacgaagcaagagccatgaagctagtctactaaacccagggaaaaatgagaggaccagatggccggacccctcctgcaattctgtaaacgtgctgctgaggaagtcttgcatgttatactctaaccaagtgccaggaacagtcactgctttccagataatgttttcgcagtgacctgattgtttccaacccgtctgccagcctgcctgcccaccaattcttgaagcatttggaagaagtctgcagttgtggttcgagagccgcaagctatttgctgctgtttctgtttccgttatccagcatgtagaccagagtatcagacagtggatcctggtctctgcaaatgacctgtaaatatcggacggctgctggcgttccatgttttgtttctctgatcgctcatgaatgtatttcttcttttctcccccacccccggtcaccggacagggttgcattgctcccaatatgtaactgtatacagtagcgactccattttctgactaattggacacggaaacccaaacatttgttgtcc

SEQ ID NO: 2001 - DNA, 2283 bp, Zea mays
agattgggctggtccggccactccgacacccttatataaagtcccgaaccctagaggccagcaccttcctccccaactcgccgtctgccttctgcgcctccatttcggcctctgtcccttgcaagttcaatctcacctccaaccatgggtaaagagaagtcccacatcaacattgtggttattggccatgtcgactctggcaagtcgaccaccacaggacaccttatctacaagcttggaggcattgacaagcgtgtgatcgagaggttcgagaaggaggctgctgaaatgaacaagcggtccttcaagtacgcgtgggtgctcgacaagctcaaggctgagcgtgagagaggtatcaccattgatatcgctctgtggaagtttgagaccaccaagtactactgcacggtcattgatgcccctggacaccgtgacttcatcaagaacatgatcactggtacctcccaggctgactgtgctgtccttatcattgactccaccactggtggttttgaggctggtatctccaaggatggccagacccgtgaacatgctctccttgcgttcacccttggagtgaagcagatgatttgctgctgcaacaagatggatgcaaccactcccaaatactccaaggcacgttatgaagagattgtgaaggaagtctcatcctacctcaagaaagttgggtacaaccctgataagattgcctttgttcccatttctggttttgagggcgacaacatgattgagaggtccaccaaccttgactggtacaaaggcccaaccctgcttgaggctcttgaccagatcaccgagcccaagaggccttcagacaagcccctgcgtctgcccctccaggatgtgtacaagattggtggtattggaactgtaccggttggtcgtgtggagactggtgtcatcaagcctggtatggtagtcacctttggtccaactggcctgactaccgaggtgaagtctgttgagatgcaccacgaggcacttcaggaggctcttccgggtgacaatgttggcttcaacgtgaagaatgttgctgtcaaggacctcaagcgtgggtttgtggcctccaactccaaggatgaccctgccaaggaggctgccagcttcacctcccaggtcatcatcatgaaccaccctgggcagattggcaacggctatgcccctgtgctggactgccacacctcccacatcgctgtcaagtttgctgagctcattaccaagatcgacaggcgctctggcaaggagcttgagaaggagccaaagttcctgaagaacggtgatgctggtatggtgaagatgatacccaccaagcccatggtggtggagacattctcagcgtatcctccccttggtaggtttgctgtccgtgacatgaggcagacggttgctgttggagttatcaagagtgtggagaagaaggacccaaccggcgccaaggtgaccaaggctgctgccaagaagaaatgatgcgatcctgcgcctgctttagcaatacctagttttcatcattacaagttttgtttgtggtcgttgctgttattgtgtgaactgttgagctctgttagcctgtgcacttttatctatttatttggtaccttgttgctatttcaccttctgcaatacaagaatgctgtaagagctatatgttaaccttttggcattgttaatttgattttaggaagtcgtatagttatcttcagtatcggcatgattggtttctgggttcgtgggcgcccggctcgcagcgcctggacggctagcgaagctctgtccttgcacggctcgcagcggccttgacgaatgacggctagctagctccgtcctcgcgtctctacgcatgcaggtctacgcggtgggcttggacgtttagcgaaactcctggtgtattcggttgagcaaccaattacgcagtatgtttctttttatccccttaaggctttgtttgggtactctagtattgacctcaatccacatgtattgatctggattggggtgtaaattagtttaagttacacctcaatacaagtggattgaggtcaatactagagtacccaaactaggcctaagagcatgttcggttataccaatccaagtcaaaaatgaataggaggggatttaaatccctccaattctcttctggattggtataaccaaacaagccaaagttttggaagttttgcagggtcgtttggattggtttctgaatcctttatctgctacaattttctctatccattatatctgtccactcttctttttttc

SEQ ID NO: 2002 - DNA, 2601 bp, Zea mays
gactagtcacctgttggcagggtccggttcacgccgcggcggctcgactggactcccctcgtcatggccggcgtcagcggccgcggggccgcggagagggtggccgccgccgtggaggcggtgggatccggtggctgggagttccgaaacgcgtacaggcgccagctgctcgcgctgtcgcggcggatccggctccttggcccctttgtcgaggagctccgggaggtaccctgtgtacccgcggtggaaccggagcgggcgctggcggtgctcgccgacgcgctggaggaggcgctcgacctgctccagctcggccgcgacgggagcaggatattcctggtccttgatagggataaagtaatgaagaagtttcatgaatcaattgttcagctggagcaagctttgtgtgatttttcatatgataaattggacatatctgatgaagttagagagcaggttgagttagtgcatgtacagctcaaaagagccaaagaacgggttgacatgcctgatgatgagttctacaatgaattactttcactgtataacaagagccacgacccaagtgctgaattggatatccttggaagattgtcagaaaagctgcacctgacgaccatcaccgatctcacacaagaatcgcttgctttgcatgagatggtggcatccggtggcggtaatgatcctggagaacacattgaaaaaatgtcgatgctactgaagaagatcaaggactttgtgcaaactcagaaccctgaaatgggcccgccgatgactaccaagctaatggatcccaatggggagccaagacccagaaacatccctgatgagttccggtgtccaatttctcttgagctgatgaaagaccccgttattgttgctactggccagacccaggaacgtgctgtgactgcacttctgaacctctctagtcacgaatataacaagactagcatcatttcatccggtgccgtcccgggcatagttcatgtcttgaagaatggaagcatggaggcacgggagaatgccgcagccacccttttcagcctgtctgtggtcgatgaatacaaggtaacaatcggaggaacaggagccatccccgctcttgtagttttgctgagtgagggcagccaacgcgggaagaaggatgcagcagccgccctgttcaacctgtgtatctaccaggggaacaagggccgtgccatacgagctggcctggtgccactcatcatggggctcgtgacgaaccccaccggagctctgttggacgaggccatggcgatactctcgatactgtccagtcaccccgagggcaaggccgcgattggggcggccgagcccgtccccgtgcttgtggagatgatcggaagcgggtcgccgaggaacagagagaatgctgcggctgtgatgctgcatctgtccgtgcagtccgtgcatctagcccgggcgcaggagtgcggcatcatggtcccgctacgggacctggccctgaatggcacggagagggggaggagaaaggcggtgcagctccttgagcgaatgagcagattcctggttcggcaacaagagggtatcagctcccatgagcagatgttggacgagctcgaacgtcaacttgatgccttcggacctggtgttacagaggccgatatccttgaacaatcgggacttctttaacccacggttgcatgatgatgatgaatctatcttcgccataatactatcaaaagaggtcttcttttggggatagtactaccaaaaaagttcatgctgaaccagagttctttcatggcgacgttctatcggtactgatgctgatctgtccgtccggtttggcttcttccatgcttgtgtgctgaagctcccatcgctccatcagtttctgggaacgtaaggtagcacagaatgatgagatgtgtacagtctactatgtatgctgctccagacgtcatatagctatgtacattttttttcactatggtactataaaaaatgaggagttttagcggcggacttgatcagtaatacttatttcgtgcatgcgtacttgttggcgttagttccagattccagaattttttttggggacacgtatgcatttgggattccaacattggtagtgcgtggtattggaatctagtatggcagtgctagttgcaaccagaatgctattcatgcctctgaaatgcagcaagtgcacacgttcatgtcgatttcttttcttttttacccaaggagaaacatttcatctctgcttttgagaaagcaattatcatggaagatggaacagtttcgtatcgaattcacgcgaaatgtttccaagaagagcacgtatacacgtttggcagctctggtgaaggaagcaagaagactgcgtctgttggcagatctggtgaaggaagcaagaagaccgtcgtctacaagtgctgatgggccacgtcgttcgaataggccgaggaagagcaatgcaaacatgtatgggctggcgtgggtgaatgtgatagaaggtccatgtaatgtctattccttagactttgttcttttaatttcatgtggattgaagtgtattgaaataaattgcaatgaatttcaacttctatg

SEQ ID NO: 2003 - DNA, 2347 bp, Zea mays
acctcaaagtcgtctacccacatcataatcgacggcccacgcggccacgcgtacgtccccgattcatacaggctggccccaccttccgatcctaataagcccgctcccacactcctttcttcccctgcctgccgtctctcttccaccttccaccacaagcgccgccgcagccggtgcctgctccttcccgatccccgaggcaaagctgcgactccgcaaccgccgccatggcgttcgagaagatcaaggtctccaacccaatcgtcgagatggacggtgatgagatgaccagggtattctggcagtctatcaaggacaagcttatcctcccatttctggacctggacatcaagtactatgatttggggatactgcaccgtgaagcaactgatgacaaggtcacagtggaggctgcagaggctactctcaagtacaacgtggctattaagtgtgcgaccattactccagatgaaactcgggttaaggagttcaatctgaaacacatgtggaagagcccaaatggcacaattaggaacattataaatggcactgtgttcagagagcctattatatgcaaaaacgttccaagacttgttccaggatggactaagcccatctgcattggaaggcatgccttcggtgatcaataccgagctaccgatgcagttctgaaggggcctgggaagctgaagctagtttttgagggaaaagaagaacagattgatctggaggtattcaacttcactggtgctggaggagttgccttgtctatgtacaacaccgacgagtcaatccgagcttttgctgaggcttctatgacaactgcttatgagaagaaatggccactctaccttagcaccaaaaacacaatcctgaaaaaatatgatggcaggtttaaggacattttccaggaggtctatgaagctgactggaagtccaaatttgaggctgctggaatatggtatgagcatcgtcttattgatgacatggttgcgtacgcgcttaagagcgaaggaggctatgtgtgggcttgcaagaactacgatggagatgtgcagagtgatttcttagctcaaggttttggatctttgggtttgatgacatcagtgttggtgtgccctgatggaaaaaccatcgaagctgaagctgcccatggcacggttacccgtcatttccgtgtccaccagaaaggaggcgaaaccagcacgaacagcattgcttcgatctttgcatggacaagaggacttgcccacagggcaaagctcgacgacaacgctagactactcgacttcgctctcaaactcgaggctgcttgcgttgagaccgtggagtccgggaagatgactaaagatctggcgattcttgtccatggatcttccagcgtcacgagaagccattacctgaacaccgaggagttcatcgacgcagtcgctactgagctccgatcaagactgggagccaactgagcctacaagaaactttgcatggcgactttgaatgcttcgtcaccgtcaccgatctgctagtcgtcttttctgttatgaagaagtgaatgtgcgtcaccgcagtttcgatgcaagctaattatagatgtggtgtcacgtgagcgctcaaaataaaggatacacatgattaaattgtttttatgtcagtactaagctcagtcatccccccccccccagtatttttgtcgtttttctcctttgatttgcgtgtccattgtgttgtgtagtttacaaaatgccttccgttcaagccgcgtactaccgcgggatcacggaccactctctcagacggccaggtggttgtggtctcccaattccgcgctccagtggcaccacgtctccaggccacgcgttccaatttccacggcgctagtgacgtcgccaaaaaaggtgagaggaaaaggagggccgcgacgaggacgaccatgccggggcaaccgacaccgggactgccgcgtgatttgtgcccttgcgcacagtactacctatctatgcgtgtgtacgatatcttgtgtgcgctgcttggctgctctgtctacgcgcgcgtggactgcgactctgaaacctttcggcagcgtacgcaattgtcggatttcaataaaggaccgtctggtctgaatctctcaataaggacatgtataagtctaggttcttggttggctttttcagtataaaaacagctaagagatcagcatgatataactctaaactttaaatcagaaatgtatttcaaagacaatatgtatagaaagttgtgttgagatatgttttttatgaagagtctgtctcttgtaccttttttagttaatccttaaatacttctcaagagaccttatattaaa

SEQ ID NO: 2004 - DNA, 2918 bp, Zea mays
tcctttactccgacgccgcgccttcctctcctcgccccgctccacccgctggccgcacgcgacctcctggacggtggcaacgcgtgtgtcctctcctccggtcacgcgcatcctccccggcggtggtcgcgcgcgcgtcccatgcgttccaacctgcaagctctaggaggaggatgagcctaaccttattctgattccaatttagtttctcagctcgtgttctctttttttagctactagccactagccactagccagcgtccattcgtttcactttcgttgcaaaagtccatggcgggtacacgctcttttcctatagacagacaagcaagcacttccgcgccgtcttgcgattcttcacacgccaaagcaagcgcagccgccacccgcggacaacgatgagagagagagagagagacggtgcactcccttgaagcatccttcctctcatcccggcaaaaccaagtccaagatcacaaacaaacatagtactacgtgcacgacattgcatccacgggcgccgatcatcatttacatgttccagcgaccaacatttattttctaagattcgaagccccttagcaattcacggacccacccgaaacagaagcgtcctcacaaatcggggaaaccacgcgcagtcccgggacgcgatcgcagtggttgttgggtccgccgtccgcgacagcgaagctacaaatccctcgccgctagttgctacacaccaaatcattcgaaacgccaaaataaataaattcgtgcttcagtgacggcaccaacagcgacccgttcgatacccggattcaaaaccggagaggaatccatccccaattcccttcctccccccaccccgtcgcccaacagatctggttctccttcccaaacagttcgaattcgatcgcgccacggtccgtcacccgcgccggccagatttatgcagccatgcagagcggcggggcccggtgcagtttgactactgccgctgccgctgctacggggctgaggagggaccactttcgggatccgcaatggcgagcctgtcggactcggcgggcgcaggcggcggccgcgccggcgcggagctgatggtgccacagttcctactcaaggcgctgcacgccatcctcgccgtgcggtcgccgcgcccgcacgcgccgccggccccggcggcgtcggcgtcggcgttccggaggcgtgaccggtggttccacctgccgatccacgcgccgccgccgccgcccgcggcggagcacctgccggacccgtcccccggggagccgctcgtggtggacgtgtacctggccccatcgggcggcgggccagaggaggtgctcgagaggtggaccgtggcgtgcgagccctggccgtcgcccgccgcggccgccgccgtcggggaggggctggcggtcaacagggcgtacaagcgatgcatcacgctgctcaggtcgctctacgccgcgctccgcttcctcccggcgtaccgcgccttccgcaggctctgcgcgtctggccaggtgtacaactactgcatgggccaccgcgtcggctccttcgccgcgcccttctcccgcgccgaggaggcggccatgcgcaccaaacgcctcgcccccgtcgagacccagctcggccgcctcgtcgtctccgtccagtacctccccagcctcgccgccttcaacttcgaggtcacttccctcgcgtccgccgcgatcatcacggattacgtcggcagccccgcggccgagcctatgcgtgccttcccaccttcgctcacggaggccaccggctcgccctttccgcagccctcgcggcgccccaacagctgggcgtcgccagcgccctggccgcacacgctcgggcaaccggctaaattctcgcctccgccggcccattacgcgtcgcccacgccctcgccaccgacgtttggctatctgcactcgcggtttagcggtgagactgcaccaatgaccataccgcaggccggcggtggcaggggcactgtgcaccatcggaacatgtcggaacccagtagagccttcatgtttcctccaccttcgccaaagaatgtgcgaggggaggcagggatgcaggagtcaccgacagagatcaatcggtccttcaagagggcggatggcatccgcatgggagatctctattcaaacttgccgtctggttctaagattaaggacactaaggatgaatctggcaggttctctggtgtcttctcttctagtggttcaccaagacatggtttctcaagaagttcaagcagattgtccatgcaggatgatactgatgatgcagattttccttttgctgtggatgatgtttatccagattcacggccagggagtagtagtggaaaggacacaggggatcaggctggttcgtcatcccataaatcccaagatgctgctgttgggtatctcgtccacctgctgaaatctgcacgtccactgagagattctacctactcatctcatacatcaaggggtgaatctaccgaagcaggaagcaccagctctttcttgtcccgcaggacatccgacgcactggaggagtttgaatctttcaaggaaacaagggagaacctgctagcacgtagtagatctcggctgcaagattcattggataagccctagtgttgatgcagtctgtggttcgattcctcaaaaggtgaagggtccaaactgtagagtaaagatcatatggcgagcctgggtaaactctttatttcagactagtccgtgtgtaaatagctaattaactggcgcttgattccgaaagagaatacacaggtcgccgttgattctattgttggaaacttgtcattcttaaactcaaagcaggaatatcgtgtgcctttgttcatagtgtttgtttacaagtgaaatcaacatgataatccatctttatcaaaa

SEQ ID NO: 2005 - DNA, 3108 bp, Zea mays
cgggcgtgcaccgttgcaggcggcagcagcatcagcacgcggccggctcaccgcgtcgtcgtcccccccgcgatgccaagccgcaactgcgggggggggctgcggctggtgccgaagccggatccgagcgccaggccgcgcctggccgtccgcttccaaatcgtgcatgattaggtggttgatggcactcgggtggtggtggtgcactgcggctcctcccgagcccccaaaagccaaattccatcgccctatggcatcggtacgcacgatggcataaatctcccagcttttcctccccacgcctctttttatctcccggctcccgtccccatcgagcgctcccctcgctgcccgggtctcccccaccctttcgcttcgccgcctccggggttctccgcgccgtgcattgattctaatgggaaagttcgcataactgaaactttgccgtggatcttgtgaattttagtgggaatttgatcgtggaaagtttatgaagttttgttgggattatggatgcataagatagtggtgtatgtgatttgcccatagtttctgcagcctcattgttttccatttgggatcaataaaacttcatgctcatggatagggctgatacatcaggttttgtcagtggtggtatacattacatgaacatccatgtgtattttcattttgtgtatactatgtgcttcctcagtggtgaagttgtaaagctggagttctgatctctgttggttggattaagtatctggtctctggataacatataaatttcttcctatcataatcctaccttatttataataagcaggatggaccttaataggacaaatctttggtttcatggaaaggaacatatagctactgcttcattctcccaggcccaaccatctgccataaattgcaggattgaagaactatctatgtcagccgtgaacttgggttacattacgagctcagaaatagcacagaactctagaaaatcatttcagcatggccgatcacagtttgaccgctccatatgatagctgcaggctggcccttggacttgggccaacaccaaatctatattctgctgatagtcactcatttggtggaaacaaagcttatcaatcagcaactttgctcagtcaacattgtgccacaaccgatcctggtttaatgttgggtctttcaagatgtagctcaagaaatttgcaatctacaagggcgagtggcagcaagaattattcacctgcaaggaagactggtatcatcttaccacttattgatgagggatcaacttcagcaaaaaggaaaaaaggtggctatttgctaccacttctgtttgtgccaagatcagaagatctttgtcttaatggaacatctacagacaccgatgcccaacaacatattggaactgaatgtgatactgaaagcggtcataatagatctctgaatcttcacgagattcagcctagcgctgatctatccattacagctggttgttcttttgctgcaacttctgatgtagtagccgatacaagtgatgagcagaggagtcatcagcgccatccaaagaaatgcaggttcaatggttgctcgaaaggtgcaagggatgcatcaggactttgcatttctcatggcggtggccagaggtgccagaagcctggttgcaacaaaggtgctgagagtcgaacggctttctgcaaagctcatggaggagggagacgctgccaggagctaggctgcaccaaaagcgccgaagggaagacagagttctgtattgctcatggtggtgggcgccggtgtgggattgaggaatgcccaagagcggcaagggggaagtctggattctgcataaaacatggtggagggaaaaggtgcaggatagagggctgcactcgtagtgctgaaggccatcctgggttgtgcatctcacatggaggtggtcgccggtgccagtacccaaactgtgataagggggcccaaggaagcaccatcttttgcaagtcccatggtggaggcaagaggtgcatgtttgatggctgtaccagaggagcagagggcagcacgtccttctgcaaagggcatggtggcggtaagaggtgcctctttgagggaggtgggatgtgcccaaagagcgtccatggtggaaccagcttctgtgttgcgcatggagggggcaaacgctgctctgttcccgggtgcaccaagagtgcccgcggtcgctctgattgctgtgtgaagcacggtggtggcaagcgttgcaggttcgatgggtgtgacaagagcgcacaggggagcactgacttctgcaaggctcatggagggggcaagcgatgcgcttggagcaccggctgcgacaagttcgctaggggaaggagtggcctatgcgcagcgcatacgaccctgatggcttccaaggtagtgcaccatcctggacatgcacgaagcatggtcgggccttgccacttcagcggcggcgtctctggttcgtcagcagctgatagcaacatggatcatgccatctcgtcatccggccatggcgcatggtcagactgcgtcgactcgtcgagagacatgcagagcgccggcaggctcctaataccacgtcaggtgcttgtccctggttcactgaaggacgctccttcgtgtggtctagcaggcaacggccaggacgacggagggagccggaaccagagctgtgggctcgtggtgcctgagggaagggttcacggtggagggctgatgtccatgcttggagttggaggcaacctgggaagcaatcctgatggttcgaaagcctgaaataccaaggatgagacgtagaagcacataatttaggttattttgcatgcctctgttatgattcttgcaatggaacatatacatgaatcttcaaatggccattgtgtaactatagtgcttgccaattggccattgtagtatttgctatgtacaagagtggttttggcatctagtcaatgttgtgcatagagctgagaactgcatagttacttgggttcagaaattatgcggaagcttgtaagttgtttcactccgaatttttgcaaacctgtttgctgaaatatttagtccatcctgacgggttcgatccttggctag

SEQ ID NO: 2006 - DNA, 3440 bp, Zea mays
atggcgagccatcagcgcggaggaggtcgggttggcggcggcggctggggtcaggcgaaccccaacgttattcagggccaggcggggcggggctacggcggcggtcgaggtggtcagtactacggcgacgacagccgcggtcgaggtggtcagtactacggcgacgacagcggcggacgtggcggcggcaggggcggtggtcgtggcttcgacggccgcgacggcggcggataccaggaaggtcgtggcgggggccgcggcggcggcggataccaggaagggcgtggcgggggccgcggcggcggcagataccaggaaggacgtggtggtggccggggtggcggcggctactactatgaaggacgtggcggggaccgtggtggcggcggctactatggaggacatggtgggggctaccaggaaggccgtggcgggggccgaggtggtcgcggctaccagggacagggaggcagcgactacggccgcgagcgcgggcatggcggcctacaaaccccacgtcctgctctgcgccaagccggtccgcccctcgcggaccgctacgcggccgacgcagccgcgttgagggacaagttcaagacgatggacattcaccgcgacgagcccatgtttccagcgcgcccgggcttcggcgccgtggggacgccgtgcgtcgtcaaggccaaccacttctttgtcggcctcgtcgaaaagggcctgcaccactacgacgtggccatctcaccagagacgacgctaaggggcatatacaggcaagtcatgtcgaagctggtttccgagaaccggcagaccgagcttggcggccgcctgcctgcatacgacgggcagaagtcactgttcaccgccggagagctgcccttcaagaccaaggaattcgttgtcaccttgtctggcaggatggaaaggaggtacaaggtggtgatcaagcatgccacggcggtcagcctcgaccagctgttgatgctcatggcagggtacccaacggacatcccggcgcaggcgctgcaggtgcttgacattgtgctgcgtgacattgtgctcaacgaacgcaacaccatggagtacgttgcagttggccggtccttcttctcaccactcatagactcaatgggacccaagaaccttggcttgggtgtggagggatggaagggtttctatcagaccatcaggccgacacaaaaaggcttatctgtgatcatagacatttcttcatcagctttcattcgacccctgccactgattgactttgttatggagattctgaacaaagataacaggacctttagaagtattacttccatggatcttgtcaagctcaagaaagccctcaagggtatgaggattgaagtcacacaccgaggagacatacgccggaagtaccgaattgccagcttgacaaacagtcctccatcttcacagttctttgaatcatctgctggagttcagaagtccgtagcagattacttcagagaggcataccatctggaaatgcactatgattttctcccatgcctccaagttggcagtgatcagaggccgaattacctccctatggaggtttgcaagatagtagctggacagcaataccggaagaagttggaaggccaacaggtctctaaactaatggactccacctgccagcgcccatctctccgcgaggacaacatttgtcagattgttgagcaaaatgactacaataaaactgagcgtgcaagtgaatttggcatggaggttgattatcgtcctacttcagtgcaggctagagttctgccagctcccactctgaagtaccgtggcactggatctgacagtttgtgttgtccaaaggatggtcagtggaacatgataaaaaagcaagtagtagatggtgcaagggtgggcaactgggcctgcgttaacttttgtcaagagttgcgtgcagatggtgttggtaaattttgctctgatctggtcaagtggtctcgcactactggagtggacatggataacttgagacttccaatatataccgctcgtcctgaacaagctgaaactgatcttcgtaggctctatcaggatgctcggaacaagctaagagggcaaaagtttgatcttttgcttgctatactgccagagaaaaatggcagcttatatggtaatttcaaaaggatctgcgagacagagattggtatcatgtcgcagtgttgtttggataaaaatgttagaagtgcaggccctgcatattttgctaatgttgctattaagatcaatgccaagtttggaggaagaaacttagaatttgctaatcccaaagaaagcttaccgggtgttacaattgaaccaacaattatatttggtgctgatgtcactcaccctgccgctctagatgataccgccccttccattgcttctgttgttgcctcccaagactggcccaaggtggctaactataatgggattgtccgtgcacaaggtcatcgtaaagagctcatcaatggcctggaagacattgtcaaggaactcctacttgcattcgaggagaggtctaagcggagacccaagcagctgatcttctacagggatggcgtaagtgagggccaattcaaacaagtgctggaacaagaaatccctgagatagagaaggcatggaaagctctttacaatgagaagccaaagatcaccttcctagtggtgcagaagaggcaccacacaaggctcttcccaaacaacccaaatgatcgccaatgggcggacaagagtggaaatattctacctggcactgttgttgacaaggatatctgccacccaacagaatttgatttcttcctgtgcagccatgctgggatcaagggaactagccgtcctgcgcattaccatgtcctgagagacgacaacaacttcactgcagacgcgctgcagtctctcacatataacctatgcttcttgtattcaagctgcactcgctctgtgtcaatcgctcccccagcatactacgcccacaagttagcgttccgcgcccgcttctacgtcaaccaagactctgatgcggcgacaagtgtcggctcttatggttcatcagctccctctgctgctgctgctgctgctggtccgaagccgcttccggagatcaagggtgaactgagaaggctcatgttctactgctagtccttgaccacgggaaaccctttcctgaacaaggctttgctcttctgaagactgaacaaggctgctgcattatttattatgaacaagcctgaacaaggctgcattatactagcttaacgtttgtagtttgcattttatttcatataaacgatccaagtctttgccgaacttgattattatattcagttattcagcattcacgggacgctagagggaaaaatcgaaattttgaaacgctttggtgaaccattttatattcagttaagcattccaattaa

SEQ ID NO: 2007 - DNA, 2609 bp, Zea mays
ttggcaagttaagcgcgcgctcctttgggcagtttggggagaacactggcgcccagacacacactttagccaccgcaacacggaatgcttggacacccggcagatctgcggcgcccctgcgctgtgctcctgccaccaacgccaaatcctactcgcggtcgcgggaggcgaaaatcccgttagttgcccagacccagacccagagaggagggcgacgaacacacggtgacggagagccgagtggacaggacaggagcgcggagggaggaggaaacaaagcagaaaagcaacccccgtcttccatctttgcggagcgacgcgcatctgccctgcccatctctttcgtgctcctaccccccgccttcttccgcccgccgcctcagccctcaaggcttttccttctcatcttcttctcagaccggggacgggcccgacggggacagggacaaaaggtggtgcgatcttgttgggcacactccgcctccgcgcgcgggaagagagagagagagagagagagagagagagagagagaaggacggagggtggcagggccgccgcgccggtgagccgacccccagccatggcattgccggctccccccgtccgcctggcgctgctgctgctcgtcgcgctgccattctgcgccgcgcatcccgggccgggggccttcaacgctcctcgccacttccagacgcccgcgctccactctgatggatttggcttggtggcaagaaggtcgattgctgaagctcctgctgacatcaacgtcactacgaatagctcctttgtgctggcggcagataggacatatcgaagggaccctttgaatggcttcaggaaatacccgggcggctggaatatcagtgaagtgcactatttcgcttccgtcggatatacagccattccgctgttcgccattgctctcgtgtggtttgtgatctttttcctggttatgcttgggatttgctgccgtcattgctgttgcccgcatcacacctacaagtattcacgaacagcatatgctctatcattgatacttctaatactgttcacatgtgctgcaattgctggatgtgctatgttatacgatggccagggaaaattccacaagagcacaacaactactctgaagtttgttgttagccaggcaaactatactgttgacaaccttaggaacctatctgatagtttgtctgctgcaaagaaggtcgacatagcacagtcctttttgctgcctcctaatgtgcaaaatgagataaatgaaattcaaggaaagctgaactcatcagctactgatcttgctattaaaacaacagataatgccgcgaagatcaaaaaggtgctaaacagagtgcggcttgctttagttgtcattgcagctgtgatgcttcttctggcatttgttggcttcttgttatccatctttggtctggaattccttgtctctgtcttggttattattggatggatattggttactggaacgtttatcctgtgtggtgtatttcttcttctgcacaatgtcgtttcagatacttgcgttgcaatggaagagtgggttgctcatccgacagaacacacagccctggacgaggttatcccctgcgtggagcctgccacggcgaacgaatccctgtacagaagcaggcaggtgacgttcgagctggtgaacgtggtgaaccaggtgatcaccaacgtgtcgaacaggaacttccccccgcagctgacgcctttgtactacaaccagtcggggccactgatgcctctgctctgcaaccccttcacgcctgatctgagggaccgcaactgcagcagaggagaggttaccttggacaacgcaacccaggtgtggaagaagtacgagtgccagagcaccaccgtctcaggaggagccgagatctgcgcgacggtggggcgtgtgacccccagcatctacgggcagatgaccgcgggcgtgacggtgagccaggggctgtaccagtacgggcctttcctcatccagctgcaggactgcaccttcgtgcgcgacaccttcacgaccatcaaccagggctactgcccggggctggagcgctacagcaagtgggtgtacgtgggcctggtgatggtctcgttggcggtgatgctgtcgctcatcttctgggtgatctacgccagggagcggcggcaccgcgtgtacagcaagcagcaccagccgtacccggtggaggacaagccggcggcgacggtcccgggcgcttgaattgatatggcccgcccgttccagtgctccggcctactcccgtgccgctgtgcatactgtactccgcgcgctagttgggttttacgtggtggtgtaggtggatgatgtaccctggattgttgttcgtttgcttggtgttgctgtatgtttgctgattttaagttgttgtgcattctcgtactgacggtagctggacaatgaattgattgtgttgggattggttattattaggtgttcttcagttcgtttctcgtcgcctgtgctgtgctgtgcatcatcatcatcatcatgcacatgaccacactcatgatcctggtgtttcttctgtgagcattgtttgcgaaggggagatggatcttgaaaaggc

SEQ ID NO: 2008 - DNA, 3837 bp, Zea mays
tccctcaccctgagacagcggcatgtgctcccccgcggccacgctttccagctccacctttttcatcaatcgaactaacagcctgcaaccaaacagtactgcctctcggcggctagctagaaatgacgacgacgacgacgacgaccacgaggcattggctggaatcccagttcccaccgtcccgtccatggttccgtcgtccatccagccagcaacacctcatgtgcgaacccggttcagcggaatcgccatctccaaattctcgatccgccgcgtgcgctgcctgcggatatctccctgtccgtgtcccgctcccgccttgcttgctgctccaccaccgcactgtaggtgctgcctgcctgcctcctcctgaattattcttattcgttcgctattaattattagccaccgctatatccttcccttcctcgtcttcctcctcggagtcggagaggtccgtccatctcgatccgcggcaagtctgaacggacgactccgaagcttacttgccagagagccgccgtttaggtggcggcgatccttccgtggttccttctcggttctgcctgcctgctgctgcttcttcttcttctggcggggccgaatcgagagcgtgtccgccggaatctctcagtcatcaggcaggctgcagcctacggcggtcgattctactgggattctacactactcgctcaagagtcgagactgcatgcggctccaagggaaattaattaagatgaggtcttttccccacctgctgctgatcctggcgctcctcttggtcctggagaatgtccgggcgcaacccaagccacttctcatcaactgcggctcgggttcaagcgccgacgtcgacggcaggacgtgggtcggggacgcccatcccgacggcggcgccggcttcacggtcacattggcaggagccactgccacccgagctcgaaaacctgtcgacgaaggaggaggaggaggggacgccgcgtacggggagctctacaggaccgctcgcgtcttcaacgcgtcgtccgcctacaggttcagcgtcgccgccgggagctacttcctccggctccacttcagccggctcttcagcagcaacctcagcggcgacgccaccgccaaggaagcggtcttcgacgtcacggccaatggcctgaggctgctgtccaggttcagcgtcgccggggagatctactggaggaactccaggaccaactccaccagcgatgtcgccgtcaaggagtacctcctcaacgtcaccgccgcgaggccgctggaggtcgagttcgcgcctgacgccgggtcgttcgccttcgtcaacgccatggaggttgtccccgtccccggcaactcgatcttcggttcggtcaacaaggtgggcggggtggggctgaagggccccttcagcctcggagagagcggggtcgagaccatgtacagggtgtgcgtgggaggcggcaagatcgagaggaaggaggacgacccgcgcctgtggaggaggtgggattccgacgagcgctacatcttctccatgaacgccgctcacagcatccggaacacgtccagcatcagctacgtgtcgcgcgacggcgccgactcggtccccgcgccgctgcggctgtacgagacggccagggtgacggaggagaccttcgtggtggacaggaagttcaacgtgtcctggcggttcggcgtggaccccggcttcgagtacctggtcaggctgcacttctgcgagctggagtacgggagcgcggagcagcgcaggttcaagatctacatcaacggcaagaccgccgcggagaactacgacgtggtcgccaaggccgggggcaagaacaaggcgttccacgaggacttccttgacgacgacgacgccgcccccgcgtcggagaccgacacgctctgggttcagctgggctccgagtcctccgcgaccagctccgcggctagcgacgcgctcctgaacggcatggagatcttcaaggtcagccggaacggaaaccttgggcatccgacggttaggatcgggggcgtgagtggtggcctggaggacgacagacgaaagcggagccccaggtgggtgctggtcggcgctgctgcgggtgtggtgatcttcgtctcggtcgctgctgctgtttacctctgtttctatctgcaccggaagaaaaacacaaacacttcagctgctaataagaaaacgaagacgaagacgaaggacgacaaccttccggctacgacgacggcccccggtcttcgcgcagctggaacatttggcagctgcaggatgggccggcggttcagcatcgcggagatcaaagcggccaccatggacttcgacgagtccctggtgatcggagtcggaggcttcggcaaggtgtacaggggcgagacggacacgggcactccggtggcggtgaagcgggggcacgcagagtctcagcagggggcgaaggagttcgagacggagatcgagatgctgtcgaggctgcggcaccggcacctcgtctccctgatcgggtactgcgacgagcaggacgagatgatcctggtctacgagcacatggcgaacggcacgctgcgaagccacctctacgggagcgagagcgagagcgaccacctccccgctctgacgtggaggcagaggctggagatctgcatcggcgcggcgcgggggctgcactacctccacacggggctggaccggggcggcgtcatccacagggacgtgaagaccaccaacatcctgctggacggcagccttcgtggcgaaggtggcggacttcggcatctcgaagcacggcccgccgctggaccgcacccacgtcagcaccgccgtgaagggcagcttcgggtacctggacccggagtacttcatgaggcagcagctgacgcagagctccgacgtgtactcgttcggcgtcgtcctgctggaggtcctctgcgcccggcccgtcatcaacccggccctgccgagggaccaggtcaacctcccccgagtgggctctggagcggaagaggcggggcctgctcgagaccgtggtcgaccgtcggctggacggaggctacgacctggagtccgtcaggcagttggctgaggtcgccgagaagtgcgtcgcggatgagggacgggaccggccttccatcggtcaggtcctgtggcacctcgagaccgctctgcagctgcaccaagcgcatctgcagagctcatcagcctcagctgctgcgggtgatctggagccctctgatggcgcgtctgctagcaacagcatcaggcgcgccgaagaggcagcagaaaccgctggtgtgacctatggagatggacatggagatggggaagcggtggaactcagagttgaggtactgtaaacgctgtgtgtgtgtggttgccccagcaaatatactgaaatccttttggttcttcattccgtcgtactctgcaaagaaaatgcagtgttgagagttgctattctttcatcgatgtgcgagaattcacgcgtgtcgaaattttcctgagtttttagtgtttttatacggtcttggactcttggtgcatcatctacgtggcaccacggccttcgtagctgaagccactagccgtaggataggattctctcgctcgatcgctggatttcttcagtctgtcacactgtacagcacatagcacagcaacgttgcttatatattatggattttttcgttcacatatccaacggatctggggacagctggatacagtgtacaggtacatctaaactacgtggcactgcatggtacatagatttctttttcttttttcccttggagccaaggcttcaagaatcaagaaggcccgag

SEQ ID NO: 2009 - DNA, 1217 bp, Zea mays
ccaacatgagcttatttaactttgcttaattcggccttggcatgctgtcagtccctcccaacctccattccttcctcctttgccaatgcagctctgatctctcctacctgagaatgtcagtgtgagtggccattccatctgcacaacatcctcctccacgcacgcaaaacatacaaaaaggcagaagcggaggagatgaaggcaatggccgggccaaagctgctcgtcgtccacgcgtcgtcgaacaaggccctgaacgggatggcgcccacgtcgccggcgtcgcccggctggtcgcggtgcctgtggctggtggtgttcctggccttgttcacctgcgtgtccctcctgaccgtgctctccacggcgcgcgcctcggccggggcgccggcgtgccaggcggcgtcgctcacggccagcgctgccggcgccacggaggccggcctgccgcggcacgtgttcgacgcgctggtgcagtacgcggcggcggcagggaacttgtcgtcgagcatgccggagccggacgtgcgcgcgatcgcgtcggtgctccggcggcgcgcgccgtgcaacctgctggtgttcgggctgggcgcggagacgccgctgtggcgcgcgctcaaccacggcgggcgcacggtgttcctggacgagaacccgtactacgtggcccacctggagggtaagcacccggggctggaggcctacgacgtggcctacgccacggcggtgcgcgagctccccgacctcctcgacgccgcccgtgccgcgcgcgccgctgagtgccgccccgtccagaacctgctcttctccgagtgccgcctcgccatcaacgacctccccaaccagctctacgacgtcgcctgggacgtcatcctcgtcgacggcccgcgcgggttcatggaggggtcgccggggaggatgtcggcgatctactcggctgcggtgatggcgcggaccaagggcgcggagacggaggtgatggtgcacgactacgagcgggaggtggagcgcgcgtgcggccgggagttcctgtgtgacgagaaccgggtcacggcgaccagcacgccgtcgctcggccacttcctcgttcgcggcggcgccgccgccaaccgggaagccttctgcgggccgcccgccggcgccgcccagaaatcgaaaccgagctaagcgagtcgtagtcgttacttctcaacgaatcaagctgattcatcagaagt

SEQ ID NO: 2010 - DNA, 1465 bp, Zea mays
tggctagacattgatgagtgcgctcggccagacctgtatccctgccacgggaaatgcaagaacacgccaggtgattacgaatgtagctgtccagccggaaagagaggaaatgcaaaacaagcgccgtgcaccgacttgttttctctgcctgccaagatttccgtaggtgtggtaggtggccttttcatagcagcgctactggtgttcatcatcctaatccgcaacgagaagaggaagatggccgaatttttcgagaaaaacggaggccctacattagagaaggcgaagaacataaagatctacaagaaggaggagctgaagccaatcctgaggcgaagcaatttcatcggaagaggtgccttcggtgaagtttacaagggagacctcgacggccaatcagttgcagtaaagaagccagttgatgacagtgacggcgtgcacaatgaccagttcgccaacgaagtcatcatccagtcacgggtgaaccacaagaacatcgtgaggctgataggctgttgcctagaagtcgacaagccaatgctcgtgtatgagttcctctccaaaggcagcctcgacgatgttcttcatggaagcagacgtgatccactgaacttgaaatgccgtctggacattgctgcagagtccgcagaaggcctagcctatctgcattcgaaaacaacaaacgtcatcttacacggcgatgtgaaaccagctaatatacttttggatgaggactggacaccgaagatctctgactttggtatatcgaggctgattgtgaaagataaacagcacacggattttgtcattggcgacaggagttacatggatccagtgtatctacgagacgggctactcactgatagaagcgatgtctatagtttcggagttgtgatcttggagctcataagcaggaagaaggccacctattctggcaataatagtctggtaagggaatttctcgatgctcacaaaggtaaaatggaagcgaccaagttatttgatgaggaaattgccaagccagaagtttcagatcttcttaatagtctctatgagattgcagtgcgttgtctgaatcttgatgtggatgaaaggccaagcatgacagaagtagcagagagtattctgatgctgaagagatcctggagcaatacattgacaaaaacgtcgtcagccagttgataaagattgatatatgttatagcgtgcatgtgactgtactgtctttgtggaatctggtaacaagtaactactagttagtatgccagatgattaatatatgttatagtgtaattcatgtttgtggaacaaggtaagcgactattggtgtgattgtgtatgcatctactatttaaacaaactttgctgattaaactatggagatctcaccctttgtttagaatgtgtgtgcatgtatcgtaagttgtaactcgttcaatacaattacaaatataattcactaccg

SEQ ID NO: 2011 - DNA, 906 bp, Zea mays
atgctgaggccgcccgcgctagcgtgctgcaaactctacatctccgaggcccgcaactcgggggcgttgcgtgccatcgagcacgcagcggcggcgctccgcccgttggccgtgctcgtcaacaccttcgccgacgacgcctacaaccgggtcgggtacacgctcgtgtcccccctcgcgggcggcggcgcctcgccgccgctgcgctgcgcatcgttccgcgtggtcgcggccgcgatcgaggccgtcgacctggacgcccacgccggcgcgcacccgcgcctcggcgtcgtcgaccacgtcgccttccaccctctggccagcgcccacctcgaggacgtcaccgcgctcgccagggccgtggcggcggacatcggagacaggcttcaagcagtgccgacgtacctgtacggcgcagctcacagagacggtaggacgctggcgtccatcaggaggcagctgggctacttcacgccgacctcccccggcggagagcagtggcacggcgcgccggactcgctgctgccagtggccccggacgccgggccccggacgtcgtccgcgtccaatggcgtggtggtggtgggcgccacgccgtgggtggacaactacaacgtgcccctgaccacggccgacgtcagcgtcgcgaggcgcatcgcgcgcgcggtcagcgagcgcggcggcgggctcgcgtgcgtgcaggccatggggctcgcgcacggcgacggcgccaccgaggtcgcctgcaacctacttcacccggacgcggtgggcgccgaccaggtgcaggagagggtgagccggctcgccgccggcctcggggtcggcgtcggccaggggtacttcaccgacttgtcgcgggagaaggtcgtcgagctgtacttgcaggccgctcaagctgcctga

SEQ ID NO: 2012 - DNA, 1419 bp, Zea mays
atggtgggcggtgggacgaggacgaggagggggagggggagggggaggaggagcacccgtaggacggaggaggaggcgcagcaggacgacgccgtacagcagcaggtggagcagcaagccgctgtcgatgcggcacagcaggacgacgacgatgcggcgcagcaggacgacgacgacgacgccgctcagcaggacatctcaggttctggctcctcaggttcgaggagtatctacctgcgaggtcccgcgagcctacctaagcgacccatacttcgtgacagacgtccgctgatacgacccgatggagagaggtcttggatggttttggagactgcagggggtcacggccgcaaccccaatggcatcctcggccttctatgccgggaacactttcctggacttgtcgagtacgccggagtgacgagcccagcatacaccttcgaccactacgccgtcgcccccgatgcagtagatcgggacggcagacaattcaacaaggcggagcgggtgaagcaagagctgtgggatttcttcaggtgcgatgctggatacgaggccagggcggatgtggtgtctacgacgtgctgtaagaagctcgtcgtggacatgcactacgaggcgcgcatccaggccatcgtcacttaccacggttccgtccttggggagaaggtgaacaagaaggacgcccgaaccatgtcattgactgcggaccagtacttgcagatgattcctcattggtgcgccgcgcatcctgagtgctgggagaagatggtgcagaggtggtgctcggctgagtgggacgaggcgcacaacgctagccgggaacggcgtttgctgatgcaaggtccctcccaccatcaaggcagccgcagcctgggcaaatacgcggaagcatggtcggcggcacatggtggcgcgccttgctccacgttctcggcatatgccatggcccacaaggggaaggcgacgtccgacgtcacctacaacccggatgacgggcccgaggcgtacaccaaccccgccatccacagtcgactcagtgagtacaccgccatggccaaggaggtccatgggccagattacgatccgaggaccgaggacatcgacggagatgtcctcatgagggtcggaggaggcaagaggcatgggcggtactggattgccgacggggcaatcgactcgtcctccactcccactctctctcaggtgcgagcaaggagcacgagcgcgagcccagccatacgacctcggcaggacacctcacagcatcgtatccagcaactccagactcagctagatgatgagaggaggcaacgtgaggagctggagaagaggatggcggagatgttcgcgtacatgcagagcccttggcgccgcacagggtcatgctccaccacctccgttgttccctgcagctga

SEQ ID NO: 2013 - DNA, 1215 bp, Zea mays
actgagaggggcaaggtacgaccgcctatctatcccatccatctcctctgctccaaaaaccaatcaccaagagggcgcacacacacgcacaggcagggaaggagggagggagagaaagaaagaaagaaaggacagtctcagcagcacctcctcctttcgttccctgtacggcgacgagcgctcaccggatccaagaacaacgaagccccctctatctctctctttcttgttcttctgtcttcattcgtgcttggagggttggtttgtccctcttcgctttggtggttccgcaacttctgaaccctgattttgtgttgtcgctggttagacgacgacgacgacgacgacggcggcgtttctgtagatgcggagaggctctcgagagattgacagaagagagtgagcacacggcgcgacgaacgacatagcatgtatgccgtcctcgccgcgtgctcacttctctttctgtcagcctctttctctcgatggcttatctcccgtctagatccgttgttagtcttagtctcttagtctggtggggggccgggcaaaatccgtgtttgatttcaattcaattaaaggctgctttggtgtcctagttggtttcgattcaattagcctgatttgatgtccaggtttgatttcgattcaactgaaccggtttaatttgatggggttgtagtacctttttttttcttatcacaagagacagagcatgcatgcggcatgcctccatggccgtggctttttttcctgctttacacactgccgcctccttatctcctagatcttcacacccatggttttttttccctattttgttctgtggtcttttcagtcatgctggctgggactgctaccgatgctgctgctggtcatgagaagctagctattggccttgtagtaccggagtaaatgattggcgctactagttttttcccctatccccaaatttttcatcttgcagtggtacccttcgccttgggagctgaaagcatggggagatgctgccggccggccggccagtacactgcaacactgagaggtcatggacgaggacgactcatggtggtgggtggggtcgatcaagttcttgttgttgggtcgaaaatggagcacggagacgagccatatttagcaaggaaggtagtgtcctcacttcgccccggccccctgcgtgccatgccagctgataagcttgcatctaggttatag

SEQ ID NO: 2014 - DNA, 4066 bp, Zea mays
aaattcagagctgaaaatcaatggttgctatccttgcagattccatcatattccctgacgttccaatcgcacttcggttatcaagtcatcttatgttaggcgtggtcagaatctattctcggaaggtcaactacctattccatgactgcagcgaagctttgctgaagataaaacaagctttcaggtccactgctgttgatctacctcctgaggagtcaactgctccatatcactctataactctgcctgagacattcgatcttgatgattttgaactgccagaagctgtgtttcaaggcgatactgatcatcatgtgagcacaaaagagcagatcactttgcaagacaacccagagaaaacaggatattcaacatcccagtttggcctagatgaaagatttggtgatggcagttcatcacatattggcttggacttggaggaggaattaattctgaacaaggaccactcaattcatctcgagtctgatgatggtattattattcaaggtcggtcatcggtcccttctactgatatggagattgatgataacaaaagtacaaacataacagctgaaggatacagcaacatggacggtgggccttctagtcatgtaaagttaggtccactgaatgcagatgacctaggaggaaacagtatccgtaactggactggttacaatgtacagactcctgatttgaatgatatattattgcataataatgaggatattgcaggcccatcaacttcgtactatcaacctagcccatttacttgtgatgaacctgcatcaccagagttcattagcgctcaggccccagctacacctggtttaatggaagagacagttccttccagagtccatgaaagtcctgttctgagtccacagagaaaggcatcaccatcaactaatgatgaaactgcaaaggctgacactcctgctgcaccagcctcagattttctccattcagctacaggaaatgccagtgatgtggtgggtgctgagatgacagaacttggattggcgaaaccggtgcaagttgagtcttctgttgtgcaggactctgatgcatcggtgcaacagcacacaagtgagggtttaccatcccagggtcaagcttcacacttggaagctgctgctgataagttggtcggctctgatggtatagctgcatcggttgatgaaacggtaactgtcaatgcaaccattgaagatgtacctttggctgtaaatgattcagagccatgtgttgatggttctgctggaccatctgtggtgaacctggtacagatggatggtccattatttgatgcacaaggtacagtactaagtgcagattttcaacatgaagtccaagcaatgcaacaagtagtggcatctaacgatagactgaatgaactatcaacttcagaatttgccgagcctgagaaaatgctgacagctccgaatgctgaattcaatcatgcgattgacttggggcagataactgcggaaaaaggaacaattgaatctgatggaagtaacataataggcagcctaacaagcagaaaaagacacctggaatatagcttaccagctttagagagtgagaccactaaaaagttgcctagccgaccacatgttaaaagaaccaatgattttgttcctcatgatgatgatatactggcatctattttagtcggtaggacccctgggttcacacttgattcaacaccactaccaccaagggaatcatctctgaaacgcccaaggttggggtcgaagatgggtacactcaagagaaaagtgcagatagatgatgccatggtcctgcatgctgatactatacggcaacagttgatcaatactgaggatatacggcgcattcgtaaaaaggctccatgcactcgttccgaaatatggatgattgagaaaggttcactggaagatgatttattccacgagcccatcttttcctgcctatctgaggagctaaacaatttacacaatcggacatatgagactattgtacaccctgctgttcagagaatggaactacatggtcaattagacatgcctgaaacaataccagaatatagaaatattgctgggtttggttctgctactattgatggcccacttcacataccagatgggattcaatcagatgccatgttgtcaggcgcaaatgttgcatatggcgctacagctgcttttggtttgcaaattcctcctgactaccaggttaaccgtgcatctaatgattttgttgtcggcactcagcttcaagaggtggctaaaccttttattggtaatgagcacgaagtggcacctcctgacagagagcatgctcaagtagatacattgtatagtgaccgttttcaaggtgttccatctgatttgcagaggagtaatgatgcaaatgtttctagtcaagatgtggttctagataactctggccaagcttgtgctcatgcagtggacggcatgacaagggagtttaatcattttgttcatagagacgctaatctttttgggagtactgaggtccctgcttctgagattactggggtggaatataatcaagatgcctctggttttcctcgacaaacagaggatgacaacacggtggagtataatcaagatgcctctggttttcctcgaccaacggagggtgggaatgcggtggagtataatcaagatgtctctggttttcctcgaccaacagaggatggaaaaacggtggagtataatcaagatgcctctggttttcctcgaccaacagaggatgaaaacacggtggagtataatcaagatgcctctggttttcctcagccaaccgaggatgaaaacacggtggagtataatcaagatgcctctggttttcctcggccaacggaggatgaaaatgccgcgtctgctacgggagataattctggcttccaagaaaacaacacgggttctcatatggatctggatatgatgaatgactatgaagtgaaggaatgcaacgattttgggagtgcgattcatggcgttgatacagattttctgaactatggtgacgacgacaacgacgacgacttcgtcgacgccgacgagccaaatcccagtgagttccagtctctcgacaacagcggctggtcttctcgcaccaggggtgtcgcgagatatctcaagactctgttcgacgaggagtccggtctggggaggaagagcgtcgccatcgaccatctggtgcgcgggaagacgcggaaggaagcgtcgaggatgttcttcgagaccttggtacgccgattgatttttttcgcggttctgcgccgagctagcctcccagggcatcgcagtgccacaactagcttgctatatgtttgtttcacccccatgcatgcaggtgctgacgacgaaggactacatcagcgtggaccaaccgaaccccttcgactttgtgagcgtgaagccaggcccgaagctgctcatgtcagagttctagttcaacaaagtcagcgtaccctggcgcgatacattccctcttaccattgtatccatcatcacaccgaccaacaacaacaccgcagatatccccccccccctcctcttccaaaaccatttttgtgtatgttgttgcagttcccctcccctgtagcatctggtgcgctgatccgttgttgttgccagggcgtctgtccgagtaggatggtggttgtgttgtaccgtcggctatccaacagtatatagtagtagtatgattttagcgacactcggtgaagcccgccatgtaatctgctagggttcatgctcccctaagttactgtcgctttagactggctaaagcccgtagaggaattgtatacgagaaggacagggacagcccgagatgatgaatgatgtattgatgtgcctgttgactatgtgaggactgacggttttaactcaataattcaagtgacctttcctgtgaaccatgaatccatgccggatatgaggtaaagatgaggaatggcctcgtacatccgtgcctttcgcgatgaaagaaagtggcttgtgatttgttttcccgttacaggccgatgggcgatggtggccca

SEQ ID NO: 2015 - DNA, 1954 bp, Zea mays
tagttttggtattatttacatgtaagatctaacttgccaatgcctgtattcaaggaatgtaataacacaatcctttcacagcttattttataccttttttgtttccttgggcacatcttgaagtatttctggtttactgaaataacaaatattgttagcaattgaagcacatccatagcaaatgtacgaattggcaccagagttcaccgctgcacaatttgtacagtaagctcacttccatatttcataacacaaacattgttatgagttgttagtttgtaatgctgctaaggtacatagagaattgacataagaaccttgcttcaagagaattgacacaagaaccttgcttcattcgtaattattttttctgtcgctagtatgatctgggtgtcttcaacgtcccttactactgaaggaatcaactggtttgacaacctggacggccgtgggggcttgtacatcctccatgtcctcagcgtccatcttggtggtggtgagtggcacttgcaccagtggcctccatcccctaaattctgtgcaggagcgcctggctctggctgcagcgccgtggcagggcgaggcacgtgtggcggctaccgaggtgcttaggcgtgatgtctaggtggtggcaaggatgagcaggagggccttagcgccgtcaaagcaggggtctccgcctcgggggcgatcacgatgcgtgggagagggagccgcagcgcgcggatctgggtcgcggggcgcgcgccccagcagcgcggccatagcgcgccctgcgcgatctgcagcgacgccgccgtgatgggcaagtcgaaggcggaccgcagcccgtccgggaacccgagcctcgacgacaggcccgcggcgaggacgtcgcggaggttgggcgggaacgcgaaccccatctcggcctcgcgggcgccagctccagctccgtcaggcccgggagcacggccaccccggaggcccggaggtggcgcaacaagcatgtagacgctgagctgaggcctgcacggcatggcgagccccgacgccacccccatacttctcgggcgcgtcgtcgcggtgcctcagcggcgccgatgaggtggacaatgaggaggcgctgcagtgggtcatgatggagcgactaccgtccttcgagcgcctgcgcacgggcctcgtgcggccggcggacgcttccgacggcggcaacgccagcgaccgcggccggaggcgccggcacacgcacgaggaggtggacgtgcgcgcgatggggctcgcgcagcgccaggcttttgtggagcgcgtgttacgggtcaccgatgaggacaacgagcgcttcctcaggaagctccgcccgcgcatcgaccgcgccaacatccagatccccacggtggaggtgaggttccggggcgtcaacgtgcaggcggagtgccacgtcggcacccgcgctctgcccacgctggcgaacgtctcgctggacgtggccgaatcgttgctgggacgcgtcggggtcaagctcggcaagaggaagacgctccacatcctcaaggacggctccggcgtcgtgcgcccgtccaggatgacgctgcttctcggcccaccgtcgtccggcaagacgacgctcctgctggccctggtcggcaagctggaccccactcttgaggtcagcagggaggtgacctacaacggctatgggctggacgagttcgtgccggaagaaggcggcatacatctgccgacacgtccacgaagaaggtcggcggagacggagacggcgagacggcgcggaggcgggtggtggcagtggcgggctgttggcggtggatcagcctcgtgggcgacgccaccgaaggctgagcggggtggtgcctgcacggcgatgggtggcggcggggtggttgccaaaggcagggacggctgcgacgggggagggggcgggggcggagcacggtcggatcgctctggatga

SEQ ID NO: 2016 - DNA, 342 bp, Zea mays
atggcagcccgcccacggctcgccggcgcggcggctcgcgcggccatggcgcggctcggcgcgcgcggcggtcctgccccggccttccctgcctgcgacgctcgcccccggccgctgcgcggcctcgcccgcccgcacagccccggtcccggcgtggcctcggcgtgcgcgcggagccccggcgcggcccgtgcacgcacggagcccccggcgagctcgccgcacccgcggctcacggccgtggcggctcggtcccgcccgcattggcgtgtcccgcccctgcgcagcgcggccccggcccggcgcggcttcggctcgcgcggccgtggtgcccctgcgtag

SEQ ID NO: 2017 - DNA, 1935 bp, Zea mays
tcctgtccatttcctgctcacgaagcggaagccgcccatggccacgcggccgtcgctgcggtcgagcgacggcgcgcgcccaagaagcaagagcggggccggcaggcccccgtccagctcgcgcagccccggcccgtcgcgcccgtcctccgcggcggcggccgacaagccggtgccgtccttcctccgccccaccgttagctcgtccatgcacagctcctcgtcgtcctcctctctgccgttgccctgcgcctcctcctcatccgccgcaggctccaagggcgccgccgccgctacggcgaggcggtccgccgacaaggccccggcgcggccggtgggcgcgccgcggccgatcacgcccaaggacagggcctccgcgcagcctgtgggcgcgccgcggccgatcacacctaaggacagggcctcggcgcagccggtgggcgcgccgcggccgatcacgcttaaggacaaggccccggcgcagccggtgggcgtgccgcggccggccaaggccaaagcgccggcttccgcgtcgctgtggggcgcggtgtcgccgaggcagttgatgcagagggcgtccaacgcgttcaaggctagcagtaggtcccgcagcaagaagggcaaggaggaggccgcggcatcagcgtcgtccggcggcaagggcggcgctggtgcttccgccagggccaaaggccagacgtcgagagcgcagcaccagcagcagcagccggagacgcccgccgagccgtcgcctgccgtgactcccttggaactggaagcggaggagcctgtcctgttggagtccgacgctgcaggccagaatggacaggacgtcgcgacgtcgcaggaggctgccagcactgacatcacgactgtggcggtgaggtgtcaagaggagcaggtcggcgcagggcagccgaaggaaaaagcggaggcggagatgtcggatttgcaagaggagaggccgcagagcagcgaggtcgtggagacagaaacgggggcccatgagcgcacggacgatggctcaccggccgtcgttggagaagcagcagcaacacctgagggagaagatgagcttgcaaccagcgcggcagaagagaagatcgtcgaggagatccagcgagcagaggcgactgagaactcgaaggcgaacgcgaaccctgaggaaccagaccaagaaaccggcgtgatctccgaagaacccaaggagggaacgagcgtggtctctgaagaaccaaaaccaaaggaggcagctgatcctaccactgcgcagaagcgcgaggaggcgtccgacgagccaaaaacggctgccggatcgaacgcgtcagctccgacgacgccactgacagaagcggccaactacgacggcaacgacgacgtggaggcaacgcctaaacaggtgagcgcttcggagcccgtgacgccggtggcagaaggcatcagcaagggcaaggaagtgatggagacgcagcagcagagcgcgtcggcgccgacgacgccggcgtcgaagcaggcggcgatccccgaggacgcggcgtcggcgctggcgttcagggggcgcagggtgaggacggccatggagaggcggtcggaggaggagcagcccaagcggaaggaggtggcgcggagcaacgacgtgatcgaggaggccaagagcaagctgatggagaagcggaagagcaaggtgaaggcgctggtgggggcgttcgagaccgtcatggacagcccccgggcgagctgattcgagttttttttttttggagggaagatcggtcgagtctcgactggcgctggcggtggtgtctgtctggtttgaattttggtagggttctctttggatcgttgctttcttgtttgttggtcggtcgttttgcttcttgtgatcactcgaacaaacggagatgtgcgtctcattcctgatttgatcatttaatt

SEQ ID NO: 2018 - DNA, 744 bp, Zea mays
atgccgatgcttactcttcgccgccttgtgaagaaactccggcgtgccgtcattcgtgagttcatccgggcatgtcacctgggagttctcgacgacgaccgtatcggcttcgccatccagagtgccatcatgcagatgagcgccgacggtttcaacggcgtgtggcttcctacacttcgcagaaccgctcgccgtgaaccgccgcgccgtggatcgatgccacgccgtgcacgcgcgccagcagtggcggttgttcctccatcttcgactccagtcgaggcaacgccgacctccaacccgtacccaccaggctactgcccggtccatggatacggacagtgtgtgctgcgcgacgccggaatcctcgacaccacaatcatctccgccctacgccaagccgcagtcgctgccacctctaccgcccggccaacgccaacccaggcagcagaggagagacctcggtggaggccacctacgcctgcgccgcctggatttggccgacgaccaaccatggcggctcggacgggctgcccgccgttcttctccaacgcagtggtcaattcccccccgccttccgcgctcccgatgccgtcccccacgcttctcccgccacgacgccatgccggagtagcggccgcgcgccgcccaggtctacgccccgtcaaggatgaggccgacctccccaacggcagcgacagcggatggttctcctcggacgaggagaaggcggactccatctcctaa

SEQ ID NO: 2019 - DNA, 2442 bp, Zea mays
ccgcacggcagccactcagatggccggctttatcagctgcggcagcgagattcaccgggggaagtatttgcagcgaccgcgccggtccccgccacaaaatcagctacccaccaccgtccgtcagcggcggcggcgagagcatggcggccatcgtggcggcgcgggcgtcggcccccggcagagcggccgtcagcaccatcgccgcgttccacagccacgcgtccccttcccgcgcgctcccgctcgcctcctcctccatcggcggcgccaggcggtaccaccacgcccccgcgtgctgcttcgccaccaagcccaccgcgccggccgctgccgagctcgtcgaccaggacctcgccacggccacgcaggaggccgccaagccacgccggaaacgccggtctcggaaggcgaagaagtccgccaccgccgccaaggaggaggatgggacggacgacaagccggtggcggcggcagaggacgaggcgaaaaggaagaaggaggcggccggcgccgaggacagcgcccgggcattggtggccggcctcgacgacgtgatcgtcaaccccgtgggtctgggtcggcggtcgcggcaggtgttcgacgaggtgtggcgcaagttctcgcggctgggccagatttcgagcgcctcgtccaccgcgctggcggaggaggagcaggccgtgcttatccgtggaggacctatgtgcgagttcactgtgccaggggcgcaggacaccaccgtcctcgtcgtcggtgccaccagccgcatcggccgcatcgtcgtgcgcaagctcatgctccgcggatacaatgtcaaggctttagtaagaagaaacgaccctgaagtgatagatatgctcccaaggtcggtggatgttgttgttggtgatgttggtgatcctgcaactgtcaaagcagctgtatcaggctgcagcaagataatctattgtgcaactgcacgctcaactattacaggagacctaaatagggttgataaccaaggagtaaggaatgctagcaaggctttccaggattactacaacgaattggcccagctcagggctggtaaaagcagcaagagcaaactcctgatagcaaaattcaagtctgcaaagtccttgaagggttgggaggtgcggcagggttcttacttcccaaatacttttgtttctagatttgatgaaggtatcgatgcatcactggatttttcagaagatcagcaggctgttttctcaggatttgtattcacaagaggtggatatgttgagatatcaaaaaggctttctcttcctctaggttctaccctagacaggtacgatggtttactcttttcagtgggaggaaatggaagatcatacgttgttattcttgaaactggtccattggcggacacgacccagagcaagaagtattttgctcggatgactacaaaagtaggtttttgtagggtaagagtgccgttttcatcttttcggccagtaaacccacaagatcctcccctagacccttttcttgtgcatacactaaccattaggtttgaaccaaaaaggcagagacctggtgaggcatctcaaaattctagtgatcctcgaaactttgagctaaaactggaatacatcaaggctttacctactggtcaagaaacagacttcatattggtgtcatgttcaggttctgggattgaatctaacagaagagaacaagttctcaaagccaagaaggctggagaagatgcactgcggaggtcaggccttggatatacaatcgtgcgcccgggtcctctgcaggaagaacctggtggccagcgcgcgctgatcttcgatcaagggaacagaatctcccagggtatcagctgtgctgatgtggctgatatctgtgtcaaggcactgcatgattccactgcgagaaacaaaagtttcgatgtatgctacgagtacgtcagtgaccaagggaacgagctttatgaacttgtggctcatctgccagacaaggctaacaactatctcgcaccagcactgtctgttctagagaagaacacctgattgatgcgcaccatcagactcggacatgtaatatacgagtcatacgacgtgtatattttctcctcctgtaaagccatacgtttttcctatacaagccttgtgtcattcacatggtatgccgtttggcccttctgtaaagatcattgcacagaccgactccaggaaacaaaattttatttttgcaatattgcattgtatgataagttctcctgtccccactccttttcatctaaaactgtaaaagtttgcataatttcaccaagaagaacagtacagtggaaaagaagagaccaatctttgaagcaaaggaagcagtgcacgtgcacctgatgaaatgatggctggtttgctcacaatcttgaaagagaatgcaaagcctgaggctgcaagagtggtccgg

SEQ ID NO: 2020 - DNA, 2219 bp, Zea mays
ctcaactttcccgggcccacaggaagccagcccatctgctgctaaacttcctgtcctgtatcatctcgtgctcgtcggtcgtcactagtcctcgctcatagcaggcggcagtgactcatcactactagtgatcagaccagtgagctagcgactgtaccatgcagcagctgtaggagagcctggtggtaggtaggataggagtagcgccagccgccaagtgcgcgtccgggctggctgcttcggcgagcaggagggagccgcaccgccgggctcccgcaatgtcgcctcctccgcccccgccgctgctgcgcaacgagctgtcgcgcaggacggcggtgctgggcctgcgcctgtgggtgctggtgggcatcgccgtcggggccgccttcgtgctgctcctcgtgctcatctccctccacctcgccgcggcgcggcggaggcggcccaggaagggcgtcgcgcacgcgcccgcgcacgcgccggcgggggcgccgccgctgtccccgtccaccatcccgcccgtgtccaaggagatccaggaggtggccgtccacgtcggctcgctccgccactacctcgagacggggcacgcgttcctcaaggacggcggcggcggcgacggtgagtccgtggcgtacgggtcgcagcgcgtccacatcgaggccggcaagggccagcgcatggtcgcggcggcgtccgacgcgctgtcggcggccgtgggccccgaggtgtcgcacctcggctggggccactggtacacgctgcgggagctggaggaggccaccgccgcgttcgcccccgagcacgtcgtcggcgagggcgggtacggcatcgtctaccgcggcgtcctcgccgacggctaccaggtcgccgtcaagaacctcctcaacaacaggggacaagccgagcgggagttcagggtggaggtggaggccatcggccgcgtccggcacaagaatctggtccggctactgggctactgcgccgagggcgcccaacggatacttgtgtacgagtacgtggacaacggcaacctcgagcagtggctgcacggcgacgtcggggcagtgagcccgctcacctgggacgtccggatgaacatcgtgctcggcatggccaaagggatcacgtacctgcacgaggggctggaacccaaggtggtgcacagggacatcaagtcgagcaacatcctgctggacaggaggtggaacccgaaggtctcggacttcggcctcgccaagctcctgggggcggacagcaactacgtcaccaccagagtgatgggaacgtttggctacgtggcgccagagtacgctagcaccggcatgctgaacgagaggagcgacgtgtacagcttcgggatcctgatcatggagatcatctccggccgaagccccgtcgactacgccaggcctgccggagaggtaaaccttgtagagtggctcaagaacaaggtgaccaacagggactacgaggccatcgtggacccgaagctgccggagaagccgtcctccaaggctctcaagaaggcgctcctggtcgcgctgaggtgcgtggatcccgactcgcagaaacggcccaagatggggcacgtaatccacatgctcgaagtcgacgacttcccgtatcgagaggaccgtcgaactcttcggccgggcaacggcagccccctggagaaggcgaggaatccggcggcggggtcatgcgacggcagcagctgctacgggggcgacacgaccaccgcgagcacgccgtccagactagtgcaggacatgtagtagtgatgtgtttgtagccagctgctgctggccttctgagctctgcctgcgggctgcggggcaacatggagatggacatgctgcaactctgctccgtcgttaattaaaggttcccttcctaggtgttgattttggactcaacagtgacttgacgtaagttttgccgcccgatggccaactgtttgtatagggaactgctgctcttcatctcaggccctaagtttgactgttctttgattcgcgtcatgatgtaaaaataaaagcgtgcgtctgtattggtcagctcctacagtcttcagacagaagtgctagaccaaggattgatttttgaaccatcgtagaatagtttcgttaaatcgtctccaccagtggagctaattcgctaaggtgtttaagacagcttcgctttttattttttttattattatctcactgtcatat

SEQ ID NO: 2021 - DNA, 1246 bp, Zea mays
tcagtcgtcgttctctctgcgctcagctcccctacgcgcgtcttcctccctggctgtgcctacttcctctgcttctccctcgcggtgccttgtcctgctcgcggcgctcggtctctgctccagctcgccgagatctccctctccttgagtcccttccccagctccctggctcgccggcatttctccctgcacgctccctctgcctggcgcgcccctctccctggtctcccatggcgcctcctgcttttctctctcccccatggcaggcgctccttcaagctcattcccatggccgccgtcgagcttcgtgcgcgcacgtccatctcttctgctcctccggtgccgtggcttcccagttccttccagctggcgcgcgccctcgtcttctccctctgctcgttcgcgcccagccgggctcggcctccatctccacctcgcctccatggcgttgccgtagaacttcctcgccgcgccctgccatggtctctccctgggcgcgcgcagccgtgccctctgctcggattccacttggccgcgccccctgttccgtcgggccgatcaagttcttcccagccgcgaagctccctcgtgtgcacgctcagccgaggccccttcctcgcgctgctctttatctctctgcttggtcgcccgctgtttccatggcgcccagctcagatttttgcttggtcgcccgctgtttccctgtgccgtggtctcgcctgaccgcgtcctgtcaaggttcttcctgcacgcgcgccctagtaccccttctcgctgtcgggccgaccgtcggcagctccccggcctccgtcgtgctcggcagcaagtacttcatatcggtgctgcagctgcaacgccctcctttgcatcgtgctcgccagcctcgcgtcgtcgatctacgcagttcatgtccagctatcggttccgcttcggtcgatctcctattcgccatggcgtcgagctccttcaacactaccctacaccgttgtcgttgttccatcgcctcgcttcgatgccagtccctacgtgatgcctctgaattatgatcacgctgacaaaagaatccccaagagaagatgtccaaaggttggatggtggtgtgcgtgaagttcgtgtagtacctgccaaacgctcgacaaattgcctgaatcggagaatcattaccgatctcagggattcaagtcagatattggaacggtgagctgatttgctattcttattgactggtttgatggatggattgata

SEQ ID NO: 2022 - DNA, 276 bp, Zea mays
atggcgccccctgcttttctctctctcccccatggccgacgctccttcaagctcgttcccatggccgccatcaagctccgtgcgcgcgcgtccatctcctctgctcctttggcgtcgtggcttcccagttccttccagccggcgcgcgccctcgtcttctccctctgctcgctcgcgcccagctgggctcggcctccatctccacctcgcctctatggcgttgccatagaacttcctcaccgtgtcctaccatggtctctcccctggcgcgcgtag

SEQ ID NO: 2023 - DNA, 2360 bp, Zea mays
gccgtggcaaacctgggctgggagggggagcgactaggactactacttttcagggcccctgcccctgcccgtggagactactcagcgtctggagcgctataaatccgcgtcaccgtccgttgcttcttcttccacatccgtcttcctcctgtaaccagatctgaacccgcggcgacagaaacaaacgctcgctcgctcgttcgttgtccgttcattgtcttcgccggcgccgagggaccctgagagggcaggcgggcgagatggcgggcggcggcgttgaggacgtgtacggcgaggaccgcgctaccgaggagcagctgatcacgccgtgggccttctccgtcgcaagcggctacaccctgctgcgcgacccgcggcacaacaagggcctggccttctcggaggcggagcgcgacgcgcactacctccggggcctgctgccgccggcgctggcgtcgcaggagctgcaggagaagaagctcatgcagaacctgcgccggtacgagcagccgctgcaccgctacatcgccatgatggacctgcaggagcgcaacgagaggctcttctacaagctcctcatcgacaacgtcgaggagctgctccccgtcgtctacacgcccaccgtcggcgaggcatgccagaagtacggcagcatctaccgccgcccgcaggggctgtacatcagcctcagggacaagggcaagatcctcgaggtgctcaagaactggcccgagaggagcatccaggtcatcgtcgtcaccgacggcgagcgcatcctcggcctcggtgatctcggttgccaggggatgggaattcccgttggcaagctctccctctacactgccctcggaggtgttcgcccgtcagcttgcctgcccatcacaattgatgtcggcaccaacaacgaggccttgctcaaggacgagttctacatcggcctccgccagaggcgtgccaccggcgaggagtaccatgaacttcttgaagagttcatgaccgccgtcaagcaaaactacggcgagaaggtcctcacccagttcgaagacttcgccaaccacaacgcctttgacctgctcgagaagtacagggagagccatctcgtcttcaacgacgatatccagggaacagcatccgtggtcctcgctggcctcctggcggcgctcaaggtggtcggcgggacactggcggaccacacttacctgttcctcggcgccggcgaggtcggtcgatttgacttgctagtatactgcatcagtgttaccctatcttttctttgccgatcaaagcttcggatcactcgcggcctcattcttttctctgattacgttgtgtttgttcatctgcaggccgggactggcattgccgagctcattgctctcgagatgtccaaacatactgggtctccgatcgaagagtgccgcccgaagatctggctgatggactccaagggcctgatcgtggcgtcacggaaggactcgctgcaggcgttcaagaagccatgggcgcacgagcacgagcccgtggcgaccctgctggaggccgtgcagtccctgaagccgacggtgctgatcggcacctcgggcaagggcggcaccttcaccaaggaggtggtggaggcgatggcgtcccagaacgagaagccggtcatcttcgcgctgtcgaacccgacctcgcactcggagtgcacggcggagcaggcctacacctggaccaagggccgcgcggtgttcgcgagcggcagccccttcgacagcgtggagctggacggcaaggtgctggtgccggggcagtccaacaacgcctacatcttcccggggttcggcctcggcgtcgtcatctccggcgccatccgcgtccgcgacgacatgctgctggccgcctcggaggcgctggcggagcaggtaaccgaggagcacttcgccaaggggctcatcttcccgcccttcaccaacatccgcgccatctccgcgcgcatcgccgccaaggtggctgccaaggcctacgagctcggcctcgccagccgcctgccacgccctgacgatctcgtcaagtacgctgagagctgcatgtacacccccatctaccgcagctaccggtaaggaaaggaccatggccggggcggcggcctgagcaaaaggaaaggaaacgggtaaattatgagtcagtgagtgaataaagggtcgatgcgatatttgttgcagctagaggagtgagtttacacatactttcatttctatacactgtatttctgtgtaccgtatacggcataccatacaacactactacatactcgtcagtcatttcaatacagttaatgtacctggttagaacgctatcactctatatttacctagagccat

SEQ ID NO: 2024 - DNA, 2028 bp, Zea mays
cccgagggctgaacccacgcctccacgagctctccgaaagtccgagtccgatgctttgttaggcacgcgctcgccacaaccgcatttcgttgggcccacgcccggcctatataagcacacgatttcctgccttctcatcacgacgacaagaattagcagcactcgtcgttctcccgatcagttcccgcgaattcgcgcgtcggatagcatagcgcctccgatcgtcagtctaccgtgcttgcctgcttcaatactgtgctgcctgcgacagatggagaccgccaccgtcgtcgtcacgccggctccggtgtccatcacccacccaccgcagcacaagtttatgaaatcgtcgccggcgaggaagccggccaagaagaagctcgccagcggccgtggcgggtacgtccttgaggacgtcccgcacctcaccgactaccttccagagctcaagagctaccggaatcccctgcaagatcaccctgcgtactctgtcgtcaagcagtacttcgtgggcccggatgacacggtggcgaagaagatcgtggtgcacaggagcagcgcgcgcgggacgcacttccggcgcgccggcccgcggaagcgcgtctacttcgagccggacgaggtgagggcggcgatcgtcacctgcggcggtctgtgcccgggcctcaacaccgtcgtccgcgagctcgtgtgcggcctccatgacatgtacggcgtgacgagcatctacggcatcgagggcggctacaaggggttctacgcgcgcaacacggtggagctgacgccgcgctccgtgaacgacatccacaaacgcggcggcacggtgctgggtacctcccgcggcggccacgacacggccaagatcgtgaacagcatccaggatcgcgggatcaaccaggtgtacatcatcggcggcgacggcacacagaagggcgccgcgtccgtccacgaggaggtgcagcgccgcgggctcaagtgcgccgtggtcggcgtgcccaagaccatcgacaatgacatcgccgtaatcgacaggtcgttcggcttcgacagcgccgtggaggaggcgcggcgcgccatcgacgccgcgcacgtcgaggccgagagcgccgagaacggcatcggggtcgtcaagctcatgggccggaacagcggcttcatcgccatgcacgccacgctcgccagccgcgacgtggactgctgcctcatcccggagtcgccgttctacctcgacggcaagggcggcctgctcgagttcgcggagaagcgcctccgcgacaacggccacatggtcatcgtcgtggccgagggcgctggccaggacctcgtcgccgaaagcacgcgcttcgctgacacccacgacgcctccggcaacaaggcgctgctcgacgtcgggctctggctctctcaaaagatcaaggaccatttcaagaagaagcccagcttccccatcaccctcaagtacatcgacccggcgtacatgatccgcgccgtgccgtccaacgcttccgacaacgtctactgcacgctgctggcgcacagcgccctgcacggcgccatggccgggtacaccggcttcaccgtcgggccggtgaacggcaggcaggcctacatccctttctacaggatcaccgagaaacagaacaaggtcgtcatcacggaccagatgtgggcgctggtgttgtgctcgacgaaccagccgtgcttcctgacacacgaggacgacgtcgagcgggcgttgatgatggacgaggaggagccgcacatgccactggttgagggcgagaacgccttgttcgcaaacccatccatgtgcaacggcaatggccacctctgcaatggtcacaaagcctgaaggcgcagtgtcagttgattcacgtcttatgcaaaaccaatggtccaaacgtggtagtgatgtaggttttttctttgtagcttctttatgttcattctttagttcacgtaaggttaccaccaacagcctatctatccttatacttatatttaaactctactctatattatataaaa

SEQ ID NO: 2025 - DNA, 2969 bp, Zea mays
caagactcaggcactcccttcgctcttcctaagcacctggtagcctgctcgtctctcgtgcggcgccgagtctagcctcattctcaacaatccatctccacagccaccgccgcgcctgccctggcaaatggagttcgacttcgactcccatggcggcgacgcttggctgctcgacgccatgtccacgtcgctccacttttcggccgtttcgcccccggtgccgtcgccgtggccgtgcggcgacccgcatcatccttccatgtggctggacacggttgccctgcaagacgacggcccgagcgtccccgccggaaaagctcacagtagctctcatgtacttcaaggagtctaccaagcagcatttgttggttcaagtttgggtgcctatcaggaaaggggaccactacatgctaagcacttcagggcagccctttgtgcttgacgaacagagcatcggacttcttgattatagggctgtgtccatgatgtatacgttcgctgtggatggggatagtgtcgaagaattgggtctacctggacgcgtatacaagcagaggctacctgaatggacgcccgatgtgcagtactacagcagtattgaatatgcacggcttaaccatgcaataagttacgacgtacatggtactgttgccttgcctgtgtttgattcttccatgaagtcatgcatcgctgttgttgaacttataatgacatcaaagaaagtaaactatgcaagagaggttggtgaagtctccaaagctcttgaggccgtgaatcttaaaagcactgaagttatcgaacatccatatgtccagatatttaatgaaggacatcaaaatgttcttgtagagatgttggaaatcataacagtaatttgtgaagagctcaaactacccatagctcagacttgggtgccatgcaaataccaaaatttattgatacattgtggtggtgaaaataagagttgcttcgatattcatgaaagttgtgcccaagaactatgcatgtcaacaagtgctgttatgtttcatattatcgatgctcatatgtggggcttccgagatgcctgtgtagagcaccacctgaagaagggacaaggggtttctggaaaggcttttatcctacgtaggccttgctttacgaaagatgttactagattctctaaaatggagtacccccttgttcactatgctcgtatgtttggattagctggctgtttttcgatatgcttgcaaagtgcttataatagaaatgaggactatgtattggagttcttcttgccacctgattgtagagaagatggtgagcaaaaggttcttttggactccatcttagctctgctgagacagtatcttaatagattgcaggtagccactgacgaaggctcaaatgaagtttaccttcaagtcgatgctattactataattgaaaatggagatataaagaatgcacatgtacaacatatgaactgtgaaggtggcattcatgcatcagatgagagaaatatgcatgtaatccatgagtctgacagccagaaaagaatatccccaacagaatctgaaacatgtccatcgcctgataacaccaaatgcaatgacaaattatttgctagacaaaatggtggatgtatctcagattctttattgcttgaaaacaatagcaagcatagtggaaggagacaaggaaaagaagaaaaaacattcagtttagaggttattcaacagtattttactggaagcttgaagaatgcagcaaaaagtcttggagtatgtcctacaacaatgaagcgcatttgtaggcaacatggtatttctcgctggccatctcgacaaatcagcaaggttaaccgtactgtttcaaaattaaagaaggtaattgaatctgttgaagggcatgagggtgcatttactctcacatctgtcacaggtcctcttcctgttgcttttggtccatccaatcctatcagtataaagaaccaaagccaaattaatgtttctggacttcccattccttctgttcaagaaaacagagactcatcctcacagagtaagttactagaaaatgatattcaccgaagcactcttgttccccagaaaagctttctagctaatatcaacagacagattgaagcagagaaagcttccaactcgagaaattcatcgaaagattgtagaacacattctgggagatcagaagaatcctaccctgttagccctgcaaacatgacatttgtttcaacactcctagaaccgcaacaaaacatgtacatacaagatggcttcacaaaagagtcttttcagaaagaggacctgcggtttcatgggatgtttgttaacggatcaggaagcttgaaagattgcatgaaccacatcacttctgcagttaacggaacgattatagggcatccaggaagtctcacgactgcacaaaattcagggataataacatgtccaggcagtctcatcagtgcgcagaattcaaggatagtaacagtaaaggcacgctacaaggaagacttgttaaggtttcggttcccatgttctggaagctttatcactttgaaagatgaggtggccaaaagaatacaaatggatggtgttctttttgacatcaagtatcttgatgatgatcatgaatgggtgaagttgacatgcgacaccgacttagaagagtgcatggagatctctcgggcatctggtagcaacgttttgaggctgctggtcactgacattgctccagtccttgggagttcttgtggtagcactggatgattttgaatgtttatgaatcggcatagtagtataatgcagtggccaaatctagctagctgatatttaggctagccgcttcggttcttaggtacatcaccatcttttacaggtatttctcattttgtgtagggaaatctcaggtataaatcatttcctttgaaacaatggaggtatttggtttgaggaatcacttcattc

SEQ ID NO: 2026 - DNA, 1829 bp, Zea mays
ctcgctccgtttatggccctgggccgccattcggaaatcggaagtcacattgggctggtccggccactccgacacccttatataaagtcccgaaccctagaggcaagcaccttcctccccaactcgccgtctgccttctgcgcctccatttcggcctctgtcccttgcaagttcaatctcacctccaaccatgggtaaagagaagtcccacatcaacattgtggttattggccacgttgactctggcaagtcgaccaccacaggacacctgatctacaagcttggaggcattgacaagcgtgtgatcgagaggtttgagaaggaggctgctgaaatgaacaagcggtccttcaagtacgcgtgggtgctcgacaagctcaaggctgagcgtgagagaggtatcaccattgatatcgctctgtggaagtttgagaccaccaagtactactgcacggtcattgatgcccctggacaccgtgacttcatcaagaacatgatcactggtacctcccaggctgactgtgctgtccttatcattgactccaccactggtggttttgaggctggtatctccaaggatggccagacccgtgaacatgctctccttgcgttcacccttggagtgaagcagatgatttgctgctgcaacaagatggatgcaaccactccgaaatactccaaggcacgttatgatgagattgtgaaggaagtctcatcctacctcaagaaagttgggtacaaccctgataagattgcctttgttcccatttctggttttgagggcgacaacatgattgagaggtccaccaaccttgactggtacaaaggcccaaccctgcttgaggctcttgaccagatcaccgagcccaagaggccttcggacaagcccctgcgtctgcccctccaggatgtgtacaagattggtggtattggaactgtaccggttggtcgtgtggagactggtgtcatcaagcctggtatggtagtcacctttggtccaactggcctgactactgaggtgaagtctgttgagatgcaccacgaggcgcttcaggaggctcttccgggcgacaatgttggcttcaacgtgaagaacgttgctgtcaaggatctcaagcgtgggttcgtggcctccaactccaaggatgaccctgccaaggaggctgccagcttcacctcccaggtcatcatcatgaaccaccctgggcagattggcaacggctatgccccagtgctggactgccacacctcccacatcgccgtcaagtttgctgagctcattaccaagatcgacaggcgatctggcaaggagctcgagaaggagcccaagttcctgaagaacggtgatgctggtatggtgaagatgattcccaccaagcctatggtggtggagacattctccgcgtatcctcccctgggtaggtttgccgtccgcgacatgaggcagacggttgctgttggagtcatcaagagtgtggagaagaaggacccaaccggcgccaaggtgaccaaggcggccgccaagaagaaatgatgcgatcccgtgtctgcttttgcagtgcctggataacttgccactaaagttgtgtatgcggttgttgctgttattgcgtggactgtttgctgcggtgtctcctgtttgtttgggtagcgcagcgtcggcctcttcaggtgtctgttgtctgttgtctttactatcagtaatgctcctgagacttgtatttctccttttggcgccgctaaatggaattttcgaacaatgattttcgtgttattattttacaaccttttcgaacaatatttacacgtctgatgtgttttgctgagat

SEQ ID NO: 2027 - DNA, 1109 bp, Zea mays
ctgcgcgagcgtgcgtcgcggagaggatctcgggcgtgcgtcgcggagaggatgtcggacgcctacactaccatcttaaggagtagtatagattgtttcttctatttaatgtttctatttacgctttaatttttcctctgctgatgtgcatcatgcttttttaagctgatggaattgttatgttagtggctttagtattgtgtgatgtttactagtgcttctaataattgattcatctggtttgatagtttaagcttcatctccagcgatgggcaaggagaaatcccacatcaacattgtggttattggccatgtcgactctggcaagtcgactaccactggccacctgatctacaagcttggaggcgttgacaagcgtgtcatcgagaggttcgagaaacaggctgctgaaatgaacaagcggtccttcaagtacgcctgggtgctcgacaagctcaaggctgagcgtgagagaggcatcactattgatatcgctctgtggaagttcgagaccaccaagtactactgtacgatcattgatgcccctggacaccgtgacttcatcaagaacatgatcactggtacctcccaggctgactgtgctgttcttatcattgactccaccactggtggctttgaggctggtatctccaaggatggccagacccgtgagcatgctctccttgctttcactcttggagtgaagcagatgatttgctgctgcaacaagatggatgcaaccactccgaaatactccaaggcacgttatgatgagattgtgaaggaagtctcatcctacctcaagaaaagttggatacaaccctgataagatcgcctttgtctccatctctggttttgagggtgacaacatgattgagaggtccacaaaccttgactggtacaaaggcccaaccctgcttgaggctcttgaccagatcaccgagcccaagagaccttcggacaagcccttttggcattgttaaattgattttaggaagtcgtagttttcttcagtatgtttctttccccccccccccccccccccttagttttgtctgttttgcagggtcgtttggattggtttctgaatcctttatctgctacaattt

SEQ ID NO: 2028 - DNA, 801 bp, Zea mays
tcagcgtgaaccgacagatccggctcattgtatctattcagatcagacgaaaacgttttaggatcaggcaagtagaagggaggtcgtaagagatagtagcaggcaatgcagccaaacacctttttttcaggctatcaaaggaaacgaattcaggctatagacgaaggaacgccctggttcgccagaacaaaaggattacatgagttggagcaggatggatattacagttgagtagaaattattggtggatcgaaagatgatgtgaggaaccaatgcctgtcctgctctgctcccctccccccaagaacttgaagctcccctgcacacatgctgaagctgatccgaaacctgttggttggatccagaagctcctgtcccgcacgaggagggccaggcagcggcagcggcacagcgaggaggcgcgagcgctgactgaggggtcagcagcacgggtagacggcgacgcagcgcctcctgggcggcgcgcagaggagcatgaacaccagcgcgatgatggcggcgaccagcagccccaggaggttgaacccggcctcctcctccgcctcgttgctgcagcacagcttacccatctacccaaccctcaggcagctggtacctggctgcttggctgtacgtgactgctgctgcactcactcggaatttcgttatgatccttggctttgaaggcattgcaggggagggaggggggtaggcagtggttggggcatcgctatcgcgcctccctcccatcatccccatcccccccttggttgttaatgggtcctaggcagcttggaccat

SEQ ID NO: 2029 - DNA, 336 bp, Zea mays
atggcgaatagaaaatcgacgaccgactcagatgcgattgacgagttgagcgactccaacgatttaacggcggacgcgacaacgagcagggtcccaaactcaacgccgacgtcgaggagtgctaacactacggtcgggcgagctgggaacactggcaagcagaggagcgcgcgcatcaaggctaaacacaggagaacgcacgaaagggagctcgacatgggcagtggctcacgtccacgacgagcaggctgggcgcgccgatggcgtagctgcagggagaaacaccggcgagccaacaggaaactcaggcaaaatcgcggccggcgaacgccgtga

SEQ ID NO: 2030 - DNA, 1005 bp, Zea mays
gcgacctcgaggctcgagcttgacgcccgcgtgccatggctcccacggcgccgacgcaacggccgacgatgcgccactcctccgcgttcctcctcccttcaaccgcaccgtcatcgcccgcgcctggtcccgatgacgccgccgtcgcggtcgtcgtcctcaaccagccgctgccccgcttcgcgcccctcctctggtccagagcggcggtgcgggtgtgcgcggacggtggcgccaaccgcgtcttcgacggcatgccggccctgctccccggccaggaccccgacgaggttcgcgcgagttacaagccagatgtaatcaaaggggatatggactcagtaagaccagaagtgaaggaacattattccaacttgggcaccagaattgttgacgagtcacatgaccaggacacgaccgatttacacaaatgcatagcttttatagctgagaattattctgccactaacaaatctaaccagctcagcatcttggtccttggagcacttgggggaaggtttgatcacgagatgggaaacatcaatgtgcttcatctcttcccaagcatcaatatcgtcctcctatcagatgattgtctgatctttctgctctcgaaaatgcatacccacgagattcacgttgaaaagtcgatcgagggaccccactgtggattgatcccgattggcatgccgtcgactagcaccacgaccaccgggcttcgatggaatctagataataccagtatgagcttcggaggattgatcagcacgtcaaatatcgtggaagaggacaaggtaacggtcacctcggattcagaccttatgtggacaacatcgctccggaagtgaatctacactcgagtatagagtatcgttatactgttgtaatattagagaaataagtgacatgcttttaatatatatatatatatatatattaaatattctaattccaaataaaacaaacatataacacagataaatgccatatgtaattatagcagcaata

SEQ ID NO: 2031 - DNA, 172 bp, Zea mays
ttggagaagcagggcacgtgcagagacacgccggagcacggccgccgccgatctaccgacctcccaaacctgccttatggtgtgggggtggaggtcgtcggtggaagcgatagctgtcgttgttgcttcgatgttgttagctcctcctgcacgtgctccccttctccaccac

SEQ ID NO: 2032 - DNA, 3026 bp, Zea mays
aacccaggccaacacggcgccccggaatccctccactcctcccgccgcactaccgttgccgttgcgattcgcgagtcctccctagccgccgggcgccgcgccccgccggcccttcctcccgctgcatactacattagccaggggctcggcgacccggtgcggcggtgccagcagccgcagccggcaggcagcatcaggccagcatctcggcctcggcgtgacccggtggccgcgtgggcaggcagcagactgagccctgcaaaccgcatgcacgcacgccgcaggcaggctagcaagcagtcagctctgtattgattgtgcttttggagtggcactaaacgtggaaattgacgggctccgctactggtagccgttgccgtagatggcgaggggcatcaccaccatggaggtgcgcgccgacggcgtggccgtcatcaccatcatcaacccgcccgtcaacgccctctcgctcgacgtcatagctagtttgcagaggaactatgcagaggctctaagcaggaacgatatcaaggcaatcgtcctcactggttccaaaggaaggttttgtggtggattcgatatagccgcgtttgaaaataagccaaaaaatgagaagcctggatccatgtctattgattttttgactgacatagtggaagatgctcacaaaccgtcagtggctgctatagatggcattgctctaggtggtggattggaggttgcgatggtttgccatgctcgcatttcaacaccgtcagctcagttaggactacctgaacttcaacttggaatcattcctggaatgggagggacacaacgtcttccccgtcttgttggtctgccaaaagcccttgagatgatgttgacatcaaagactataaaaggcaagatggcacatgaactcggtttagttgatgctgttacctcagctaataaattggtcaacactgcctgttcctgggctctggaaatttttgaaaagaagaaaccatggttcaaaagtctccacagaactgatagacttccagatcttgaggaagtgaaggatattctgaaatttgcaagagttcaagctgaaatgaaggctgctaatgttcagcatccaatagtttgcattgatgttattaaagaaggaataatctctggccctcgtgcaggcctcatgaaggaagtgctctctgggaaaatgcttgagcagtctcaaacaagcaaaagcttaaggcactttttttttgctcagcgtgccacttcaaagattccaaatattaccaacataggtttgacagcacggaaaattaaaaaggcagctatcgttgggggtggtctaatgggatccggaattgcaacaatactgatattgaacaactttaatgttgtcttgaaagaagtaaatgaacagttcttatctgctggcattaacagaattaaagtgaatttgcaaagtcttgtcagaaagggtcaacttactgaagaagattatgaaaagaagctttctctgctatgtggtgctcttgactatgaacagttcagagatacagatgtagtaattgaggcggtaattgaggatatggtgctgaagcagcaaatattttctgaccttgagaagtattgccatcataattgcatatttgcaacaaacacttcaacaatagacctgaacataattggtcagaagacagcttctcaggaccgcattgttggtgcacacttctttagtccagctcatgtcatgtcactgttggaaatagtttgtactcatcatacttcctctcaagttattgtggacctgattgatttggcaaagaaaatacagaaaacaccaatagttgttggcaactgcacaggtttcgctgtcaaccggatgttctttccttacgctcaggcagcttcttttcttgttgattatggtctggatgtgtatcacatagatcatgtgatcacacaatttggaatgccaatggggcccttccgattagccgatcttgttggttttggtgttgctattgctacaagaaagcaatattaccaaagttatcctgagcgaagttacaaatcaatgcttcttcagattcttgttgaggataataggacaggtgaatcttcttgtaagggcttctatgtatatgatgataaacgcaaagcctctcgagatcctgattttgggaagtacattgaaaaatcaaggaacatggcaggtgttatgcaagatcctaagctgatgaaactaacagataatgacatcgtggagatgatcttctttcctgtggtgaatgaagcctgccgagtgcttgatgagggaattgctctcaaagcatctgaccttgatgtagcttccattatggggatgggtttcccttcttacaggggtggagtaatgttttgggctgactcgcttggtgcgaaatatgtgtatgacaaactggatgcatggtcgaaggattatggggagttcttcagaccctgtgaatatttagctgtgagagctcgtcagggtgcatccctggctgccaaggttgatggtgtcaaatcgcgactctagggttttgttgttcatttgtccggacatgcttatacggactttggcctcaatgacattgagatgttgtgaaaacccttgagcaccaactgttacaatcatgcagttgcaaaacctgcacaagtgaattatacggaggcctagcgaagtggaaattgcatgtgccttcgtgggattgctgaggatctgcagcaggaatttctctgaaatattatgtgcagttttctgaagtgatgctgacaactttgcatagaatagttacagggagtttctcctagacgttttgcgggaatatactttgttgcagtggattcttatttttttaaaaataaaactcgtgaaatccatggtcgtatgtacgatactacctccgttctttttgaatatttgtcattcgctagttaattttttaactaaaacacgataaataaaaaataatggagggaatacaacatttcagttcgatcatctgctcaaaaagtacacgttc

SEQ ID NO: 2033 - DNA, 3506 bp, Zea mays
ccggcgtgtgggagagaagagagagagaccacctcctccgctctctctctcttactctgactcgcccgctccggttcgccgctccgccatcgccggcgatcactccactccggcaacgccgcgtctccgacgatcccaccgacgccgggccccgcgaccccattcctccgattgcctcctcacgtcttgcggttctcccccggcgagggtacgtgctcttgcccagatccgccccgcctccccgcgccccgccacgcgcgccgatcggcaagctgcgtaggcttcgctaccgctgctgcgcgagcgagcgtcgcagccgtcgatccgcgcgcccgccatggacgacttccagggcctgctggcccgcgacttcggcctccgcccgcaggggaaggccgcgcccatgtcggccgcccgctcctcgagtccctccggatccgcctggaccaataccagatccgccgtggggtccgccgctccctccgcgccctcctacgacgagctcttcgggtccgccccgccgccgccgcccaaggccacgccgtcgctcgataacatcttcaactcgttcaaggagcccgcttccaccgcgccgccgcctaagccgaagcactcttccgcgccggtgttcgacaagccggtctacgatgatgacatcttcatcggggtccctggggttaagagctcctcggtgccctatgacgatgtgttcggtggaagccagagccgcgaggcgccccccgcattcgatgacctgctcggtggatttggtaagagctcacaggtgagggaagaggtggatgacaagaggaaaccagaggcacctacggctgtggcggctactgggttcgattatttgatcccaagctttggcgggagaagctccccgcggcaaagggatgctattggtgcaaaacaaaagaaagtttccatgtcgacatctaagcaatcagctagcttaagcgaccccttcgttgttctcgaaacaacttcatcctcagcccatccattcgcagatcccttggatgaatccggtaaagctgcaaaatatcaagggaaaaaccgtgaaagtactagcgttgggagcagtctgtttgaggattcaagcactttcaaccaggctccaaaatttgaacctttttttaccccagaggtggacaatggatcgaaagataggaatgagtcaagcagagcccaaaactcaaaccctgtacaggatttttctaaaagaaactcctcccaacaaccttctgttgaggattttgaaaatatctttcctaagtcacagtctgccagatattctgatgtccatgttgacattggctcagagaaatatagtgggaatggtataaatgatcagtcacctagatctgatgaatccgaagatgagatatggcttacagcttctgagattcccctcttcacacagccaactagtgccccaccaccttcaaggccaccgccacctcttgcagttaagcaaaaacatggatcaagatcaacaagaaaagatgaacatctgcggcggtctaggaaaaacaatgaccatcaaaggagtttctcaaatcaggctggtgtttctacagtagatggactagaagattttaccatgggtaagtctcagaatgtgcatacgtttaatgaggaagaatttgagagaagtacggcagcagcggctatgaaagaggctatggataaagctgaggcaaagttcaaacatgccaaggaagtacgagagagagagcgtgatgcaaagcttagaaatagagaacaacaggaacgagataatgtaataaggtcgtatgcccaggatcgtgaggacaaagagagaaatgaaagactagaacaagaaagagagatgaagcaaaaagaggaaaaggaaagagagcaacgaagacttgaagaggagagagaacttgagcgacatagagaaagagaaagagctaggcaagcagtggagagggctacaaaggaggcacgagaaagggcagcttctgaagctcgtgcaaaagcagagagggaggcacggaaacgttcagaacgtgctgctgtgcaaagagcccaacaggaagcacgtgagagggcagcagcggatgctaaagatcgagcagagagggctactgcagaagcaaacgaaagggctgctactgaagctaaggagaaagctgctagtcaagcgagggatagggctgcagcagaaaaagctgctgtggagagagctcagcaagaagtgaggaagagagctgaacgagcagcagtggaaagggctgctgctgaggctcgggaaagacaggctgctgctgctgcagctgcaagagaaaaaacaagcaaaccagatgatctagaatccttatttggtatgggtgcccgagctaatagtgctccgaagcaaagggctccaactgtggattctatgtttgattctcaaacgcaaaatagagggacttccacttcgacatcaatgaaaaaggcatcatcaacagcaaatgttgctgatgacttgtctgcattatttggaggagctcctacgtcatcaaatgaatttcaagaagttgatggggagagcgaagaaagaagacgtgctaggttggaacggcatcaaagaactcgtgaacgagcggcaaaggctttggctgagaagaatgaacgtgacatgcagcaacaaagggaccaggctgagagacataggcttgcggaaacactggacttcgagattaagcgctgggctgctggaaaagaaggcaatttgcgtgcattgctatcaactttacaatatgttctttggccagaatgtggatggcaacctgtatcccttaccgatttgatcactgctgctgctgttaaaaaagtgtacagaaaagcaacgttgtgtatccatcctgacaaggtgcagcaaaagggtgcaaatctccaacagaaatatatcgctgagaaggtttttgatctccttaaggaggcgtggaacaaattcaactctgaagagctcttctaaacagcctcatgactgaacatagcatgacccatcagggtctgcacaaggtactctgggaaggaactcacaagctggagcagcctgaggttggtcgggggggaaggggaaccatgaagcgaccaagcgaaacctgaactatggttataatcacagttgttttgtttcactcccccaattttctttcccaactatctgttgattggatgacaactcacagcgacatgtggcagctgcccaagctgaacctcatccagtaggtgcacattagtgccctgttttgtactgtttgtcctcggctgtatgtaccgtcagagctgaggcttctgaggtcagcgttgtgattttggattaggtacagggcttatttaccatggagagaatgaaaacaatagagatgacccataataatagattgattgattagagagatctatctatatttttatataaatatataggggagatttcgtggcttatgaaaacagaaccaaacgagatatttccttatctctgt

SEQ ID NO: 2034 - DNA, 2131 bp, Zea mays
gcaaaaccccacaccacaccacaccagtgacgagaccaccagtgacaccacaccaccacattttcttcagattcctctccccgctgccgccatccggttatcgggcagaacccctttacccctccttcctctcaccatgggtccaggactctactccgacatcggcagaaaggccagggatctcttgacagggggcttcaatacgggccagcagttggtcctcattacccactgctccaatggaacccggatagcagcttcaagcacaaagagtaacgagttcatcattagtgagatccaggcccagctgaagaataagaatgtcacagtggatgtcaaagcaaattcagaggctaatctctcaactacagtcactgttgaggaacttggtgtactaggcttgaaaaagataattaccattccttatccacatccagcatttgggaggcttgaaatccagtacttgcatgattatgctggtatcaacgccagttctaccatgaacagaaaacctttggttaacctttctgctgtatttggcaacaaagctattgctgctggtgctgatgttgtgtatgatggtgctactggggatttcactaagtacaatgctgggttgagtttcaccaatgcagatctcaatgctgctgtgaccttgaacaacaaaggggacagcctcactgcgtcctactaccacttggtggacacagagaagaacacagctgttggtgtggaggtggcccgcaacttctcaaccaaggcgaacagagtcacctttgggatgcggcatgctctggaccctaccaccactgtgaaggcgcgctacagcagcaatggaatggccagcgccctcatccagcacgagtggagacccaagtcattctgcaccctatccaccgaggtcgacgtcaacaggtttgatttcttgcagacccccaagtttgggctatcactggtcctcaagccctgatgatgatgccgatcccccctagtcctagcacagtcaagtctccgtatcaatacttgaggtcgagtgaaataattctgaacctcagctctctctgaacttggtgtcatcctgaaagttcgcggtctccctagctggttttagatgttgagaactgaatctgcaaacgacaatgtgatcaagtacattactccgttgacacattgtctaaagctcggaatcttcaccttcactgttatcttttcgatgttttcaagtttggttcgtccaatatatcatttctgcctacggttgcatgctatgaatgtagaatcaccgaagtcatgttgtgggtggcaaaatacatctcttgacccatgatgaagattcaaattttatttcacacataaatagagttgtgcatgcttttacatagctccaaaatagaggacgaagctaaattttaatggccaatgtgcctgcaaatgatgggtggttctggatatatcgaatgttcaacagtagtcctattagataatcctatcgccgtggcaagtgcttccatagcttatgttgttgaattttgctgctccatggcggcagcggcagcagctcccgccagctgaccattctgaggcgccatctcctagcattatgctttcttgtagcttcctttggaaaaggcagtttgctcaaggaatttcagatttaatcaaatgtgaagggatctggatctcaacctgcacaatacaaacacgtttctttaagagctatactgggtacctttttagtctttgagcagttatatggcactcgcagcccgccaagtctatgaagacgcttcccagattttgtaatcttgaccctcagcagcaacaatccagttctggggaccgcttggctcaaaatgttctgatccgattttcattgttaccttctcatcaatttcagccgcatataaactcctctctgcctttagtatcttgatcttgctgagaaatggtagttttgagataatatggcaccgttctatttggatacattgtgatactgagttgtacctgagtagaaccagtatcatgattctctataaatgtgactgctcttgaaggccaccaacccaatactccagggggtttccctttttcatcggacaggcgccaatactctgatctttcaagcgcc

SEQ ID NO: 2035 - DNA, 3421 bp, Zea mays
tgcccaccttaaaaaaaacagtcggatacgatccgcgaatgcgagctgttttgaacggcgatttgtctttttgttctccagcgcgccagccaaccttaactgctacgatcgatcgaggggaggaagtttctggagctctagttctgcccatggcgtcggcgatggagctactggggagatcgttcgcgccgggccatgccgccgcggcgccgaggcggggaggcgggccctgcttcgcggcggtcggaagggaggggagtggtgcgcacaggaggagatcgtcgtcgtcgtcgtcgctgaggtcgactgcgccggtggacgcgctggccgagcgagtcgtggcgccgccggagagggccgaggcggtcccgccggagccgagcgtggccgcgcgggccgtggtcaccgtgcggcggagtcggaaaagggacgccaagtgccgggtcgccgagcggctggacgcgtgcgccgactgggtcggccgcagcgtcctcctcgagctcatcagcaccgagaccgacccaagaaaaggggggccaaagaagagcaggcggtcggcgctggtgggctggtttggggagaaggacgtgaaggcggagcgggtggtgtacaccgccgacttcaacgtcgacgggtccttcggcgagccgggcgcggtcgccgtgctcaaccggcaccagcgcgagttcttcgtcgagagcatcgtggtggagggctttccctccggccccgcgcacttcacctgctactcgtgggtgcagcccacgcgcgtgcaccgcgacccgcgcgtgttcttcaccaacaagccgtacctgccggcgcagacgccgccggggctgcgggagctccgccgcctggagctcagcgacctgaggggcgagggcgctggcaccggcggcgagcgcaggaccaccgatcgggtgtgggagtacgacgtgtacaacgacctcggcaacccggacatgggcgccgagttcgcgcgcccgatcctcggcgggcgaccagcagctgccgtacccgcgccggatgcggacgggccggcctaagaccttcacaggcaagcctccgcttttttcccccccccccccccccccccccccccagctcactgttcagttcttgtcaccaccgccatccgccgccccatacattccgcgacaggaacagtaccgaccgggcatggcggagggcgtagcggtcgccgtggccgtcgccgtcgcgcgtcgctttcgtatcgaacccacacgatcgcgggcgacgttgaccgacgctaacgtttcctcgtcggcgcttgcagacgaccgcgcggagagcagggtggagtacccggagcccatctacgtgtcccgggacgaggagttcgaggagggcaagaacgagatgctgtcggaaggcgcgctcaaggcgctgctccacaacttcatgccgctgctggtgagctccgtgtcgccggacttccgcgacttcgccggcttccacgacgtggacaacctcttcaaggagggcctcaggctaaagcaggccctgcaggaccagctgttccagaagatccccttcgtgcgcaaggtccaggagaacagcgagggcctcctccgctacgacacgcccgacatcatcaagagagacaagtttgcttggctgcgggacgacgagttcgcgaggcaggcgctggctggcattaaccccgtcaacatcgagcgccttcaggcgttcccgccgatgagcaagctggacccggccgtgtacggcccgccggagtcggccatcacggaggagcacatcatcgggaggctcgacggaatgtcggtgcagcaggcgctggaggacaaccggctgtacatgctggactaccacgacatcttcctgccgttcctggaccggatcaacgcgcaggacgggcggaaggcctacggcacgcgcacgctcttcttcctgacgggcgcgggcacgctgaagcccatcgcgatcgagctgcgcctcccgccgatgaccgacgggtgcgcgcgcgccaagcgggtgctcacgccgcccgccgacgccaccagcaactggctgtggcagctcgccaaggcgcacgtctgctccaacgacgcgggcgtccaccagctcatcaaccactggctgaggacgcacgcgtgcatggagccgttcatcatcgctgcgcaccggcagatgagcgcgatgcaccccatcttcaagctgctgaagccgcacatgcgctacacgctcaagatcaacgcgctggcgcggcagatcctcatcaacggcgacggcgtcatcgagtccgggttcacccctggccgctactgcatggagatgagctcgttcgcgtaccgggagctctggcggctcgaccaggagggcctccccgccgatctcatcagaagaggaatggccgtggaggacccgacgaagccgcacggtctgcggctgctcatcgaggactacccgtacgccaccgacgggctgctcctctggtcggccatcacgcggtggtgcggcgcctacgtggccacgtactacccgtcggacgagtcggtgcaggccgacaccgagctgcagtcgtggtacacggaggccgtgcagacggggcacgcggacaagcgcggcgcgccgtggtggccgcgcctgacgacgcccggggacctggcgtcgctgctcacgacgctgctgtggctgacctcggcgcagcacgcggcgctcaacttcgggcagtacccgctgggcggctacatcccgaaccggccgccgctgatgcggcggctggtgcccgccgagggggacccggagcacgcgcacctggtggccgacccgcaccgcttcttcctgtcggcgctgcccggcctgacgcaggccaccacgttcatgaccgtcatcgacacgctgtccacgcactccgccgacgagcagtacctcggggagcgccccgacgaggcgtggacggccgacccggccgcgctggcggccgagcgcgagttcgcggacgaggtgcgccgcgccgaggaggagatcggccggcgcaacaccgacgcgggccgccgcaaccgctgcggcgccggcgtgctgccctatgagctcatggcacccacgtccggcccgggcatcacctgccgcggcgtccccaacagtgtcaccatttagtcttctcgcttgggcggacagcggagatgatctcgaagcgaattttttccattcattgtaatcgggcggggagaaatctaaaagcagaagcaaatggttttgggaacgtatcctgtgagcacaggtcttccgtgcgcacgtgagcattttaattgggaacaattggatctataccattaaaagatccaaactttagatatataccatggaccccacatgtcattgactcatgtggacccatatgtaagtgagatagtaatagtatggatctaaagtggtg

SEQ ID NO: 2036 - DNA, 3076 bp, Zea mays
gcgcggggcgcgtcgcgaaacgcgtacgccaagaatatttttacggccgacggtcggagcctatccgttttcacgacgaaacttggatttggtccagaaatgcacctcgccgtcgtcttaaatttcctcgcccgatgtgggctatcgcccaccacctccctctactgtgtctgtctcccccgccgcgtcgtcccggacgtatccatccactgcgccagcgccgcgagaagagacccgcccgccgcaccagcgcctccgtccgcgagttccacctgaatccccacagcttcccgcaccaacgaatccggccagtccgcggcgcccccggcccactcgcggcggaaattcgtgacaaagccgcgattttttttcttcttcttcttcgcccttttgctttcgctcccgccggcccccttttccttttcttgttgaccccgccggtctgccccttttattgctgcgccggatcgtgttttctcgtcggaaggcgcgggctttccgagggcggcgatcgcggattcgcccccggaggcgtcgatttggttcgcaggtgcggttttgcctccccaattttgcttctggggaaggcgaagggattatggatttttcgtttcgttacctaacggtgttcgatttgttcaggtggaggaggggtcatggatccggggagatttctttagcgcgggttcgttcagggacgcttgtcagaacccgtcatgattaagcagatcctcggccggcttcctaaaaagcaggccaagtccggcgagaaggagctggccggcgcgggcccgtcgctgcccagcccgacggccgatacgagaaccaccaccgatttgaccacgtctagcaggcttgtcagtcccagcaactacgcctccacggccacgaatcaaggccagagcttcgtggcggccagggccgccggcgtcagcaacgggttcccggcctcggcagggtatgaggcgctgccgagcttcagggacgtgccggcgccggagaaacctggtctgttcctcaggaagctggccatgtgctgtgtggtgttcgacttcgcggacccgaccaaggacgcgagggagaaggaagtcaagaggcagacgctgcttgagctggtggactacatcacctcggccaccggcaagttcccggagcacgtcgtgccggaggtcatcaggatggtgtctgcgaacctgttcagggtgccgccccctgccccgagagagaacaaggcactcgagttgttcgatatggaggaggaagagcccgtcatggacccggcgtggccgcacctgcagattgtgtatgagctgttcttgaggtttattcagtctcccgagacagacgcgaagctagccaagagatacattgatcacggcttcattgtcaggcttctcgatctctttgactcggaggatcctagggagagggagtacttgaagacgatccttcacaggatatacggcaagttcatggtgcaccgtccattcatcaggaaggcgatcaataatatcttctacaggtttatattcgagacagagaagcataatggtatcgcagagctgttagagattttcgggagtataattaatggctttgctttgccactcaaggaggagcacaaattgtttttagtacgatcactgattccactccacaaaccaaaatgcgttgccatgtaccatcagcaactgtcttactgtgtcacccagtttgttgagaaagattgcaagcttgctgatattgtcattaggggtttactgaagtattggcccgtcactaatagctcaaaggaggtgatgtttttgggtgagctagaggaggtgctggaagctacacagccagcagagttccagaggtgtatggtgccactttttcgtcagatttcccgatgtttaagcagttctcactttcaggtggcagaaagagcgctcttcctatggaacagcaatcacatcgagggtttgatcaaacacaacagcaaggttatactgcccgtagtcctcccagcattagaacggaacacgaaaggccattggaatcaggcagtgcagagcctgagtctaaatgtccgtaaaatattcatggactacgacccagcactgttcgaggagtgtcgcgagaagtttgaggaagaggaagctcaagaagccggcatgaggtcaagatgtgaggctagatggaagcgcctagaagaaattgcctcgtcaaaggaggtgaagtagctcgtcttgccgactgcccaggctgtagctcgtcagcagagttcctctagctatctagccttgctggctgcatacgagcagctagctctttctggcaggatcaagtagatgctgatgtaactgcccatggatggctgcttgcctcgtgttacttgctttaccgaacattttacaggctgacatgtaaatacgaggtacatggtgggccgtgaagcttcaacggggactcaggttctggctgccgtgtgatccactgatgacagtatcggttttcatcatcagaggacaaaggaaaggatgtaaaatggtcattcctgctttactgagatgctcatgccacatgttaacgtctagtctgcggctcaatgtcttgatccaagcactgctagaagcacttgaaagacagtcgagcagcacttgttcttgcctgctgatggtgattttgctgaaatgtatagcatgctttgtgtatgatgaatggtaacttggagccatgtcttgtgatgatatgtaatcgtgttgtacatgtcttttccttcctttgatgtatacagaaatttggaatgaagtgctcattgattgatgttttatcgtatcattcttttagactgtatccaatagcgcgaaaaataggggtggcattcaacctaaatggtttcaatttcaaccaatctgtagttgatagccaaggtcgcgttattagtacttgggctgatatcatcaaccgtgctaatcttggcatataggtaatgcacaatcgtaatgctcacaacttccctctagatctagctgctcttgaagttccttaccttaatggataaggtttttctccttaacatataggaattttt

SEQ ID NO: 2037 - DNA, 1554 bp, Zea mays
cacgcgctctagaactagaagggcatccgcagaagttgaccacgtacagcagcggcagcgcgggctcctcctgttatataacgcccgcctctcgccgctctccagcttcttcttaatttctcttctatgatacaggggtaggagaaggaggaggaggagtagaagcagctccacacctgtacgtagctgccgcgcgccggtgagcgaggtcgttcttgagagctgtatatatatatatagctccgcgacgacgccgatgatggccatcaagtcgctgagcatggtggaggccagcctgcctccggggttcaggttccacccgcgcgacgacgagctcgtgctggactacctggccaagaagctcggcggcggcggaggccctgtggtggtgagcatctacggctgccccaccatggtcgacgtcgatctcaacaagtgcgagccctgggaccttcccgacatcgcgtgcattggtggaaaagagtggtatttctacagccttagagatagaaagtatgccactggccagcgtacaaacagagcaactgattcgggatactggaaggccacagggaaagaccgtccaataagccggaaagggttacttgttggtatgcgcaaaacccttgtgttttatcaaggtagagccccaaagggaaagaagaccgagtgggttatgcatgagtttcgcatggaagggcgagatgatcccatgaaattacctttcaaggaggactgggtcttgtgtagagttttctacaagagtagggcaacagttgcaaagccgcccacagagagcagcagcttcaatattgatgcagccacaacttcattgcctccccttattgacaacaacttcaatatctcctttgaccagcctggctcatcatcagtgcagaacctagagggttatgagcaagtgccctgcttctccagtaacccctctcagcagccatcgtcgtcgatgaacgccgcccggctgccgccgtctgccgccatggctgatccggagcagcagatggggaagtcaataatcaaggatgttctcatgagccagtttagcaggttcgaaggcagcgtcaagagggaggcgcctccaagcaatttttctcaggatgggtttgagtacttagctgagagtggcttcacgcagatgtggaattcgttcaattagttgattatgttttataggaagattatatatatattattgttatggagagcgatgcggatcgaaatgcctcgacgataacaggatggatatatagatgagtgctacaagaggcttgggtgtgtgtgcctcctgtgtggtattgcatgtagccgtagtagtagtaggtatatatatacatatagtagcagtaccatctcagtacacatccttcaaaaagaaggagaaatgaaaagagagatatatatatgtctgtatgccctatgccatcaattaatgacgacagatgtgtaaatacattatttgtgtactatggagaaatcagaaggaaaaaaatacagtgcgtacgtgatgacaaaaaacaagaatagaatcttattcat

SEQ ID NO: 2038 - DNA, 1136 bp, Zea mays
gcaaagcgcatgggcaacaagatcttttccctctccaccggtccacccccaaccaacctcctccccccgtctctcctctccctccaggcctctccactcccggcaacctcgccgccggggccatggaccggtggaccggcgtcgtctacgtcccactctccagaggcggacccctcttccgcgtcgctgcctcgctcctcctctcgccagccaaaacgctcgccgttccacgagtcaacgcgatccttttcacgggcgaccgcgtccgcggcacgggcgatccggtgatcgagcggctctctgacgccgcccacctggctggggtcctcgccgggaagctccctggggaggccaacgcgtgggtggtcgacgccgcgcgctttgctgggccgtttgcggtgtaccgagagctcgttccgaccgtcgacgccgctggagaccccaaggggtatgaccccactggcttccccgccgccgccggtgttgccaacatccttgcacgcagcattggtgagatacagaatcaagtcccggggttgtcggcgaaggattcggctggcaaccagcaccctccatcctaccatccaccggctaggactatcatccttggcttcagcaagggtggagtggtggtgaaccagctcgtgacggaactttctcggtggggggcatcaggatcaacgaaccaggcggcggcggccgacgttccacgaccagcagcagcaggtccaggtccaccaccccatccgacccagaacgaccttcttctcctgggggctcctactcggagcagcgacgacctgctgtcaagtatctccgagctccactacgtggacgccggcctcaaccgcgccggagcgtacgtggccgaccgcgcggtgatcgggaggatacgcgagcacgtcgtacgcgccggcgacaagagcctccgcttcgccctccacggtaccccgaggcagtggtgtgatccgagccgcccgtggatccgggaggagaaggacgcgatggtccaggtactcgcggacgaggcccggaggagcgaggggaggcttgtgctgtctgagaagctgtatttcgagggcagacctcgcagcctgctcatgcattttgaggtcttggaagcgatggatatataa

SEQ ID NO: 2039 - DNA, 2373 bp, Zea mays
agccgtgcggttccgttccgttcgaaccccgccgctcgccgcggctcgggcacccgcatttacgccggggcgggcggcatacaccaaccaaccaacgctagccccgagcaagagtaacgtttgtctagtggcaccgctcgccgctcgcctatggacgacgtgccgcccgggccggctgccttctcacgccgggagggttggggaacgagcgccgcagccgccgccgccaccacgaactcgcggaagaccatgccgagatccaggggcaacgagccgccgctgcggacgtcgcagcgcgcgccgctgcacctcaagacgacggcctgctccgaggcgaatggcgcgcaccaccgccccgtcgccgaccggagtagccccagggtctcgccgcgcagccctctgcccgagaagaagcgtgcggcgggaacacgtgttgcggagctggagggcaagctggggaaggtgcaggaggagctcaagaagctgcgggagcagctcgcgtccgccgaggccgccaagaaggacgcgcaggtcgcgctcgaggaggccaagaagcgcgtcggtaccaagggaagcccagcctccaccaccaccaccactcctctctcccccccttcgcctggggtcgaaatcgccaagaagaccgaggagctgaagctgcctcagccggcagccgaggaggagagcagcataaacgtcccggcgaccgatgtgtttgaggtcgtccgggccgagtcgggggacaaggagaaccagagcgcggctgaggtctgcgaggtcgttagctgcggcggcggtaaggcggcggtggacgtggccgagaatgaggagacggaggaagaggagactaagaaaatgatcggggaggacaacagcgcggcggtggaatctgacggcgccgacaaggagagcccggaggtcgtggagctgaaggcgaagctggcggagaaggacacggagatcgctgccctcacggcggaaaacgctgagctgaagaagcaggcagaggaggccgcggaggcggcgaagaaggccgaagaggggcccgcgtcgagggcggccaaggccgagcacgaactgaaggagggcgcagcgcgggaggcccgggtgggcgagcagctgcgggcgtcggaggccgcgcgggaggcgctggacggcgagctgcggcgcctgcgcgtgcagaccgagcagtggcgcaaggcggcagaggcggcggccgctgtgctcggcggggacaaccacctcaccggactggccggcaacggctggggctcccccgccacgatgcccgacgacggcgacgacgagggcttcggtggcaagcggaagggcgccggcatccgggtgctcggcgacctgtggaagaggaaggggagcaagtgaaggcctgccgcctgccgcggaatgggacccgtgtcccaaatttcgcaacggtgagctcgctcagcccgcccgcttgccagcttgaacaactccatcccttgcactagcttagctccatcgttttaccgcgttttggttcggagtctacttatgtttgtatgatgatgatgacgatgatgagacgatgctcgtgaggttaaactatgtctgtaacgcttgatcccgctgctgcctgctacctccgcgtaaggagcaaccaagatggcttggtgcttttactgcattgcggcggtgctgttgacgagggagtagatggtgtttattttcatggtggaattgaggaatgcttgattgcagcatcaagaaatgcctcttgtgactctaacgaatcctaagatatcattgcagcgcgtaggatctccggtggcctttagagagagagagagaatcgctggaatcctaaagaggttcatcgtgatacttgctgattgtatggtggctgttcatgatacttccagcctatgaattatgattgcatccgatggatgcaaccagattttgatttgagcagcggattggagcagtatgtcagtagcatcgtcttggtgaatatccataggaccacctgatagttttgactttcaaggtgtccagaatcctaaaacgaagcattctcggcgcagccaactcccaccaggccggcacaagccattttgcgcgccgattgtttgtgtccccatggactcacgtcgtgataacgatgagttcgaagatgttttttttactggagctcaagatggttgaagcaggctcgtcctctcatgccgacggctgccagccgagtgccgacgcccgctgatcggttgcaatcacggacattgaacccgattccattctggaaccacgccaaggcccaagggtaatggcagtgtttccgcataggccggatggcaggttgtggactgggccccattcagtgtactgcctttg

SEQ ID NO: 2040 - DNA, 942 bp, Zea mays
atggattcaccaagcgggctctggtggcggccggcgccgtcgtcgtgtcctccattcccgtcaaccccctcgatgtcgccaaggtacgtcggtgaccctatcgttgcctctttcgcttcctcgcaactgccgccctcaaccatcgaggctcgcccgcaacggccgccactgcccgctcgccatggcgctcgcctcgcaacagctaccgctggcccagcaccaccaacagcaaccccgcttgttctccaccacccactcgcgaaggccccctcggtctcccttaaaccaccgtctcccaccgacttctgcggttcccctagggatgctgatgcgtgcggtagagcgcgccaggacctctccctcacagatgcacctccgcgtagtcgccggcgaggacgacgtgacacctactgtcgtggttcccccggggacgctgatgcgtgtggtggagcatggttggacctctccctcaccgatgaacgcctgcgcccgacacaccgcgtccccgttgttcacctcggcctgctgctgggcgccacctcgcctccctcgccgcgttgctgcacgtgcctctaccgtggcgacatgcccaagcacgtgaccgaggccaacctgctcgtcttgttctgtgaggtcgccactgtcgaggaggtcaccatcatcaaggacaaggccaccaaggtctcccgaggtgtagatctgcctggccccagatctgggctcgccgccctcccttccccacgcctgctcccgctcggttcgccgcaatgttgtgacctccactgctcgctccagagaagtttttctccgctcggggttgggtttgggagcaatgtcacccgcagaaaccttttgtgcacaggttggtcgttatgggagatatgggcaccttggtttggcagtgaacttgaccacttacaaagattgtttcaacttatatag

SEQ ID NO: 2041 - DNA, 1716 bp, Zea mays
gtcggcttaccagtgttccttgctgattaattggtaactcgccttgataagtcggtctacgatgttgattagtcggtcctaaccgatggaacgactgggaggcccacgcccacaccatcccctcgcactgctgctcctactaggctactactacgccgcagccgcacaggcagacgcgtcgattcaaccacactgctgccagtctgccacaactatttactgccgccccctcatcaccgccacgggcccggcgagcaagcgccagccaggggagggaagccgaggcctaggacaggaggccatgtcaggggaccgctcgtccacggcagagcgccggcgggggatccggcgcctcctcctgcatccgcgcggcgaggcctcctcgcctccgcctccgccgccagcgccggcgccggaggaggggagaaggaaggggttcgcctcggcggcgctgcgcggcctgggctgcacgtcggcggcggcgtccaaggcgtacgcgcccggagcggccgcggcggcggccttgcggtcgtcggcggactggcacgggcggcggcggaggaggggcaaggacaggaggaaggagcgtggcggcggcggagcgggagcgggcggaggcctcgtcaccggtgggatcggcgccgatgtgtggtgcgcacccgggatacccttcgccgcggaggcgtcctcggtggactgcgtggtggcgcggcaccagacggtggggaggggcggccgcggcgccgagggggagaggtcccacagagagaggccgtgcatgtcccggagggcgaccgtgcaggagcagatatcctcgcccttcatggactcgccgccgccgcacctcgacgcccccttcttcggggccgatctgatcccctccggccgcctccgtcggatgcgcgggtaccgctactcccccggaggcctcgaggaagagataatgatgtttcagacaagagttttactgggaggaatgaacatgtacgatcgctaccaggattggcgccttgatgtagataacatgacatacgaggagttggtcgagcttggagacagaattggatacgtcaacacagggctacgtgaggacgagattgctcgcagccttaggaaggccaagcacccatccttcggttccttgcgattcgcagcagaagtggaaaggaaatgcactatttgccaagaagaatttcagtcaaatgaagagatgggaaggctagtctgtggccatagctaccatgtgttgtgcatcaagcagtggctctctcagaagaacacttgcccggtttgcaaaactgccgtcagcaagaattgaaatgcaaactccaggcacgctgtctgcatgcctaaggtgaaatcaatgtgaaattggcaaattatgttgtcgtgtacagcccgtcatatataatattagggggtgtttgggagtgaagttttttcacagttttggaagaatactgcagtattcttaaatactgcagtattatatacagaatggtgtttggcaagctggctaaaatctatgttttcaaaactgtagtattacaaatactatagttgttttaaggtattctaaacttaggtctggacctcagttttcaaaactgcggtattgtaaactgcggtattgtcatgactaaagtatactgtagtatttcaaaaactgtggttttcaaaaactttgttcccaaacagggccttattgtatacaca

SEQ ID NO: 2042 - DNA, 1828 bp, Zea mays
ctcgatggggacgacggacgagacggtcatacttcaactgccgcgtccccgaatattggctattttccaaccggcggcgcagccggtgacgcgcaggcgggcgggttcatctgacccttcgtcgactcgtggcagatgtgactttctgaggccggtgtgcctggacggtttcgtccatggcgtgcgcagtgcgcactcgcatcgcatggtattaatagtcattgcaagccaagaggagactagaaaagagaaggtggaagaacagcaggagagtcggaggaagcaagcttgcccatacgctggtacttatgtgctgatactactgcagccgcgctgcgagagaagaggagtgggagcacgtggagccaaaggggcgattctttgcttggccttcatttctcgcctcttccgcatctcgagttgtcgtgattaacaagacagcaagacctcggcggcggcaaacagtcgagcacctgcgagcgtctctgccaccgggactcaagaggcaatgccagcaccagccccaccaattcgtctgggacctccgactccctatatatcctctcatggatccaaagttgcacgcctacacatgtatgactggattgtgctaattcttttagctgtattggatggagttcttaatataatagaacccttccatcgcttcgtcggatcagaaatgatgacagacctcagataccccatgaagggcaatacagtgccattttgggctgtgccgataattggtatcattgggcctatggttatcataacagtgatatactttaagaagagaaatgtatatgatctgcatcatgccatactaggtctcctattttcagtacttattactgctgttttaactgatgcgataaaggatggtgttgggcgaccacgtcctgatttcttctggcgttgcttccctgatggaaaacctgagtataacaactttactacaggcgccatatgccatggccaggcgagtgttattaaagaaggtcataaaagctttccaagtggtcatacttcatggtcttttgctggccttgggttcctttcatggtatttggctggtaaaatcaaagtattcgatcgtagaggacatgttgcaaaagtctgcattgtcctttcccctctgcttcttgcagccttagtggcagtttctcgagttgatgactattggcatcattggcaagacgtatgtactggcggattacttgggttcacggttgcttccatttgctacctgcagttttttccactaccatctgatgaaaatggactgtggccgcacgcatatttccgacacattcttgagccagagggtgacagccaagcgcaacccacgtacatgagccgtcgcagctcggttcagaacggttcctttcagtacagccctgacgcagtggaaatgaggagcacgagccaagcaatggattccatggaagctggccagagagcccaataatgatggaattaataggaacatcaatttagccacggaccgttgtaatgtaatataacgtcgttgtagcgcttagtacagcaagatcttgttcagatcccttattgtgtagtataacagttcctgaatgatggtcacgtttctgctggtcctccgaagactgaagcgcgactgattaccgcgttggcgtgatccggctggctgccatgtgactcaggcgatgaacaatgcaaatttaaaactcgttcggtgcgatggggttcgttgggactggggccattgccgcagaaccatgtccctctccctccacacacacacagcacagcggggcagatctgaatgtgaatggatcaatttcag

SEQ ID NO: 2043 - DNA, 726 bp, Zea mays
ctctttcctctcgctccctctgcttctggatacttccgatgcctctcctcgctccctcggtcgctgctgatgcgccacgccgccgccggcgcctcatcggcaggaatcatatggacagcccagaggtggtggcctccgcgtccccggctgcggcggcgagcgagcgccaggagaggcccgcgaggctgcggcggaagatctcgtccgcgttctgcgcctgcatgggccatcccccggcgtcgcacgcgcagcagtaggcatgctacggtgcgtactcaaatctaccagctgcgtgcggtccgtcgtggggtatggctgacgagcggcctggggttctcgctctctttcttgctatgcaacaaacatttgtgatttgtgcttacacgtgagaccgtgcttgctgtaagatttttctcccctcttttttgtggaggtcataggaatccctccacatcgccctctccccgttgtccctctcccgtcacttcatcatctcttccagtcgtttcatctttctcggcagctttggcttcagtcatcggcttcgcaagttcgcatcgacatggggttctaattggacaacctaaggcttacaacgagccgtggtctaaccacccaaactgactgctcagtgacagaaatcagacaggttggtatctaatgtttaaatataatggcataaattctagcaccttgaaaaagacaaactcggcacgccccattgtg

SEQ ID NO: 2044 - DNA, 2575 bp, Zea mays
cgttacatgacgcccggctggcttcgcctggccgtgggctgtggctcccctcgcccccccaccacctcgtctctctcctcctgtcgtgcccgcggtcgcgtccccttcaccaccaccccacccgcctccgcgtcgcttgtgctgctgccaccgccgtgagcctccaccacgggcgccacgcgttcccgggggcggatcgcgctgccgcaaaggcgatcggcgagtgacccaggggaggagatcgcccgtcggcgccgcagctgccgccgcagaccgagccgcgtttcctcccgtccggttccatcgcagctcctgtctgggccagtccgttgaggcagggcggggcggctcgatcgcccgcagatgaatcatggcttcaatgttaaacattgtcataggttctcatgtatgggtggaagataaagacttgtcctgggttgatggtgaggtattccgaattgatggtcaaaatgcccatgttcacacaaccaaggggaagacggtcattgcaaatatctcaaatattcatcctaaagacacagaagcaccacctgatggggtggatgacatgacaaggttatcatacttgcatgagcctggtgttttagataacctggctgtcagatatgcgaaaaatatcatttatacctacactggtaacattctgattgcaataaatccattccaaaggctacctagtctggttgatgcccttactatggaaaaatacaaaggtgcaaatcttggtgacctagatcctcatgtatttgcaatagctgacgccgcttacaggcaaatgataaatgaaggaaagagtaactccgttttggtcagtggtgaaagtggtgctggtaagactgaaactacgaaattgttgatgagatatcttgcatttctgggtgggcgatccggaacaggagagaggacagttgaacaacaagttttagaatctaatccagtccttgaagcctttgggaatgcaaaaactgttcggaacaacaactcaagtcgatttggtaaatttgttgaaatccagtttgacaagagtggtaagatatctggtgctgccattagaacttacttgcttgagagatctcgggtttgccaaattaatagtccagagaggaactaccattgcttttacttcctatgtgcagctccatcggaggatcttaagaagtataagctcggggacccatcgtcctttcactatctcaaccagtcagcttgcattcaagttgatggaatcaatgacgctgaggagtaccttgcaacaagaaatgcaatggatactgttggaatcactgatcaagaacaggaagctatattccgtgttgttgctgctgtgcttcatcttggaaacataaattttgcaaaagggagagaggtagattcatccataataaaggatgacaaatctagattccatcttaagacagcaggagagctcttgatgtgtgattgtgagaagttagagaatgccttgataaaaagggaaattaatacacccgaaggagtgattaccacaacagttggtccaaattctgctactattagccgggatggtttagcaaagcagatatactctcgattatttgagtggcttgtaaacagaataaatgcatcaataggacaagacccagactctaacaaactgattggagtacttgatatatatggttttgaaagttttaaaaccaacagttttgaacaactgtgcatcaattttaccaatgaaaaactccagcaacattttaatcagaatgtcttcaaaatggaacaagaggaatacacaagggagcaaattaattggagttacatagagtttgttgacaatcaagatgtacttgacctgattgaaaagaaaccaggtggcattattgcacttcttgatgaagcctgcatgtttccaaagtccacacacgagacattgtctcagaagctgtatgaaaagttcaagacccacaaaagatttaccaaaccaaagctttctcgtactgcatttacaattcaacattatgctggggatgtaacatatcaatctgatcaattcctggacaagaacaaggactacgtggttgcagagcatcaagaattacttaatggttctaagtgctcttttgtatcaggattatttccaccagcaacagaagagaacacaaaatcatcaaaatcatcaattgcaactcgctttaagatgcaacttcacgagctcatggagactttaagctctacagagccacattatattagatgtataaaaccaaatagtgtccttaagcctggcatttttgagaataccaatgttctacagcagcttcgatgctctggtgttcttgaagccattagaatcagctgtgctggttatcccacaaggaaacaatttcatgattttctacatcgcttttgtgttcttgctcctgaaattttgaaagagaaaaatgatgaaaaagtctcatgtcaaaagattttggacaaaatgggactacagggttatcaggtgaaaaacacttcacttaccaatctcctcaacatgtattggaagagagtatttagatttcctaattggtggtag

SEQ ID NO: 2045 - DNA, 768 bp, Zea mays
atgacatttacagagaagatggttttggcagtctttagggatctcactatcctatggatgaccaagagcctgatggacgacatccatgggtggggagttctcttcgatggcagagttggtgacagaaccatcactgtctatatttggaatggtgaagaacctaaacctaacaagggacatcttgcatgggctgatgcttttgtcataacagcagactcgataagtatgttaagtgaagcatgcagcacaggcttgatattgaagaacgtcgcgtcgctgttcatgagtaaggattccctcaaggttgaagctgatactaggcttggggagctcataaagtctgtaagcggggccgcgcatggcgggtgtcaggtgagcagcaaggggcagaagtgccggccatgtggacgagcagcgtgggcgagaggcgaggtacaagcagcagcagtgcgggcatgcaaagagccagggaggcagcagccatgcgagatgttcatgttagatatgttggtcgtacttttgatacggcgaagggaaagtactaatgttgaggacatgtttcttgctcatatctttggaatggacactctggcccgtggcctccacaacgttgtcaagctgattgagatgatcttttccacaaagcggtaccagagttttgatagtgagattggtgccttgatcgaggatgggaaaggagactttgagatgctaaaaaagaaggttctagagtgcagtgcactgttccatccggcaagcaggaactag

SEQ ID NO: 2046 - DNA, 656 bp, Zea mays
atggcgtcgtcgtcttctctagcgatcagaagcgtcctaggctgcctgatcctcgtggccctagccgtgtgcggcctgccgtccctaggctcggccatgggcgtgccccagcggcagccaaaccccatcaacttcaccatcggggtggagggcgtcgtctggtgcaagagctgccggtaccgcggctacgtcgagtccagggacgcgtcgccactccggaacgcctcggcgctgctgcggtgccggcatggccgccgggcgctgtccgtgtggagcgccacgaacgcgcacggctacttcctggtccagacgggggcgcaggcggcgcccttcacgagcaggaactgcaaggtgtacgtgccgcggtcgccggtgcgcggctgccgcgtggccgtcagccccggccgcaacaaggggtctccgctcaagttccgcaggttcgtcacgcgcaccgacgggctgcaggcgcgctactcggccggcagcttcacgttcgcgccgcaggaccgctccaagtgtgactgatgaccgcgaacggccctctaatagagacttccaaagggctcgatcgcccgcatcccgtcagggatggggctgtaaattacagtataattaataataagcaaggtcatgaagccgatgtgccttttgtgctt

SEQ ID NO: 2047 - DNA, 2098 bp, Zea mays
cgcgacgcggcgcaggcttctcgtggccttcttcggttcttccctcccccctacacctacatatctaccaaagcgagcgagtccaccgtcgacaccacgtcatcggccccattctcctccgtcctctccctctcgacttggcgacaggctctctctcctacccgagaggacagaccgcaccgccacgcacccggcaccccctctcctctctgccgtcatgggacgtgccgcgccgtcttcatcgccgagctcgccgcagctcgggcgcaagcgcacggcggcgcccacaccggagcccccgacaccgcagcgccactgctccatggtcgacgtcatgcgccgctcgcgcgccgtcgccgcgccgccccctgtcgcacgcgcgcgggtgtacacctactacgagacccttctctgtgagacctgcggcctcggtgaccgcgacgacgagatgctcctctgcgaccggtgcgaccgcggctgccataccttctgcctccgccccatcgccgccaaggtccccatcggcccctggttctgccccgtctgcgccccgccgactatggcccccaagagtttcccggtgaagcagaccaagatcgtcgatttcttccggattcagaaggatgagcaggatgcacaggccgccaaatgcaggctctcccaagatggtagaaggcgaaggaagcgttctcttgttatgcacaagaggaggaggaggatactgccatttgttccatctgaagatggagctagaagactcaaacaaatggcgtctctggccactgctttgacgtcttccaaaacaaagttcagtaatgagctgacttacatgcctaacatggctcctaggtcttccaatctggcaagattggaggtaggcggaatgcaggttctgcccaaagaggataaggaaaatatagagctgtgcagaaccatgcagcaaagaggcgaatgccctccacttctcgtggtctttgatccccttgaaggtttcactgtgcaggctgacggtgatattaaggatatgaccttcctcgctgaatatactggggatgtcgattatctggagaacagggaaaatgatgattgcgactgtattatgacgctcctcctgccagctgatccttcccaaatgctggtgatttgccctgacaagcggggtaacatttctcgcttcgtcagtggcatcaacaaccacacaccggatggcaagaagaagcagaatgtcaagtgtgtgcggtacgacatggatggagagagccatgttttgctggtcgcctgccgtgatatagcttgtggtgagaagctatattacgattacaacggatacgagcatgcgtatcctactcaccatttcttctaaacaccccccccccccccaaaaaaaaaaaacagttttgacctgaacagtaaggtagtagtaaaggaggctgggtgaaattgatagaactttgccaactaaaaaccaacaacatatactgaagagatcctaaaatgatagacattgataggtgcttagggaactagtaccctgattcaattacaggagccaatgaagaggaattgccattgtctctgctctccagatgcatcttcccattcatattctttcttttttgttatataagaaaatgcagaggaaaaagaagaagaatgttgcagttgagttaactgttggcctgttgctggttcaaggcacatggccgtctctataatgttctgtctactttcaccgtttgcggttgtgctccttacacacagtatgtgtgtgcattgatgtgcacttgaggctaggatatcacaaaagaggttcaagtgatatcacactgttttagagtttgcagatccgaaagcctaaacatcacagactcacattactacataacataatgagggaattgcatggttacctcactccaggatgtcactttgtttttatcttttttttatataaaaaagtttatatgtatgtctcttctttttttgaaatggacacctagcttattcctattttattattagatgcactcagcccattaaaggacgttcatacctttgcactattgtttctccttttattaactgtttgtaaatttac

SEQ ID NO: 2048 - DNA, 820 bp, Zea mays
caagcacaaacgactaacacacggtttggaacacatcacggtttcagtgccatggcacccaacaagtccgttggtcaccctgcgctccgattcctagccgctatggcactcgtgttaacggtatcagtctgtggccagtcgtcgtctccagctccgacgcctgctccagccccggcgcctgcaacgactcctgctttagccccaataatgccagcgccgactcctgctccgacgcctgcaacgactcctcctgcttcagccccaacggcgccagcaccgacaccagcgccaacaccatcactgacaccagcgccgactcctgccccggcgccatccgaaaaccggtgtccccctggcttccctaacctaatcaccttaattcaagccattaagaccacctatcctaataagtgcaatattattattgtccccgttccattctcgccggtaaacccagggtcgggcattcttccatttccaccctacaaatgcctgtgctactgatttcccattattaggattccatggcccggcatccccacctacaaatgtgttcctgtaggcactcccggcccttaacagtatgagcatatatatatttgggtgcacggaaactatgcagaaatgtgcgcatgcatacttaagtatgaataagtgcatgtgagcgaggtctgtatctggaggttgattagttccatacatgggcgcagtgtgtgcatggtaagggacaattaattgacctacagttgtgtgtaatgcgtgacatgctgttgttgttttactatatactacttaaagtgcatcaacaatccatgaacta

SEQ ID NO: 2049 - DNA, 2299 bp, Zea mays
tgccaaactctgggtgggctgcatttgatcgcaagcagcagtgcagatgacactgggtatgaaggtcatgctgattcatttccgacgctctcaaattctggagtccctaatcttgctagcagctctattacataaaaaagaatgggctgaaaccaaagccttttgctttagtggtttgcccttctgttgattctgaagctgttagtaatggatgtggaaataagaattctactaatcatgtcgataatgggaatcacagtgcaatctctacatctgttaataaagttatgctcttgaaaaaacggctatgtggtgggaaagacagtgctgcttgcctattgtctaggcaccacctaggatctttttttgaaacagagtgcttatcgcatagacctagataatatattaacagggttctctttccattttcattcggtccattttcattaggaccttctaatttagaagcgtatgtctctgcacaattaaatttgggtgcggtatcttgaggcaatagaagggcttaactggggttaaagcagttgtcagtactattttttgatggcccagttgaatatggaaaaactgatttggagaccaaatcccaactacacaagacttttgaatgtttcactgaacataacttttattttaaccttacagttcggcctatagagttctaagtttcttttgcttcacaaccaggcttatttcgatagcttttttattgctaaatctaaatgatttctacgcgcaggacgcgcgcaatttactagtttggtacaatttgcgaacacggtgagattagacaacaacgctcgagtttccaatctctaccggtgcagaacgacggctcgatgatggtaggaaaggttggcaatcacaacacgaataagagagtaataaagagagcgagagggaagtacgcattaccgactcctggatctcctcccggacgatgtagaacggatcctgcgccgagctcatggcctctccgacgaacggattgccaggcctgggcgcctggattttcctcccctcgaatccctagcaatattttgggggcaggggatttgcttggtgcggagtcgcggactcgcggtgcagacgagagaggagagatccagatcccacttccactggttccttccttgtttcgtctcggtgacactgccaccagggtcccacctgctttccgcggccgcgctcgtggactcggtgcacagagcatcctcggcccacgtggcgcgtcgggcccatcacgcagtgactttaagtcgtcgctctctccacccttctttctccgctgcatcgggaaaaggggagcgagaggcgaagcagataaggaagccagccggcaaggggagccactccggcgtcgagaaacctagggcgagcgcctcgacgactcctatcaccccatggcggccttcgctacgggcagcaccacagcgcgcgcgacgctggcatcgccgacttcgtgccagccggccgcgcgccgggcgccggcccgatggatgccgctgcgctgctcgccgccggccctgggcctcaggggaggagcgcgttctcggcggagcgccacgctacgggtggaagctaagaagcaaactttttcttcatttgatgagttgctggagaagtctgagaagccattgttagttgacttctatgcaacttggtgtggtccatgccaatacatggttcccatacttcaagaagtgagtgagaagttaggcgacaaaattcaagttgtgaaaattgatactgagaagtacactagcattgcaagtcgttacagaattgaagcattgccaacttttatcatattcaaggatgggaaaccttgttatcgctttgagggagcattacctgttgaccagatgatcgaacagattgaaaatgctttggcagtcacaaagtagcacatatggtgatgagcagggcagaatccccccccccccccccaaaaaaaaaaaagaaacttggtggtacctcataacgtgtgcctctacatattgaaaaatcttgattattgtctacaagatcacaacatcaagggcctaacatttgtaaggatttgttggatcttctagattcttatggggagttagatgttctcttccgatgagacatgtagatgttggtctgccattggcgtattaatggttccttgtgtcttttatcgggagcaagagccctcgcattgcctagtgttggtaataaggattattttaatcctccgatatgcatgaacgtctatcaggatgatattatataccaccaccgttctctaata

SEQ ID NO: 2050 - DNA, 1076 bp, Zea mays
aaaaggggagcgagaggcgaagcagataaggaagccagccggcaaggggagccactccggcgtcgagaaacctagggcgagcgcctcgacgactcctatcaccccatggcggccttcgctacgggcagcaccacagcgcgcgcgacgctggcatcgccgacttcgtgccagccggccgcgcgccgggcgccggcccgatggatgccgctgcgctgctcgccgccggccctgggcctcaggggaggagcgcgttctcggcggagcgccacgctacgggtggaagctaagaagcaaactttttcttcatttgatgagttgctggagaagtctgagaagccattgttagttgacttctatgcaacttggtgtggtccatgccaatacatggttcccatacttcaagaagtgagtgagaagttaggcgacaaaattcaagttgtgaaaattgatactgagaagtacactagcattgcaagtcgttacagaattgaagcattgccaacttttatcatattcaaggatgggaaaccttgttatcgctttgtaagtgttgaaaaaacaatgttttcaatttccatcaataatttaacttgtgctaatatcttatgttttttgtctcctttgctacctggcattcaggagggagcattacctgttgaccagatgatcgaacagattgaaaatgctttggcagtcacaaagtagcacatatggtgatgagcagggcagaatccccccccccccccccaaaaaaaaaaaagaaacttggtggtacctcataacgtgtgcctctacatattgaaaaatcttgattattgtctacaagatcacaacatcaagggcctaacatttgtaaggatttgttggatcttctagattcttatggggagttagatgttctcttccgatgagacatgtagatgttggtctgccattggcgtattaatggttccttgtgtcttttatcgggagcaagagccctcgcattgcctagtgttggtaataaggattattttaatcctccgatatgcatgaacgtctatcaggatgatattatataccaccaccgttctcta

SEQ ID NO: 2051 - DNA, 1848 bp, Zea mays
aacacactagataaatggaagtgacaatctcgttcaaacgtggaagagaactcaactactcaagcactcaacttccaggcaccaccacagacccggaccaactgacccgacccgacccgaccccgccgctgcgcgcgcacacatcgggcatcgcattcgcaccggcgtccacggcccaaagcgccgtcgcgccatccccgtcccctccccacccgctctgccgttcgctgtttccatcccgccgacccgctgcgccaccgccacgctccccaatctccatcccaacgcgccgccgcctctaatctccctcgcttccgctccactccgcacccccggtcgcctgccctaacctcgtgctgctcgcgatcccgccccgtgcccagatctggtggcgccttcgccgctcgagcgcccccgctcagcggtgaagtgcaggcgtccgttcggccggccagccggccgatggtttcggccgcggcgcaggcgggcgtggtcgcgtcgtgcgtcgtgcgtgctcttcgtccccatggggctggccggccggcacctcagccgcaacaaggtgctcttcttctccggcgcgctcttcatctcgcttgctgtcgggatccacctatccccgtaccccccttccctttccctgccccacctcgcctcctttttactcctcccccaccctggctccgcgtccgcttcctccgggtcttcctgcgtccagttcctgcaccgcgtctcgtggtctgacgccgccggagccgccgacaatggctcgggaggcggaaaagcgcgggcgtggtcgtggccgccctcgctggcgtccgcctgcgggttcgctcgactgtcgcgcgacgacgcgtcactgctgctcaatggctcgtgggtgatggtggccggggactcgcaggcgcggctgctcgtgctcgcgcttctccgcctcctgctcgacccggccgcggcggcggccgccgagccggagctcttccgccgccacagcgactaccgcgctgccgtccccgcgcgggacatttccgtggacttcgtctgggcgcccttcgagagcaacctcacgcgtctgctccgcgaggatctgcgcctcgcgccgcgcctccccgacgtgctcgtcctcggatccgggttgtggcacatgctccacgtcacggacgccgcgagctacggcgatgcactggcgtccgtcgcgggcgccgccaagtccctccgctcgcagcttccggagccgccaccacatatgttctggcttggcttgccgcacctcgtgaaccacatgctcaacacagacgccaagagggcacacatgaacggcaccatggtgcatgcctatgatcgtgaggtcgatcggaggggtgttttgcgcggtgaaggcggctcattcctgctgcttgatgtggggaagctcacccaggggtgcgggcagcaatgcacagctgatggtatgcattatgatggtgatgtgtatgacgctgtcatgcatatcatgctcaatgcactggtgattgagtcccaacaaaggatttgagtgggtctgtgggagggtgtggggttgaacaggtttgtccccacccccttttttttttggtcagctactatacacgggtaattagagattgttgtgaactaggaaggtcctttggttgcttcaacattttggtcgcttgccagaagtcagcacccttgaattgctcaacccttagattgtaatatagggatatcttagaaccacactgttttttttgctaaatggcaaaccgaactggctataatgtatactttttcttggggaataactaaggtggtgattctgacatgaagattatgaaatattacaaaata

SEQ ID NO: 2052 - DNA, 731 bp, Zea mays
atcatcccgcgccgcggccggggaccgcgtgtcccaccacctgtcgacgcggcgtgggagacgtgcgccgcgtgcgtgcgcgtcgccgcccggccgttctagacctgtagaccttggggctctggagctccattatatacagaggcaagtgggagccgtttgttcagcaccgctacttgtgctcccccaacgctactaccgccgctagctggttcaagtgcggcgagcggagccggagaccggtagaggaaattaagaggcgtcgatcgggcatggggtgcgacgacaagtgcgggtgcgccgtgccgtgccccggcggcaaagactgcaggtgcacgtcggggagcggcgggcagcgggagcacacgacttgcggctgcggggagcactgcgagtgcagcccgtgcacgtgtggccgggccacgatgccgtccggccgcgagaacaggagggctaactgctcctgcggggcgtcctgcaactgcgcatcctgcgcctcggcctgatccatgcgcctcgccctcgtgctaccgcgctgcctagtggagggagttgtctagtgaggctctggagacgaagcaactagcactacttctaataaaggggcttgtgtcatgctcgccagacgcatcacgcgctgcatctgcatcgtggtatcgtgtagtaagtttgtgtatgaataaacactaccactttatgtctcgcactaccagggcgcagcactccgtgca

SEQ ID NO: 2053 - DNA, 2082 bp, Zea mays
caccgaggatgctggaggagcgagagaatacgggaccaaggatccgtaggtcgcgcgagggaaggccagcgcggcggattatggtggccttgtcgagctcgacgacctcggaggcaccccagcggtccagccgcatccacaggcgcgcgccgggcttcttcttggtgatcttccccgacaaggcacccccggcgcccgcggtgactgagaggggagagggcggctgggcggtctgccccgccgctgcagagtccggggtcgcggacggcgaggcggcggtgggggaggcgagaagagccctcgtcgcgttgtcctgcttggagggggaagggaggcgacgcccggagcgattccgcttggaggaggacgaggaggatctggtgaagaacggaagcttccggccgccggatcgcttccccatggcgttgcggcggcggcgtgccgcggcaccggcacggtccacgggggtgaatgggtcggacggcgggttctgtcgtcgtggtcgaactccaaatctgtggtagacgagtgggccggtcagggccaaccgctcgtgagaggaagccctaggatgctggtcggacggttgaaattgcgtgcagcgtcaacgcgccaagttgccgcgctggcgcttgccgcgaaagagagaccactatccagaagcgaagataatatcttcgtcttcccccttctcgccgatggctgcaacacccactgccgccgttttgctcgcgcgcccgctcatcgcactctccagtgctttcacctcccctcatcgtgcgcgggtgccgagcgatccctcctccatctcggtgccgccactgaggagtcgatggtgccagtggcgcggcccgctccgatcgctgccccccgaaggagctccggccgagctgatggaagaggactccaagtttgtgccgttgaacgcggacgatcccatgtacggcccaccggcgctactgctcatcggatttgagaaaggcgaaactgtcacgattcaggccttcctgaaagagcttgaaggtgaattcctcaaggtgatccattgtacagaggagatgacaaagcaaaccttatgggatgccatgcacactgagcagcctgatttggaagctgtcaagattgcaggaccactgccaaggatatgcatattttctggtctaactggcgaggagatgatgatgttcatcaacgccttcccagaaaccgggctggaagcagctgcctttgctgcgcttgtccctaacagtgcagagaaggttctcggcgaagtgatcgaggaaataatgggagaccatgagatgctggttagctctgttttttttactaagcaacatcatagtaatcattctgttttttcgtgttctgagctaagtcctcccttacgctttgcagacaggaaaggactccaaatgagaagaatttgaagcacggacatgcctatcaagaaaattgtcactttgcattctgatatatggcatctaaatctgattcaaattgccgcaacaggaagctgggtatggaaaaaactgttcaagatagtgttgcagaagaaacatcagtttaatttttcttctgataaatacgggtccttttccatctggtcacctccagaatttgagctcctacttactgtatgtcgtacatataatatagtttatagtgaccaacaagttgctcatgactggccagcttttggactttgggggctttctgtccgttgacttttttctattgatttttataatattttatttagcttttcagtacataacaatctagagaggcttctctcagcgtgttttatagcttttagtttatttgtttactcaaaagtcagttgtccagatttttaaacgccaggtcaacatcttatggcttctggctaccagaaactattgaaacaaagctgagataaatattttgagacattcccaatgatggtctcaaaatgttttttttctttccctactactttatggcctactacagcgttgccgctgcaagcttgcaaccactcttaaatatttagggcttgattgattgttgtatggctaagtctggtccgtatctagtgagccc

SEQ ID NO: 2054 - DNA, 1724 bp, Zea mays
gctctatgccacttgcaaattgcaaagctcagaaacccaaaccagcaagggtacgaggtacccaaatgccaagttagatccagactccagagggaaggccggaagggggactgggggagggaaaagaataactgaggaagcgggcggtgcctgcctgggtgcgcgtcgtcgccagacgcgggcgcaatgccgcgcctccgcctccctctggtcctcctcctccccatagccctcaccatcatcctcctcatcctgttcccattttccccaagcccgcgctcgcccccgcctcagccactcccctgcggcgccgcgctctccgatgcggcggacggccggtgggtgccgaccccatcgcccgcaccgccgccactatattctccgtcctgccccttccaccgcaatgcctggaactgcctccgcaacggcaggccccagctcgcggcgctctcctgggcgcccgcccgctgcggcggcgccgtcgtgccgagggtcgacgccgcggggttcctggccgctgccagggggcgacggattgggctcgtgggggactcgctgtctgagaacctcgttgtcgcgctcctctgcgcgctccgctcggcggacgacggcgcccgcaagtggaagcggcgtggcgcgtggcgcggaggctacttccccaaggaggacgtcgtcgtcgcttaccaccgtgccgtcctgctcgccaaatacacgtggcttcctgtggagaattcagaagttaggaaggatggaataaaaggaacatacagagtggatgttgacattcctgctaatgattggataaacgtcaccaagttctatgatgttctaattttcaacactggacactggtgggatagatataaattcccaaaagacactccccttgttttctacaaagggggaaagccgattgaacctccacttgacatgcacaacggactgaaagtagtcctgaaaagtattgcttcttacatcgaaagggaggttcctaggaaaacactgaagctgtggcgcacgcagtcacctaggcacttctatggaggtgagtgggatcacaatggcagctgtgtatctgatagacgtcttgaagagcatgagctcaattcttggtttgatccccagtttgggggagtgaacaaagaagcgagaaccgtgaatttagcaattcaggaagccctggctggcacggaaatccagttgctcaacctcacttacatgagcgagttccgtgctgacgcccatccagctatctggctcggcaagaaggacgcggtggctgtctatggacaggactgcatgcattggtgcctgcctggcgtgccggacacttgggtcgacatcttggctgcacagatcatgcatcacttcaagcaggagaaaggctgatcacaatttctttaaatctgtagttttgcgataactacagcaactgtgctagaactttttagatttgtattttagggataacataacaaacattaaatagttttgcaaatattcattaggttaggtctcccataatgctatagtgatgcacaaaactaatgggcaccacaccgaacatcggaacatcccagtgctggagttttcaaataaggtcctctttaaatctgtagtgtttaaataagggtttggtagagtttctcttaattctgattcaccaaactaccaaagcatgttcttgccctgctataagttttacaggcatgaattagtgtcac

SEQ ID NO: 2055 - DNA, 948 bp, Zea mays
ttaacacattatgtgacattgacataaatatatttagatgacaaaaccaaaattcagctaatataagtatagctgccgactaccagaagcattcaaacaaaagtttcagaaggattggaggggcaacccaaagtccatggaagggtggcatcaaacaaacagcttgggtgtggacagctcaagatcttgttggagctgatcacacagtctagcatgaagggccatgacataacactccgcttgatgccgagcgctccctcctagactgatctgcgccgatcagcgtggtggtgtgctgccgtctatctgtctgtctggctctctcaaaggcataacactatgcctgcctgtcctcgatcgccttgtgtgtgtgtgtccttgtctgttccggcgtcgtcttccggccagcgcccatgtgcgccatcgctgtcctgtccccgcggtaaaaccgaacgcgcaagcacactcccagtcccggcagcaccaataaactcaacctcgccggcgggcagggcggggtgaagcaaagcagtagacgagagtttggaaagcgggaggtgaggaggcacgacgtaccgggacgaggaggcctagcaggggagatgcgatgcgaggagctggtgccatagtgggctactggtcactgccggcgcgttgtgcattgccctggtccccgcctccccggaccggaccccggccgccccctcccgcggtcccgcccggcctccgctccggactctcttgcatatgggactgtgagatgacccgccgcgcgccgcgtaaaaacctctgggcatcgagccacttccgggcgtggcagtggcactagggtcggtgcaggcacatcgggggagggcggctcggccagggctcagccgttgctgctcggtcgggacagagaggagcgaggcgagggaagggaggagaggtgaggggagagagaagagg

SEQ ID NO: 2056 - DNA, 1721 bp, Zea mays
ctttcttgagagaaaccgcataaggcccacgaccacagagcacggcggcatggctgcggagctcacgcagatcgttgtcgtgccgttcccagcgcagggccatgtcaccccgatgctgcacctggcgcgcgccatcgtggaccgcgggcacggcagcatctcggctaccgtcgccgtgcccgacttcatccaccgccgcatgggccagtactccgccgccggggtggccctcgtgtccataccctgcggagtagcggacgaagacggcagcgacgagccccccggacccgctatgttcctgcacgccatggagcaccgcatgccagcccagctggagggcatgctgcagtctgcacggcgcggcgtaggtgccggccgccgcgtctcgtgcctggttgtcgacctccttgcgtcgtgggcgatacccgtggccgcgcggttcggcctgcccgtcgtcggcttctgggtcgggatggtggccacgtaccgtaccgtggcggtcatcccggagcttatcgccaagggcttcgtctcggaatccggtaccctgctgccagcagacggaaccaagaacattggagatctcaacatattgccggcgaagttaaagctgagattcaaagatcttccatggctcctcgacagcgcgcttccccagaaatcaaggatctccttctggctccaggcactggaccgtgcgaagagcctgcgctgcatccttgtcaactccatctccaaggaaggcggcgccggcggcgactcacctgacgaccagcagcagtacgactacgaatatctgccgcaggaccagcagcaaataatgctccacgttgggcccttgctgttcaacgccgacgcctcaaagaagacggccaccatgtggcagcctgacaaaacctgcatggactggctagacaagcagagccccgggtcggtgatatacgtgtcgttcgggagctgggctgcgccgatccagcctgacaggataaggggcttcgcgcgtggcctggaggcgtctggccggccgttcctctgggttctcaagagccacccgtcgtggcgagctggcctcccggacggctacgcagagaaggtttccggccgcggcaagatcgtctcgtgggcgccgcaggaggacgttctgaaacacgaggcactgggctgctacgtcacgcactgcggctggaactcggtgctggaagctgtgcggcaaggggtccgcatgatctgctaccctgtctccgcagaccatttcgtcaactgcgcctacgttgttaacgtgtggaaggtcggggtggagctggccaccagtggacagggtgatgtgaaagactgcatcgagagagtcatggaaggcgacgatggacggcgtctgcagcggaaggtgaatgcgttgcgagaaacagtcacggcgggtgaggcaatgcgtgctgccaagaggaacctcaccttattcatggacagaatcaatggcagttagcgccagataaaggcataagaaaataggataatatataagtaactcgatctgccaaaatggttatgatggccccccatccttatattacaatacccttttcttcgagattcagttttagtttcaagttgatagtaatgactctgttttgcttccgatgtactagttcatttgtgtccccaaaagagaccaaaatgtttctgtcgtcaccttcatgaccagcaggctttataattcattgaac

SEQ ID NO: 2057 - DNA, 2010 bp, Zea mays
ggtaccaccacgtccaaaacgtttggagcccttttcctaatcttgctgctaccgcgcgctccctctccccggccatttctctcatttcgccctccctccgccggctagggttactgccaccgccttccacccctccccgactgcccgtgggtggaggaggctggttggcgtgcagggtacctcggcggcggagatggagccggacttctcgaccgtgggcgggcccagctttgagttcgctttcaacgaggccaacttctccgaccgggaattgcggatcgaggtcgtcgcgggggattacgacgcgccggggtccactggcggcggttccggaggaggtggcctcgccgactgggcgcgccatcggaagcgccgacgcgaggagctcttcaaggagaaagaatctacaacctacatgtcagaccaaactaattttaatgaagtcgaagcagaagagtgtgatgcatatgaagaaaatcaagaggaacctgtagcaatgatggaaggatctccacctgatgttgatcaagatggtgatgatgagcaaggtattgatccatcttgggctgctgtggttacgccggttttacgagtcaagacaatttatatcagttcggcgattcttgctgcgaagagtcctttctttttcaagcttttctcaaacggcatgaaagaatcggaccagagacatgcaacccttagaattactgactcagaggaaattgccctcatggagcttttaagctttatgtatagtggaaagttgacaactactgagcccactcttcttctggatatcttgatggctgccgacaaatttgaggttgtttcatgcatgaggtactgcagccagttgctcacaagcttgcagatgaccacagaatctgcacttctctacctagatctcccttgctcagtttcaatggcagctgcagttcaacctctgacagatgcagctaaggattttctcgctgtaaagtacaaggatttgattaagttccaagatgaagtgatgaacatccctcgtgctggaatcgaagccatcttgtcaagtaatgacctccaggtggcatctgaagataccatctatgacttcttactcagatgggcccgtgcacaatacccgaaatcagaagagagacgtgaggtccttagttctcggctgctccctcttgtgcgattcagtcatatgacgtgtaggaagctgcggaaggtcctagcctgcacagatatagaccacgagcaagcaaccaagtgtgtcaccgaggctcttctgttcaaagctgatgcaccacaccggcaacgagctcttgcagcggacgcaataacctgccggaaattcgccgagcgggcttacaagtacagaccactcaaagttgttgagtttgatcggccctacccacagtgcatagcatacttggatctcaagcgcgacgagtgctctcgactctttcctgcagggcggatatactcgcaagcgttccaccttgcagggcagggtttcttcctctcggctcactgtaacatggagcagcaaagcgcgttctactgcttcgggctcttcctggggatgcaagagaagggctccacgagtgtgacagtggactacgagttcgctgcaaggacgagaccatccggcgagtttgtgagcaagtacaagggtaactacacattcaccggtggaaaggctgttggatacaggaatctctttgcaatcccatggcagaagttcttggccgatgacagcctcttcttcgtggatgggatgctgcatctgagagccgagcttacgataaagcaaccctagagcaatggtctctgtatagtggtagttgttacgacagatgaaaaagatatcggatgggaaacctcacgagttccagttcgctgcaagtttccagatttgccggtatctcactgccaatgagcttgtttgcctccgtaacggcgcagggtgtataatggcttatttattcctagtatatacaaatacaagttgatgagatgcgt

SEQ ID NO: 2058 - DNA, 486 bp, Zea mays
atgcctgggtcgggctgcgccgggagcgtccatgcctgggtcgggctgcgcgggatgccggggccacgggacgaggtcgcgcgcaaggggcgggccgccatggccggcgagtgcgagagagagggagggggcgcggctgagccaaggaagaagaagggggcgggggaagaagaaggagaggggctcaccgcgggaggtcggacggcgggcggcgacgggcgagccagggcggtagcaggggagctgcgcgaggtaggagagagaggagatcgtgcatgggggttaggggagggagagagaggggcggttttggggggcgcctggcgggtgggccgcacacggcagggcggcggcggcggcctaaccgcccgcgcagggcgcggcgtgcgcgcggggggcggctgggctgcgagtggggcgcggggcaggccgcggctgggccgccgagctggcccaactgcccaaggcggggagggggtgagctag

SEQ ID NO: 2059 - DNA, 1932 bp, Zea mays
ctaattaagaatggagtgtgggcgcctggcgcggccatgcccccgcctccgcctcccgtgcgcgatgccccaacggccccacaccgacccagagaaagtgccagcggtcaccagaaggtgcgcttccgccggaagcgcctggccgttgcgaggaggccaacgccgaggcacctggcccacacgcccacctccatcgcccaccgcaccgtctccatctcgacctcctgctcctcctcctctgtatccccgaccacctcccaccccgtcgtcgtcgcactcacagcggcaccagccatagaggcctgtggtgacgtcctccttcggtatcccctccagccgggtggctccgcaccgcatccggccccggccccggccggccgcgcgggccctgtcccgcatcagcacgccgccctccgcgagcaccaccacatccgccacgcacacctccggcgaggccagcgcctggcggcactccacgtgccaccccgccccccgcgtcgagcggagaagacgccctccaccgcggcctcctccccggcggcggcgagcacctcgaatcacgcgctcgcgtacgcgtcggtggcgacccggcggagcgtgaccttggcgggcacgcctggcgggagcgtgcgactgtttagccccagcgtcgcgcccccgatggtcgggtggtaggccagcgtgagctccgcgggcgtcgtggcggagcaggaggagactggagaggcaaaggtagaaagcatggatgtcgaggcgcgcgggacgggggcgggcggaggaagccgccctctatcgccgtggcacggcacatcgcagaaaccggtcgctgaacctgcatcgtcttgctgctgctcggatgctgtcctcgtggtcaccgaagggcaaagcagcttgtgctactgggatcttttgctaataaaagcggagcgcgggggcgataagcgtcgggcagtggcggagggcgaaccaaaattaaggtgttgctactgcaacacgaaatagaaaaaagtcacacaaacttttggtggagattagacaaaaaatcagtattcatttggatttggttctgtgagctaaaagaaacatgttcaacacagttttcaccatgcatgcccacctgcagaaatgcagaatcaatttcaacatgctctctaccctgcttacccaccagaataactctttcagtaatccaaaggaaatcaaggagctggagcgttaagaattagtatggaccggaggagcgttaagaattagtatggactggagttcatccaaacaacaagcatgacgctggatgggcaattatgaagttattattataattatatgagcatgcctaacattggatgccaattactagccaaactagccatcaacactacaattgcaagacgaacgagtcacctagagaccatacccactgctttccgaatcacgattcacgaatcactcgaaaaaggacatcccagaggccagagcaagagatctctagatactgttgcgattttgacgggcgacggcgacgagtacctggcgagcgcaagcacacaggcaggaagctccctagctccaggtggaacaactgctcggcattgttgtgcgtcagccacaagcggtgggagactggaggcgaacgggggcacgaccgcccgagacgacagagttggcggagtggcagaggctcggcgtcggcagcttgctcgacactcattggatgtgtggtcgcgtggaacagggtagagttagctagggattagatttttttcactgttgatctcttctcgggctgaatcaaggtattgcttgagcaacaccgagctatagtgagtcctccgcccctggtgtcgggtcgtccgatggttttccgcgtggcgcccggggttttcttttcgtggctgaatcggccgaaactgagcacacggtttggtttgc

SEQ ID NO: 2060 - DNA, 3303 bp, Zea mays
gcagcgatatggatcgaaacgaaccaaaccaaccaactcgccaccctcccaagccgcgcgcagccccaaccccaccgccggcgccgactaggcaggcagagcgaaccacgccagccatgtcgtcgtcgtcgtcgttcaaagcgggggagtcgtctcgcgcccgcgaggaactgaatcgcaaatacgaggtcaagttccagcccggcccgtgggcggcactctcttccatcgccgtcgtcctcgacgactccgccggaaacgaggagcgagcaaagctgctcgcgcccggcgcctccgacttccttctcgacctccggcccccgctggacggcgcctcctacctggtcctgcccaagcgcctggtccaggactcgaagtggttcagctttccctgcgtcatctccgcctgctccgaccgcctcctcttcctcgttagccgcggcgaccaagacaggaactacgcctacttcctcggtgacgcccacgccggcactgccgccctcctccccgacgtccccgcccacctcggcgtcgaaactaatttcccgcgacgcagcatcggcctcatcgccgacccgcgacacggtggccactacatggtggcccatctgtatcccacctccacgacccgccaccagaccctgctctgctactccaccgtcaccgaccagtggaccgccaggccgctggtctccgccccggaccacccgccttggggcgctcacggcgtcctcgcccacggcggcctcctctggtggatcgacgtcgcctacggcatgctcgtctgcaaccctttcgctgccgacgacggcctgcgcctgcgcttcatcccgctcccgcttggctgccagatgaaggccctcaccgggcgcgcccgcctcttcctcgaagacatgatggaccgccgacgcatcatcaggctcagccagggcaagctgcgctacgtcgcgatccaggtccagcgaatccccaaggatcaggccacggtctgcatgttcacgcttgtcctcaggcaggggggccagcattcctgggaacacgagtacacggtgaccttcgccgacatatggagccaccgcagctatgccgatgccagactgccgtcgggcgtggtgccctcgctcgccttcgtcgaccccaacaaccccaacatcctctacttcttcctggacaagacgctcttcgcactggacgcacaagccaggcaggtcctgcaccacatggagtactcgttagaccccgattattacgggcaactcagggtccggtactcctgcttcgttgatgcctgggtgctgccgccaacgcttctccgcaagggtgacagccggtggacttatgacgacgacgaaggaacggatggatctgatttcgaccaaacaacatctctgttgtccctgatggaaatcaagagccagttagacgacgaaggaacggatggatctgatttcgaccaaacaacatctctgttgtccctgatggaaatcaagagccagttagacgacgaaggaacggatggatctgatttcgaccaaacaacatctctgttgtcccagatggaaatcaagagccagtcagacagggagcagacgacggctgccgatgtggcagctgccgactccgatgtggcagctgccgactccgatgaacaagctaacagggagcagacgaaggctgccgatgtcccagctgccgactccggtgaacaagctaacagggagcagatgacggctgccgatgtaccaactgccgactccgatgaacaagatgaccaagctgccgactgcgatgaacaagctaacagggagcagacgacggctgccgactccggtgaacaagatgtcccagctgccgactccggtgaacaagatatcccagctgccgactccggtgatcaagatgtcccagctgccgattccggtgaacaagctaatagggagcagaccacggctgccgttgtaccagctgccgactccggtgaacaagatgtcccagctgcagactccggtgaacaagatctcccagctgccgactctggtgaacaagatatccctgctgccgactctggtgaacaagatgtcccagctcccgattccggtgaacaagctaagagggagcagaccacggctgccgatgtcccagatgtcgactccggtgaacatgatgtcccagctgccgactccggtgaacaagctaacatggagcaaaccacggctgccgatgtcccagctgccgactccggtgaacaagatatcccaggcttcccagctgccgtctccggtgaacaagctaacagggagcagaccacggctgccgatatcccagctgccgactccggtgaacaagatatcctagctgccgactccggtgaacaagctaacagggagcagaccacgactgtcgatgtcccacctgccgactccggtgaacaagatgtcctagctgcctactccgatgaacaagatatccgagctgccgatttcggtgaacaagctaacagagagcagacgatggctgtcgatgtcccagctgccgactctggtgaacaagctaacagggagcagacgacggctgccgatgtcctagccgccgactccgatgaagaagctgatgttgaaccatagatatgcagcttccctagttggagatcgaggtgctgcgctcgtctcgtggctgctgtctgagaaaacattttgaaccatagatacgctagctagctaataatcgaaatagaattcaattttggttcaatcacaattaggactaggacaacagtccaggagcggttcctgtcctgccctgttgtgcatgcttctctgttacatatgccggctgccagtagttgtaatattcatactgtagtattcctggtttgtagcaatagaacaacaaagctgatctacacacataggaagccaagtgctgcattttcgcattccaaaagagaccaaatagttggtatcatccatgatccatcgtacaccattttctagaatagaataggatgatgacagggcacacaaaccaggaggcgcatcgcttacaaaacaatttacaatacacagctgcatggcaaagctcttctctgcgccaaggctttggcagtcacgacacagcaacaccaacgctccacaagacggtcctttttcgtgaacccaaagttgtcgcagcgatgagaaatcacagtccggatcgctcggcagcgtgggaggccgacgaggcagtagggcggttgccagaccggctgtgcagcaaggggttcagagccttgacgacgatgctcatgttgggacggaattcacc

SEQ ID NO: 2061 - DNA, 2493 bp, Zea mays
ggagcaagaacacccagcccactgcccacgccgtgctggaagtggtccgtgctccggcagcggcggcgggaggaagagggaagcgaggggatggcgcagccgagcaaggagccgtgcaagaaggaggcgtgcgacatccaggcctgcctctccaagaacatgttcgactccaggaagtgtgtgagagttattcagttacttcagtcatgttgtgagcagtgtgagtacaaatcaacacactgtggttccttgtccggattactcaagaacatttctaagtgaggaacaataccgacatactttactgcagccattgaataaaagtttcttttaggttagtttagtactttatggggctcacggcaatctctcttacggatcaaggtatcgtataatatggcagttcatgttcatgtttcgttgttttactggtcaccttaacctaccgtaccaggttccagtttcgatgctatttaagaatgtttcttcttcaaacatgattcgcggggcttcaataatgcagacacccctcaacctgcagaatgatgctctggtcgctgagttgtatggtaccgagtggaaacagcaaagtggtttgttaatgatcgattttaatgcctgtatacctatggtatccttcgtagttcgtgtgctcttctacacatgtaaccccatgttcccgtcttgaaccgcaaaataagtgaaccccatgcacatggagatattttggtgaccccaaagttgtgtataccatttcattgctttaccctaccatgttctgtggcaagagaatcaaatctggataaacatctgggatgataatttatctcttgggcaagaacttgtgatgtaagatatgattcaaataaacaactttgtggggtcatttcagtatcacagttggcaaaaaaaaatggcaggtccaggtttctgggaaataccagttgaagcaattcagtttttgtgttgtactgccacgtacatgcgttgtctaagccaacaaaccttttggcttttgcttgtgaaatgaaacttgtgtgttctgtgtgatgcaatacctaccactagcaggcaagtgtataagctggtatgcatgcgatggcttgaagctgacacgctcagtacattctctacaactaattcttgttgtctacttgggaccaaccagttggttggtgtgtcgtctaccgccacggctgcactccacatgtcccttctttatcatgttgctcatcttcgatagatgtcatgattcagtgaattaagcatttatatttgagaaaggggaccggttttatgaataaaaaaaatgacaggattgtatatttgtatacgcaaaccgctttaattcttctttagacgggctagcgacatctaaacggccgaaagcagcagcagaaaaaggtgtgactaggagtccatattttgaatttgggaaatgcggatcctccccccttttttttgtcattttcgcaactgtagcagagtcagatattcttaatttgtgcacagttcactacttcactctaacagttgtgtcttcacttgagctgatgatgttgagttggagttgagcagattacacagcacgctttgcaaggcggcattctaacgagttgtgtagctttggaaaaagctaaggaacttgacaaaggatgcaaaaatgtgactgattttacaaataatattgttcaatgcagaattctggtagctgccctccctgatttcagtaacatgttgcagctcgtcaaagtttaagcaaaacccaaggcataaccagactctcgacagtgactcaggtacacaagagaaacttgtaagagaaatagaacatgaaacagcaagttcttggtcctgtgctaccgagacgagagaagcatgcgtgtattgatcacctccgtatatacacctgacacatcatcatgcactactcatcaaaggcttgattttttttcagctgcgtcagatgggcggcgccttccgcgacggggcggcgccggacttgtgcgccaggaagagcttcttgagcagcctgagcatcatgaggaggcccatcctccgccggcggacgacggcgtgcttgcgcgtctccaaggcgccgtcgagccagggctccctcgcggccgcccacgacggcgtccccctggtgagcgggcagggctgcgcggcccgtgcgagctcctcgttgaagtcctcccacagcatgtccatcttgtcctccaccgcgaacctcgccgagccgtggcggccacccagctgctgctggtcgccgcccgcggcttgctgctccacggccgagacgctcctccggtggtcgtgctcgtgcactgccgccgtgccaacaacgccgccgggaacgagcagccacggcgacgcggaggcggagaagtcggcgttgcattgctcgagtgggaagctggggaatgcgaactcttccattgcaaatctctttctctctctctaggtctgagctgtgagctctgactctattgt

SEQ ID NO: 2062 - DNA, 687 bp, Zea mays
atgggcgcgcccgcctcggccgcccggcctcggccccggctccggccgccccggcctcgcccgcgcccggtcgcccccggccgcccccacgctcggccgcccgctcggccgtccccggcccggccgcccccggctcggcgagctcggccgcctccggcgaaatcggccccagccccggccgccttcggctcggccgccttcggccgcccgggccgccccgcccccgtcgggcccggcctcgcccgtgcccgccctccccgggccgctttccggcgagctcggctcggctgcccggcctcggccgcctcgccccgcccggccctccggcgagctcgcgccgaccccgccccgaccccggcctcggccaccccgcccccgtcgcgtgcagggacccggcgcgtctcgctccggcgagcccgcccctcgccacgccccggctgccccggctcgaccgcccccgcgcgagccccgctcggccaccccatgccccggctcggccgtcccgccgcgcccgcgcccggctcaggccgcgcccgcctcggccccgcgcgtcccggccgagaccgtgccccccgccccgaccgtgccccgtgctcgcccgctcgccccgccgtgccttgctcgcgtcgtgacggccccgacgtggcctcgagctcggcccagcgtgcctttagcgcgcggctttga

SEQ ID NO: 2063 - DNA, 2190 bp, Zea mays
ggcaccaagggggaaaaaggaaagagtattggcgcaaaccttgggcttgctggagcaatccccaaagccgggttagcagcaggagcgacgagcccaaaccttcctacccctcgtcgtcctcggctaatccgccgcgcctccgatactcccaaggcagcgcccgccagctgcaacaacagcatcagcaagcgaggagtagccaccagcccaccacgatctcatcagactcctctcaaatcctcccgcccactctccatttccctcccctcccccgccaccctgcaatggccggtctcctccacctccagtccacgcttctcccatcggcgtccgcgctccgccgccgtgcaggcgtgccggtgccatcctcgtcccgccgccgatgccggattgaggccaagatccgggaaatcttcatgccagcgctcagctccaccatgaccgagggcaagatcgtctcctggaccgccgctgagggcgaccgccttgccaagggcgaccccgtcgtcgtcgtcgagtccgacaaggccgacatggacgtcgagaccttctacgacggcttcctcgccgccgtcctcgtgcccgctggcgactcagcgcccgtcggctccgccatcgcgctgcttgccgagtcagaggaggacatcccagtggcccagtcacaggctgcctccttctcctccacgtcccccttaccgtcgcctccgcaagaaactgctgctcaagaagcatccccttccccgccgccacctcctcccccagggccggtgtcagtctctgctcccacgccgcctttgccagcaacacaaggcgagcgtgtggttgcttcaccctacgccaagaagctcgccaaggacctcggcgttgatcttttctcagtcacggggtcaggcccctgtgggcgaattgtggccaaggatgtcgaggctgcgcttgctgcgcccaagaaggccgcaccagtgactgctccacggccggatgtgccattggggtcgacggtaccattcacgacaatgcagggtgctgtcagcaagaacatggtggagagccttgccatcccgacattcagggtcggatacaccatcacaactgatgctcttgatcagctctacaaaaaaattaagtcgaagggggttacaatgacagcactgttggctaaggcgacagcaatggcgctggttcagcatcctgtggtgaactccagctgcagggatgggaagagcttcacctacagcagtagtatcaacattgccgtggcagtggccatagatggtgggttgattacaccagttcttcaagatgctgataagcttgacatttattcattgtcaaggaaatggaaagagttagttgataaggcgcgagcaaagcagttgcagccccatgagtacaactctggcacgtttactctctcgaatcttggtatgtttggagttgataggtttgatgcaatactgccacctggaactggagcaatcatggccgtcggggcatcagaacccaccattgttggtacaaaagatggtagaattgggatcaagaatcaaatgcaggtaaatgttaccgccgatcatcgggttatttatggagctgaccttgctgcttttctgcaaacacttgccaagataattgaggatcccaaggatcttacattctgaatgtcccaactgattgtttttccctgaggcaatcaaaaccgggtgcttcttacctatcagtagatgtgtagtttgtcttctgtttatgtgattaggtgttttaagctgtcaccaatgtcagcatcaggtaaattttccctgttggttaccttattatcatcggtttgtgtttcaataaaattcttttttttgtcttgcttaactaaaataggtgtatctaccatttttactggacgtttcatggatagtggattttgttgagctcctcaatgtaccgtatccttgtgggatacaaagaatgaaatgtaccttgtaccaccctgtggttgatttctcatgcttgtcaaacagaaatatggttgacgctcttgcaagggtgctgacgctatatcttcagggagatctgtaaaaacgggtcacatatctgtttgttttacatgtgaaggagacggatcatggtttctccaaaccactccaatatgccaaggctgtagggtatcggatatcctgacctgctgttgtacattcctgg

SEQ ID NO: 2064 - DNA, 97 bp, Zea mays
attgacagaagagagtgagcacacggcgcgacgaacgacatagcatgtatgccgtcctcgccgcgtgctcacttctctttctgtcagcctctttctc

SEQ ID NO: 2065 - DNA, 2020 bp, Zea mays
tgttttttgaaattccgtcttgcgcagcggtttcaaaacccaccccagtaccccaccccacccacaacggctggggcgtggcttcacttcacgttgagcatcctctctttccttttttccccaaactccaaaatccaatccaagcaactcctccccatgctcctcccgctcctcctcgccgccttcctccatggcttggcggaggcgcagggcggcctcccgtcgctgccgatcggggtgaactacggcgcgaacgcagacaacctaccctcgcccgccgccgtggcggcgttcctgaccaagagcacgaccatcgaccgcgtgaagctgttcgacgcgaacccggccttcctcgacgcgttcgccgccaacgcgccctccatcgccctcgccgtctccatccccaactccgccctcccgtccttcgccgacagatccacgggcctggacgcggcgcgcgggtgggtccgcgacaacctgtccccgcacgtgtccgcgggcgccaacatcaccctcctcatggcggggaacgaggtgctgggccccaccgtggtgcccgacctcgtcgtggcgctgctcccggccatgcgccgcctgtaccaggcgctgcagctggagggcctgcccaaggtccgcgtcaccacgccgcactacctcggcatcctggcgccctcggacgggatcccctccaacgcgagcttccgcccggggctggacgccaaggtgctggcgcccatgctcaggttccacaacgacaccggctcccccttcatggtgaacgcctacccctacttcagctacaacgccgccacgctggactacgcggtgttccgccccaacgccggcgtgtacgacccggcgacgcggctcaactacaccagcatgttcgacgcgcagatggacgccatccacacggcgatgaagaagctcgggtacggcggcgtgcagatcgcggtgggcgaggccgggtggcccaccaaggcggaggccgggcaggtcggcgtaggccccgaggaggccagggatttcaacgccggcatgatccgggtgtgcagcggcgggaagggcacgccgctgatgcctgggaggacgttcgagacgtacgtcttctcgctgttcgacgagaaccagaagcccgggccggtcgcggagcggaacttcggcatcttcaacacggatctcacacccaaatacgacctggggctgctccgccaaggaccgcagtctggatctccaaccccatctccggagccctcgccgtcggtcggcggaggcaagtggtgcgtggccaagtccggcgcgagcgcaaccgacctgcagaacaacattaactacgcctgtgcctacgtcgactgtaggccgatccagagcggcggcgcgtgcttggaccccaacaacatccactcacatgcctcgtacgtcatgaacgcgtactaccaggccaatggcatgcacgactatgactgcgacttcaagggcaccggcgtggtcacctccagtgaccccagttacgggagctgcaaatacaacgcctcctcctgacggcgcgcagcaagtccagctggcactactgcaccagcctccagtccacatcgtcctccagctccaggctccagccatggccacgctggggacgggaggaggtccgtactgccgccgggcttgcgccacatacttgtatactcatgtctcacacccatgcttcttgttgctctcaaccactactagcactactatttgtctagttccataattacaagtccctctcccctcatgttaacttgatcattgtccgtgtgtagtggactagtggtggtgaataaaatagcttccattccatgtagacaaacaaacaaattgtaacatctgttatccttgggttatttgatatatttatttttcatatagtacacatgttcagtctcgatatttattcacaaaaaggttgacttttttttaaacaaatgcattataaatactcacgagcatttaaaactagcccacaagatagatacatgtc

SEQ ID NO: 2066 - DNA, 2103 bp, Zea mays
ccacatgtaaggaatcttgtgggacctacacgtcagtcgacgacaacaatcacagaaacgaagcaggtggacccaatatcgtaatgtcgtgttaactattttatgtattagttttgaaagtctgcttttcgcttggttcaaaatggtgtgttgattgtggacatgctagcattagcttatatgtgatataggcgaacctacgttatggggagtgagggcacaattttcttgttttagtggatattttattttatttattgtagctagaaaggttcagaagtcgctagaccttcatttagatccccactcatatattgggcctcactcaacctttggctgcccctaatctagatcacttatgatatcaacaagagataagcatattttcgaaatttaaattttaataaacctgaccaacatttatttgcaaacccatttgatccacgatcgtaaaagatggacgaaattcggcagtccacgaagcggcgagccaacagcactcatctcccgaaatttcccatcccagcccatcttaccaaaacgcccctcgccgccacctgtcaggcattcgaaaatgctctctctatccccaaacgaacaacgccgcctcaacctctcttgtccttcctctcccgccgctcggctcgccgccgaaacatttccgccctgaattttcaaatcccccggcaaaatcgaaaattttcccaatcttccatagcacggcgcgccccctgttttctccctctgcccacccttatccgttcttcgcgcgctcgcgcctccttcccttgcaagcccgcgcggctgcgccaactccgtcccaattcaaaatctgcactctaattcccaccattcctataaatcccccgcctccctgctctcctccctaaatcacacaactttcgcccaattccccactagcaaccgtccccacaatcctccgacgatgcctgccgcgccgacgctgttgcccccgtgcgacgcggaggagccgctgctggcggagtcctccgaccgcttctccatgttcccgatccgtttcccgcagatctgggagttctacaagaaggcggtggcctccttctggacggcggaggaggttgacctctctgccgacgcccggcactgggacgaggcgctgtcccccgacgagcggcacttcatctcccacgtgctcgccttcttcgctgcctccgacggcatcgtgctcgagaacctcgcttcccgcttcatgaccgacgtgcaggtcgccgaggcgcgggccttctacggcttccagatcgccatcgagaacatccactcggagatgtattcgctgctgctcgagacctacatccgcgaccacgtcgagaaggaccgcctgttccgcgccatcgacaccgtgcccgcggtccggcgcaaggctgactgggccatgcgctggatcgacggcggggagcgcttcgctgagcgcatcgttgccttcgcctgcgtcgagggcatattcttctcggggtccttctgcgccatcttctggctcaagaagcgcgggctcatgccgggcctcaccttctccaacgagctcatctcccgcgatgagggcctccactgtgatttcgcctgcctcctctacgagcttctccgcaacaagctcgacgaggcccgcgtacgcgagatcgtcgcagacgctgtcgacatcgagcgcgagttcgtctgcgacgccctccctgtcgcgctcgtcggcatgaacggggatctcatgagccagtacattgaattcgtggccgaccgcctgctcatggcgctcgggtgcaagaagatgtacaacgtgaccaatcccttcgactggatggagctcatctcgctgatggggaagaccaacttcttcgagaagcgcgtgggtgactaccagaaggcatccgtcatgaacagcctcaacggcggcggcgctgccgaccacgtcttcagcatcgacgaggacttctgagttggcacgcgtaatctatggtgtcggtttaatgttagtatttgcttgtagtttgtaagcgtgatacatgtactctgagccgcttgatgcaatgatgctgtttcattttctgtgttactggttctcccaatacacca

SEQ ID NO: 2067 - DNA, 3893 bp, Zea mays
acgctggaattcaattcattcaaatgccaggcccgggaccgggagcaacaatgacagccggtagcagcggttggcgtgctcgtcgtcgcccacatgcgggcctccagccactactagataacttgcgataagtgtcaaagatttttctctgattacttcatctctccccgtgaagaaaacgttgggtaataagggaagcgggcaagaaccagaggaagagagagcgcacccgcgtgtggatgtggaggctgctcgccgctcggcccgtcgtccccgtcgccagtgcttccgcttcgcctctgtgtcttccatgattcgagaagcaaagccatgtctcccctgctcctcgggttcctcggcttactcctcgtcgcaggtgagttggtggttgtgcccaccggtgcgcagaacagcgacggtggcgacgacgacaaggaggtgctggtggagctcaagcacttcctgcaggacaacaacaaggtgaaccgcggcgcctacgacgcgtggcaggagtccgacgcgtcgccgtgcgaatggcacggggtgcagtgcgacacggccgaccgcgtcacggcgctggacctgtccggctcgagcatctccggcccggcgttcggcaacttctcgcggctgcccgcgctcgccaggctcgacctctctgacaacaccatctgcgccgcgggcgacatcggccaatgcctcggcctcgtgcacctcaacctctcccacaacctcatcaacggctcgctggacctgtccggcctcaccaggctgcagacactcgacgtgtcggggaaccggctgtcgggcggcgtcgcggccaacttcacggcgatgtgcgccgacctggccgtcttcaacgcctccaccaacgggctcacgggcaatatcaccggcatgttcgacggctgcgccaggctccagtacgtcgacctcagctcgaacaacttcaccggcgagctgtggcccggcgttacgaggttcacgcagttcagcgcagccgagaacaatctcaccgggagcgtaccgccgaccacgttccccgacggctgcaagctcgagtcattggacctgtcagcaaattacctcactggaagcttcccggactccatcgccaagtgcgcgaacctgacgtacctatcactctgggggaatgtcttcaacggcttcataccggccggaattgggaagcttcccgtgctcgagacgctggttctaggcaagaacagcttcgatcgccggataccgtcggcgctgacgaactgtacgaagcttcagttcttggacatcagcagcaacatgtttggaggggacgtacaagacacctttggcaggcttgcgagtctgaggtaccttgtgctgcaccacaacaactacactggcggcatcgtcacctccggcgtgctccagctaccgctgctcgcgaggctggacctcagcttcaacgagttctccggcgagctccctcccgaggtggctgacatgaagagcctcaagtacctgatgcttgcctacaaccaattctccagcgggataccgccggcgtacggccgtctcaccgagctccaagcgctggacttgtcgtataacgagctctccggccggataccggcgaccatagggaacctcacgtcgcttttgtggctgatgctcgctgggaatcagctatccggagagattccgtcggaaatcggcaaatgcgccagcttgctctggttgaacctggccgacaacaacctgaccgggaacatcccaccggagatggcaaacatagggaggaaccccggcccgacgttcgccaagaaccggaatggttcaagcgtgctcgccggctccggcgactgtcaagccatgaggcggtggatcccggcgagctaccctccgttcagcttcgtgtactccatcatgactcgggagaactgccgcagcatatgggaccgaatcctcaagggatacggcatcgttccggtctgcaccaacccttcgtcgccggtgaggtcctacacgatctccgggtacgtgcagctgtccaggaaccagctgtcaggagatatacctccggagatcggcgcgatggtgaacctgagcctgctccacctcgacggcaaccggctcaccggaatgctgccagcggagatcagcaggctcccgctcgtcgtgctgaacgtctcgagaaacaacatctcaggcgcgatcccgtcggagatcggccgcatcctgtgcctcgagatgatggacctgtcctacaacaacttctccggcgagctgccggggactctgagccagctcacggacctgaccaagttcaacgtgtcgtacaacccacttctcacaggcagcgtccccaccaccgcccaattcggcaccttcgacgagcgatccttcctcggcgacccactcatctcattcgggacgggcaccggtaagcagccacctccggaagctgcgggacctcgaaggtccggcatgagtccaagaagcatcgcggtgtggttcctgttctccctcctcgccgccttcgtcaccggggccttggtgttcttcatggccaacctgcgtgcgcggttccccgtggagcaagacccggaccccgagtcgttctcgtttgagaaccccaagtgcagctccaggaagtgctccttgcagatgtcgacgccgtccgggtcatcgtcgtcggcgaccgggtgctcctcctcctcctcctcctcgacagagggcgtgaaggtgttccagctcggcagtaccgcgttcacctaccgcgacgtggtggcggccacggggaacttctcggagcacctggtgatcgggcgcggcggctccggcgtggtgtaccgcggcgtgctccccgacgggcgcaccgtggcggtgaagaagctcgcgaggccgcgcgacgacggcgacggcgacggcgactgcgagcgcgagttccgcgccgagatggaggtgctcgccgaccggatggggtcgtcgtggccgcacccgaacctggtgacgctgtacgggtggtgcctgtccgggtcgggcaaggtcctggtgtacgagcacctggacggcggcagcctggagtcgctggtcggcgacacggcggcgttcgggtgggggcggcggctggaggcggcggtcggcgtggcgcgcgcgctggtgttcctgcaccacgagtgccggcccgcggtggtgcaccgcgacgtgaaggccagcaacgtgctgctggaccgggacgggcgcgccagggtgacggacttcgggctggcccgcgtggtccgccccggcgacacgcacgtgagcacggtggtggccgggaccgtcgggtacgtggcccccgagtacgggcagacgtggcgcgccacgaccaagggcgacgtgtacagctacggcgtgctgctgatggagctcgccacgggccggcgcgccgtggacggcgccgaggacgagtgcctggtggagtgggcccggcggatggccagagaagggtggagttcggcgggcgccgtcgtcggcaccgtgtcctgggagctcctgatgctcggcatgcggtgcacggcggacgcgccgcaggagcgccccgacatgccggacgtgctcgccgcgctgctggacgtgggcgagcacggcggcacgcggctcgaattcacgtgacagacaatttttgttccacgttcctcttgtttgctcacgtgtatctggtttgtttttaggtgttggagtatattagttcgccattgattcataatgtggataacagaggtaggagaggcctaggtagatggaatcttgcagtagcagtacataggataaagaagacacgttcgttgtacattctcatcatgcaaacgtagcacaacttgttgattttacggcttccgtgcagttgcaaagtggcagcgtccctttcc

SEQ ID NO: 2068 - DNA, 586 bp, Zea mays
atgccccgcttcgctccgtcgacggaaggtggtcgatgcaatcatgggtcgcggacgcccccgccatcaacgcccctttcctcgcaatccccttccattgttgcttccagatgaagtcgacaacacggtaaagaaggggccacgccatccatggtgaaaagatccgatgacagtgccgcgagccgccccttctcaagatcgaactggagccaccctgctgctcaagaaggccaatacaaggacggctgcgacgggtgcggtgccgtgtcacagggcgagggaggtcgaacgctctcgtgaacgaggtccggacaccgaagaagccaacaaaggatctggcgtcggccgcgaagcagatcccggtgccaaaggcgacattgagtgtgcgcgcccacagcgtggccttctccatcatggagatccgccaggccgtcctcgggctgtggcggcggctggtggcgtaggctgaggcgccggtgccagcggcatatgaccttcggtccgtcgaataggagctcgacatcggcgccgaggctgggcggagtcctgtcaagcacaaggaggaggtcaagctgcatgataggta

SEQ ID NO: 2069 - DNA, 726 bp, Zea mays
atggccggagctccactgcaccgcgcccagctccctctgctcgggttcaagctcctgcgcacttctcctgctccagctcgccatggcgcgccagccctcaacgccgagcacctcccagccgaggtccttttcctgcgtgcgcagtctctttcctcccccaagcgccctcgcttcctcccatggctgctgcgcgcgctcggctgcagaccgccggtcgagctccctccaacagcgccgtcgttctgcgcactggccttgccaatttctgtccatgcctccacactctgcttcgaccagacatcacgcctgtcagtctgtgatcgccatggctacagcgttactctggtcgtcatggagactcctctagcgccgtgcagcagtgcgcccttaccaaactcgtggtcacggtctcgccttgctgccgcagccgcgcctactgccgcgcacgacctgctcccttgtgcgcgctctgcttccttgccgagctcgtccctgcgcgccgaggtcgcgcgcagctctcccagctcgttggtgttcccagctcgccctgtctgcgcgccgtgctcccttgtcgtggctttctgcttcctcgtcgtgcgtgtagtattccgttgttcctgcgcgtgcttcggcgaaggtccctgttcaattctcctctatcgtgttgtcgtgcgcgcgaaactgctcgcagtcgacatcgtgtccgtaacacgcgcgctggacacg

SEQ ID NO: 2070 - DNA, 468 bp, Zea mays
ctccttcgccatgccgcagccaccacctccggcgactggagcctgacctaaatgcgatggacgacctcaatcccacgccgccagtggatttggagcgctggccctcaccgtcgcggagcggtggcacaaggcggtggatatgcaaccgctcccccaatccccgccggcatttagcgcccctccctcgctcatccacgcgcacgtagccgctgcgtcgtcgaccccgaccgccgtcgcaagtccggtcgcgtcggtgctcatggacttgccatggtaggcgagatctgcggccatggtaggcgagatccatggtaggcgagatctgcggccccttccatggtcaaagggccgttggggctggatttcgccgtcgcaacaccgaactactgggtgcacaagggcattgccttcatctgcgagatcagcaaatggaaccagcgaaacagataaaggtcatgaaaggattct

SEQ ID NO: 2071 - DNA, 2077 bp, Zea mays
agctcggcagcagggcaagcagcgggcgatgaccccccccccccccccccccctctcccaaaacagaggtcaagcgggagggcattttcttaatgacgggggcttacgcgattaatattgacagggacagacatgttctcttgcgagacccacttggcagtattattgaaaccggccgcgcacctactccctgccttcacgcggccaccggcttattcaagagcaccaaaaggggtttcggcatggatggatagcacacagcgagcgagcgagagcggtgagcccggccaccagcgccggaggccgtcgtcgtcttactagccgacgctcgacttgggcatgaattgctagccgcgcgggtgagagattgctaggtagccagctaggtacggtgtggggagttgaatcggaggtctgccgctcgaggcggcggcggcagaaggccggtaggatgaagaagctccactggctggtgcggttcctgttcgggccggtgccggtctacttctcggcgctggccatcctcatcgtgctcaccaacgcgcagtacttcgggctggtgggcgtcggcgtggcgccgcgcaccgcgaagctggcctcctcggcgcccgtggtcagcgtcatgaagtactgcgacatcttccgcggcgagtgggtgccggacgcggaggcgccctactacaaccacaagacgtgccacatgatccaggagcaccagaactgcctcaagtacggccgccccgacctgggcttcctcaagtggcggtggcggccctccggatgcgagctgccgcgcttcgacccgctgcagttcctgcagttcgcccgcgggaagtcgctggccttcgtcggggactcgctggcgcggaaccacatgcagtcgctgctctgcctcctgtcccaggtggcgtatcccaaggacctgtcggcgaacccgtcggaccagaacaaggtgtaccactaccgggcgtacaacttcaccatcagcatgttctggtcgccgttcctggtgcgcgcccgggagcccgaccacgacggccccgcgcacacgggccactggagcctctacctggacgagcccgacgacaagtgggtgtcccagatgccccgcttcgactacgtgctggtgtcggcggccaactggttctcccgcccctccctcttctacgagcggcggcgcctcgtcgggtgcagcttctgcagccgccagtacggcgtgcccgacctgacgctctactactcgcagcgccgcgcgtggcgcgtggcgctgcgcgccatcaacgacctggagcgcctgcgagggcgcgtcatcgtgcgcatgctctccccgatgtcgcacttcgagaacgggacctgggaccacggcggcgactgcaggcgcacgcagccgctgcgggcgaaccagaccgccatggagggccgcgacctgcacttctacaccgcgcagatggaggagttccgcgccgcggagaaggccgccgccgagaaggggcggcgcctgatgctcatggacgccacggcggcgatgctgatgcggcccgacggccaccccagccgctacgggcactggcccaacgagaaggtgcagctctacaacgactgcatccactggtgcctcccgggacccatcgacatctggaacgacatgctcttccagatgctcctcgcctagcagcaagcagcaaagattaaaaaaaaaactcagcaattcggtcgccggtaaccgtgcacagattggccttcttttttttgccttgtttcgtttttttaaaaaaagaagaaaatggtgcaattttgacaagcaaggattcgaaattcgccggtaaccctccgagatcatccgttccctcctctgcttgttctgtggtgtcgaaattgctccctgtctgtcggtcggcgccgtggaaaggggcaaagcaaacaaccaaaagggggccgctcgcagtcgcagcggtggtgcctttgattctgttgtagagtagtatatgactggcgcacgcaagctgtcgaaaaaaaaaggtcacggccgtcctctgatcttcgaaccgaattgaaatgaaagtttactcccgcgccg

SEQ ID NO: 2072 - DNA, 1791 bp, Zea mays
ggagtactatattcgaagaaattgatgttgcccttggacagatccagcaaccactttcgttggagttgagttagattggacagaccgtttcgattgggccccgccttatcaatcgccaaaagtcagacgccgattggctgccgcatttattatattggtttggtacttggtagtttggtgacgctgaggcctcgtccccgatcagacttgttcggcctcttcgacggcgtgcccgtctccccgggctcattcgccatgcattcctcagcctccgcgagaggaggacgagggctcctcttgccggcggctgcggcggcggttgtggtgctactgttgggtgcagtggcgccagcggcgggttgctatccgcgcgtgttcaacttcggggactctctggcggacacgggcaactacccgttcgtctatggcaacgactcagccaagctccggccaccctacggcgagaccttcttccaccgcgccaccgggcgcgcctccaacgggcgcctcgtggtcgacttcatcgcggacacgctcggcctcccgttcgtgcgaccgtatctgagcggacggagcgcggaggacttcgcgggcggggccaacttcgccgtgggcggcgccacggcgctcagcccggacttcttccgtgcaagggggttccacaacatgggaaaccgagtggacctcgacatggagatgaagtggttccgcggcctgctcgacctactctgccccggcaacctcgccggttgctcggatatgatgaaccaatctctcttcttagttggagaaatcgggggcaatgactacaacggacctcttctttctggagttcccttcgaggaaattcgcgccatcactccgagtgttgttgcgaaaatttcttctacaatcagcgaattgattcagctaggagccaagactcttgtggttccaggaaaccttcctattggatgtgtcccaaaatatctgatgatattcaagagcaataagaaagaggattatgatccacagacaggttgtcttagatggatgaacgagttctcacagtaccacaacaagcttcttgtggagcagctcaagaagcttcgcaggctccatcctggagtaaccatcatctatgctgattactatggagctgctatggaaatattcctttcccctgaacgatatgggatcgaatatcccctagtggcttgctgtggtgcagaaggaccctacggtgtgtccccaactacaagctgtggattgggagaatataagctgtgcgataatccagaaaggtatggatcatgggatggcctccatccaacagaatctgcatacaaggtcatcgctatgggcctgctactaggttcctatacaagaccgccaatcgcttccaccaccacttcatgtccacagcttatggagctcggctcttctgctgaatacaaacgcctctacgacctgtaataatttatgtaattatattttattgtatgtactccctcgcccacttcaataagtcccattttgcgagtacatgtactttgtaacttttaactaataacttatcaaactagctactatatatttgttagagtgcaaggtttgattcaggttcggttgaatctacttactgaaaatgcgaaagtataaacaacgtagaataaaatacataccacgcctgcgatcccacgccgcgaaaccaacccgcgccgcgaatctctcggcccgtgcctccttcaccgcaaatcccagcgcctccctcaccgcaacccccacccacccgcaagacccgagcaagcc

SEQ ID NO: 2073 - DNA, 2142 bp, Zea mays
cttcaaggataaaaatgacatgagttcccgttttgctcccgagttctctctcacgtccatccctctctctcgtctcgttctttagcagggccggctggagcgcccactcctccctccagcccggccccagccgcgccgccgcgccggtcgtagacccaacgcccgccgcccagcccagcgcgccctccggccgtgaggcggagaggatcgggcgggcctcggggcgagcgccacgcgtagacggcggttgaggagcctgagaaaacaacggtcctccttcaagatcctgatccctacgcgcaggcgtaggagattgtattccgtctgattaatcggcggagagcaagcgggtgttgcggctgcgcgagcatggcgggcgaggaggctgcggagggcagcggaaccaggaggcacatggatctaaacctgtatctcggcctccctccattgccgcggcctccagtctggctggacccgacgttgatgcccaacttgaccggtgctgcgccagaatcctcaataactggtgagcctgaggaatcgttggccctgggggcggcagcctattctccgtcgaatgcactttccaccccggaggagcacccaatgcttgatcccatagtttattcctggctcgacggcaacaggaccgatggtgaagaggacactgatgctcctgagccggggccagtggatggtgccaatgtctctaggtcgcagcttgtggtagctgccacaggattggaaggggatgatgatcttcctctagtaaggtttgtgcgccctagccagatggttgttgctggtggaatggagacggtgaacacaagtatacttcagcagtccattcaaagggctgctgcaattgaggccaggactcctgaactccgctttcagagggtgatacagattagccagcagcatagaattgtgaggccagcatcagtgaaccgcagtcaaggggcagctagtacagatgcggataggcttgtctgggcaatccagcgcactcataactctttagaagcaacaaggcggcaaaaactagatgacaacaacttgtgtggaaacggttctgctaagaaggatgagtcctgtgactgcaactccagctttgagtgcaatatctgtcttgacccagctaaacagcctgtggttacaccctgcggtcacctcttctgttggccatgcttgtaccagtggcttcatgcacattcaccccactctgagtgccctgtatgcaagggtgaggtgctagaactgaatgtcactccgatatatggaagaggcggtgaagaagggaattccaccaaccctgacttcccacctaggccacgagcaaacagaagggagagcctgaggcaacagctgcaaatgacagacacaagaggaattgcaacagtggtgaggcagttgatacaaaaccagggtataattagcgttctcccaagcccaacagggatcgagatgtcggtggttcctgcaggccggcaaagggctagggctcggagacagcaaaggcaggataataatgcatcatcttccatacacgttgtagcgcagaatatgggcaatgttgcccctgagagcagcaaccaaatccagttgtcacattctaacggtgacaatgctgcacagatggttcttgcagctcctcagcagtcatcatctgtcgaacagctgtcaacttctagcaccacagctgttatattgggcgagcctgggtcaagtaggcggtcaaggccttcggagtctccaaccataagaagaacgaggaggaggccacagtaggtactcgagtgttgtcactcccttcagtaaaatctacagaccatgccccagtgatagttattaccatgattatctccaataacatctcaaggttaataatgtagaaatgtatatgccatcactggtttctgcctttctcttacattccatgtatcatctattatgcaaaacgagtcgaaatatcagttccagtatctatgataatcttgacctttgtatactgggaatatattttctgatttagcctctgtttctggtatgatatgccattataacttccccggtgtggacgttccttagttttcgatgtagttatccatcattgcaagcatgggagaatgtgtatttggg

SEQ ID NO: 2074 - DNA, 2655 bp, Zea mays
ctcaggacgaagagcctacctttccccagctcttcgtctacagcactgccacattagtagttagttaccagcagtactactcttgtgtagtagcttttaatttcccccagctagctagctagtttctacttccgtccgcgcgcgctcatctgcgcacgcacgtgtccccgtccgcaatggagtccgaggccggcctgcttgtccgctcctccctgaacggcgagggcctgtgcatgccggcgccgcgcgccgacccgctgaactggggcaaggccgcggagggcctgtccgggagccacctggacgaggtgaagcggatggtggcggagttccgcgacccgctggtgaagatccagggcgccagcctgagcgtcgcgcaggtggccgccgtggccgtgggcgccgggggcggcgaggcccgcgtggagctggacgagtccgctcgcgagcgcgtcagggccagcagcgactgggtcatgggcagcatgatgaacggcaccgacagctacggcgtcaccaccggcttcggcgctacctcccaccgccgcaccaaggaaggcggcgcgctccagagggagctcatcagattcctcaatgccggcgcgttcggcacgggcgccgacggccacgtgctgccggcggaggccacccgcgcggcgatgctcgtgcgcgtcaacaccctcctccagggctactccggcatccgcttcgagatcctcgaggccatcgccaagctgctcaacgccaacgtcacgccgtgcctgccgctccggggcaccatcaccgcgtcgggcgacctcgtcccgctctcctacatcgccggcctcatcacgggccgccagaactccgtggcggtggaccccgatggcaggaaggtgggcgccgcggaggcgttcaagatcgcgggcatcgagcatggcttcttcgagctgcagcccaaggaaggtctcgccatggtcaacggcacggccgtgggctctggccttgcgtccaccgtgctcttcgaggccaacgtgctcgccgtcctggccgaggtcatctccgcagtgttctgcgaggtcatgacgggcaagccggagttcaccgaccacctcacgcacaagctgaagcaccaccccggacagatcgaggccgccgcggtcatggagcacatcttggaaggcagctcctacatgaagctggcgaagaggctcggcgagctcgacccgctgatgaagccgaagcaggacaggtacgcgctccgcacctccccgcagtggctcggcccacagatcgaagtcatccgcttcgccaccaagtccatcgagcgcgagatcaactccgtcaacgacaacccgctcatcgacgtgtcccgtggcaaggcgctccacggcggcaacttccagggcacccccatcggtgtgtccatggacaacactcgtctcgcgctcgccgctatcggcaagctcatgttcgcgcagttctcggagctggtgaacgactactacaacaacggccttccctccaacctgtccggtgggcgtaacccgagcttggactacggtttcaagggtgccgagatcgccatggcctcctactgctccgagctccagttcctgggcaacccggtgaccaaccacgtccagagcgctgagcagcacaaccaggacgtgaactccctgggcctcatctcctccaggaagaccgccgaggccatcgacatcctgaagctgatgtcgtccacgttcctgatcgccctgtgccaggccatcgacctgcggcacctcgaggagaacgtgaaggccgcggtgaagaactgcgtgacgcaggtggccaagaagtccctgagcctgaacgccaggggcgggctccacaacgcgcgcttctgcgagaaggacctgcagacggcgatcgaccgcgaggcggtgttcgcgtacgcggacgacccgtgcagccccaactacgcgctgatgcagaagctccgcgcggtgctggtcgagcacgcgctggccaacggcgacgccgagcgcgacgtggacacgtccatcttcgccaaggtggccgagttcgagcagcaggtccgcgcggcgctgcccaaggaggtggaggccgcgcgcgcggccgtggagaacggcagccctctggtccccaacaggatcaaggagtgccggtcctacccgctgtaccggttcgtgcgcgaggaggtcggcaccaagtacctgaccggcgagaagacgaggtcgcccggcgaggagctcaacaaggtgctcgtggccatcaaccagcgcaagcacatcgacccgctgctcgagtgcctcaaggagtggaacggcgagcccctgccgctctgctgagctgcaccagcagagaaagacaatgtatacagaaggaaaacaaaagtatagcagcacaaaacagagcgtttcaaggtcgttgtgaagtgctttacgatcatactagcaggagaactctatatttaccgttgccctgtaccagtagctaaagttcatgtgaatgttgttgtgttcccgcagctgcgacgccatggcctgcgatgtgcatggtcttggctgctgcagctactgaaacttttgatggttttaacatgtaagttggggggataaagtaaactactttgctctacaatggtgaatgggaactgagaagtttcttgtc

SEQ ID NO: 2075 - DNA, 2317 bp, Zea mays
ctccctcgtctacatcctgtctctcctcgcactctccgttctcccgccgcttctggtctcggaggtcgcagcgttcctccacttgtccgttcgcctactcgcctgcggctccgtccacagtacgctacgcaaaagcgaggtggcgaccgctgttcgccggagcatctgatgcttatggagccccaaaatcttggaaacacagacgatcagtttgtctggccttggatgggtgttctagttaatgtgcctactgagtggaagaatgggcgccaagttggagagagtggaaatcggcttaaagagcaactttcacgcttctgccctcagaaggttattcctttatggagttatagaggtcacaccggcaatgctattgttgagtttgcaaaagactggactggcttcaaaaatgcgcttgcctttgaaaatcattttgaggccgagggatatggcaaaagggattggaagctgaagtacagtgggtcagagatgtttggatgggttgcaagagctgatgatcatagatgccaagggcctataggagactatttgcgaaaaaatggtgatctgaaaactgttggtgatcttgaaactgaagggacccgtaaaactgacaagcttgtggcaaatttagctagtcagattgaagtaaagaacaagcatgtgcaagaactggaatccaagtgcaatgagacgaccgcatcacttgacaggatgatggagcaaagggagcagatactccagaagtataatgaagaaattcgcaagatgcagcaaattgctcgtaggcattcgcagatgatcattgatgataataaaaaactccacaaagagttggagtccaagatgcaggaacttgacttaagatccaaggagcttgatgacatagctctgcaaagggattgtgacagaagaaatcttcagcaagagaaggaaaagaacaaaattaaaactaagcatctcatgatggcaacaatggagcaacagaaggccgacgagaatgtgcttaagcttgtcgaagaacataagagagagaaacaagctgctctagggaagattctcaggttacaacaacaattggacgccaaacagaagcttgaactggaagtacaaacgctggaaagcaagatgaaagttatgatgcatatgccaggtgatcaggattctgagtcaaagaagaagatggatgaacttgctgaggagctgaaggaaaaggtcgatgaattggaagcaatggagtctctgaaccaaactctgattatcaaggaaaggaagagcaacgatgagttgcaacacgctcggaaggagctgatagatggctttatggagcttgctgttgttggccgagctaacataggtataaagagaatgggtgagcttgatctcaaagcattcggaattgcttgcaagaaaaggttaccaaaggaggatgcagaagtcatttctgctaccctttgttcaaagtggcaagaagaaattagaaacccaagctggtacccttttaaggttaaggtggtggatgggaaagaaatggaaattctcaaagaggacgatgagatgctccaggagctgaaagaagagcacggtgaagaaatttatgggttggtaacaaaggccctgcttgagatcaatgagtacaaccctagtggccgctatcctgtaccagagctgtggaactacaaggagggccgtaaagcaacactgaaggaagccgtccagcacgtcatgaggcagtggaagtctcacaagagaaagcgctgagcaaattggttgctgggttcttctgcctgccccctattaactcgatagtcgatactgggtagcattaggtcgtagcttttaattaactcctaatgatgagtgggtaacagtggctggctaatattaacgttaagttgccggaggttcggtctggattcttttgttggtagtgtatacgaatgctgttagtcggtctggattctcctgtcgttgcatgggcatttgtatgtccaggatattgaccgcttcatggatcagccgtcaaactttggcaaaggagaggcatgaacgaccttccagttcctccatgatacgtagacgtgatgggcaattcttggttgatatttggccgtgcagcaccattgagcggctataacttgtacctgatgactctgggtatggattactactaaacttccatgtgcctaaaatgtgttgcagttataaattatgattttgtcaagtagaatctaatattttacaataccgatcattatgatcttgcagtctgatataagcgctattttttaaaagtgtctaactcaaggctccgatg

SEQ ID NO: 2076 - DNA, 2796 bp, Zea mays
gccaacgttccaaatgtcacgtgatcttcttttccccctttcccatcccgcctcctcttctttcttctcgcctcgcgctcctcccttcctcgtaggttaccgttggtgcgagtgcaacgcaaccccaccccagctgctaaacccgagaccgaacctcgtatcgtccagcttaaccgcacccacctttcgcgactgggatttttctcgagatcgatcgatcgctttccatcagagagcagcatcaccttcttgccttgcccacgccccaggtaaagctcaatctcagctcgctggttttccaatcgcttcttggttctatcggtcgatccgattcttggggcttgtcctctcccgtgccttgccgcgtacggttcttcttgatgtcaacgattgcttcgtcctgagaactttcctcggctcgaattcatgcgatttcagttctctccgtgcaaaattggtcccgattttacagcataataccgtttagtttggctactgtttcatcttcttgttctttttttgggattcggtggcgagaagaaacccccgggttcgatttcgccaagaacagcgtttgcaagaggaattctttcttcgatcgcctgaactagatgtttactactaaattgtctctttggcgaatcgcctgggcttgaatatgctgtgactgactgcccctgaactaatcgcctgaactagttgtgactgcctgccggttgcgaatcgaagcgtaaacatgacgacgctgtcgtccggcgtcctcctgaagctcctggacggcatgaagagcggcgccgccaagcccgtgggcgagcaccggacggcggtcctgcaggtgacggacatcgtgccagcggagctggacgagaaggacctcttccccaagcacggcaagttctacgtcaaggtctccgatgcgtcgcactccatctacgccacgctcccgctggcgcaggcagacctcgtgctctccaacaagctccacctcggccagttcgtccacgtggaccgccttgacccggcctcccccgtccccgtcatcgttggcgccaggccgctccctggccgccacccgctcgtcgtcggcacgcccgacccggcagctagggccaagcccgccgcgccgcgcagggggtcctggggccccgagcagaatgccgccatcaagcctaccacgctcaacttcgacgccgagaggatgacgccagtcaaggagcggccggccttgtcgactccggtcaaggaccgcgctggtggcgcgacgcctgccagggagcgcggggctgcggcgacgcctggtagggagcggaccgccgtggcgtcgccggcgctgagctctgcgtcgttgaggaagagcagcagcgtgctgcccaggctgaccaggagcaagagctttgtcgcggacagggatcagcagcatcctaggatccccaagagcccattccccactgtacgctcacagcctcaactgaaaagcattgggagccaagtcgagtcgcgcctttgtttacaaatcaatgttgatttccaatttgtgtttgcgcaggagaagagctcggtgagctgcacagcctcgagggcgacgaggagggtggccaaggaggaagagccctcctcgcctccttctgatgatgagctcggaagctcggccacatccaccaagaagcgatcggcgacagctgctcgcgtgccggtgccggggaagctcagtctactcgggaaggacgcaatggagcagagagagcaggcgcagaaggttgccctggaggcactgcgcaacgcatcagccacggacaacgtggctaggatctacaagttgttctcggaagtgagcaagacggcgaggccggaagcgccggccacctgttttgacagcttcctcagctttcaccaagaggccgtgcaggccgtcaccgacattgaggcgatccaggcggccacctcgatggccgcggccgtggcgagtgacgagcagcagctcgaagatgcgccgccggtcctgcaggagatagcacagaacaggacggtggtgcgtcggagaggcatcggcttggggagcgtgtccaagtcagtgtcgttcgcgcccggcacgttggacccgaagcaggacgatggaggcggcaaggccatccggagctcgagtgccagcaggaagtgcctcgccacggacaagatcggcgaagacggtggcgacgagaagagatcatcttcttctggtccttcctctgccaccaccaccactgcgcactctgctctgggctcctcgctgaagctggctaagaagatacaggccgaagcagggagctggttcatggacttcttggaggccgcgctggagaccgggctgaagaagagcaaggcgtcttccatgggggacgggcggaagcaaagcagctgctgttgcccgcagtcgttgatgctgcgggtgatcaactgggtggagatggagcagagcagcggcgacagcagcggcaggaagactgcccacccaagagctgcggccgttgcgcggaagctcagaatcaaggccaaaaacccctcctgatgcgctgctgccctctgattcttgtgagaagctagtttgtctctgattcttgtgagaatgtacccagatagaatccgtagaataagaaagtgattgcctccattgttcttgtcacggcatagcagattgtttcaagtgttcttgaagtaggatgacctgttcccttatcactaatcttaaacagcactacagcagcagaacaatggaggtgttgtaccgtagttactgttgaataattagacaaattccag

SEQ ID NO: 2077 - DNA, 1422 bp, Zea mays
atgtaccaggatgagcagcacactgaggagcagcacattgaggaggagcagcacaatgaggctgagcagcacaatgaggaggtggagctcaatgaggaggtggagcacgtgacatgggaccaggccgcacagcatcaccagccatgggaccagtgggaccaccagagagagcagcaacaggcgtgggaccagtggggccaacagggcgaaccggctgacaacccgatggatgatggctcaggaggctcttcagcgacacgcacacgtcgctcaagaaaaagccactcagtaaagcctcgtcacgcgatagagcgagaggctgataggactttaatcatgccacatggagatcggaattgggaggacctgtcctttgacggcaagggacaccacactcaggttaaccttacgttgggttctctttgccgccttcactaccctggtatagtgaaggtgtcaaacggtgataccgaggatgaggtgctcgtcagtacctgggatgagtacaagtttaaaaaggaacgaaaccacaccgacagacagggacttgtgcgtaatgacttttggcttcgatatcggttgcctgacggagaggattacatggggcacgctgaacgtgtcttgcaaaacaatgcaaagaagctggtgaaggatgccatatactatgcgagaattcaggctacaaacctgtattttcaaaagcatccggaagaagcaggccccttgaataaaaaggaagggtcctcaaagatatacttgactgaggatcaatatcgtgaggtgatggttccatggatggcgcccgtgcctgatgcgtactatgcttggtgtcgatattgggcttccgaaggcttccagaaagcgtcagcgcatcacagacaatgtcgaggaaccaatcctaaccacaagtttggcggtgacgacatgatacgaaaagctaaaagaatggaagctacgagtggccaaaagcctagtgacattgaggtctaccaggagggccacaaaggaccagacccgaacaaccctgaccagctctgcagccagacagccacggatcgcttggtgagttttggctcaaaagttcaaacgttcaaagtatataaattcctgcatttatacgcactcttcgacggattcattgactcgtcgtcgttaatgcagcaacagggcatgacatcaaattttccaccgccaccacaatggagccaatttgcaaacacaccagttccaccaccacagttcaccacccctccgacacatatacctgcacctggagatagggttacgcctgaagcgggtggcagtgggtctgatccagcagtagggactggatttgttgactcgctcttcgcgttccctcctcctggtggtgaaggcggcagcggtcatagctctaaccacccaagtggtggttatctctaa

SEQ ID NO: 2078 - DNA, 1080 bp, Zea mays
tcctattcgtcgaaagcgtttcatttcctcatagagtcataggtaaagcggatcgatatattctttcccacgcagccggtggaagcctattgcccaccataccaaccccgcgttgcggttatatagggccgtatttcccccgcgtctccgcgtcagtggaagcgatcgacaccattcaagctaaagctgctttcttgggaaacgcttgatcgcaacagctcgatcaatggcttcttcctggggttctcggttgccgctcgcagtagtgctgctgctcgtggcctgcttctcctccacggcagccgccacaagctacaccgtcggcgacgggtccggctggacaaccggcgtcgactacacatcttgggccgcctccaaaaacttcaaagtcggggacaatctcgtgttcaactacgcgaaagggctgcacacggtggtggaggtgagcgcggccgagtacatggcgtgcacggccgccaacccgctgggctccgacagcagcggcgcgaccaccgtggccctcaggacgccaggcacccactacttcgtgtgcagcatcacggggcactgcggcgccgggatgaagctggcggtgaccgtcggcggctccaactcccctgctgccacgccgcggacgtcgtccccgacccctaccacgccgtacacgacgccggccaccaccacgccgtacacgacgccgacgtgctctggcggcggcggcaccacggcgaccccgggcatgactccgttcacgtcataccccagcgcggccggccttgggtcggcggcgttggctggatttagtctggtttggtgtgtgggcgtccggctagcgctgctctaggcaaagggcggccatggaccgtggtcgaccagggtatgtaacagtgtaacgtatgtgtttgttctttggtccggatcgagctagctggggtatagtatacttgccaagctggtgactggtgtctcgactccactctaaatcgccgtgcaaccaaaccgtgcaaatcactttccttgaaccagtcgaattgccccgcatgtgcaaaccaaacaggcagtaaattaggcagagggaag

SEQ ID NO: 2079 - DNA, 2205 bp, Zea mays
cttccgggtccaaccaaaagttctgattcctaaactggcccgtactcccgtccaatcccaacccggcaacgcgagaatatatcaatccatcctcgcgtcgcgtgatctcatctcgccctcgctcacctacatctccgtccgcaagcgtcagccaggctgccccgggaggccgggaggaagcagatcggagaaggcaagccacggatttccttctcgccttctggaccccatgtacttttttcccctgcctcgaaaccctagatctggttgattcgtgggccgtcctccccacccctccctcggccgaattccgcgtctggttttggtctcgagttttaagatctgtttgttttcgactggattttgagcgattcgttgctttgcttggcgtggctcgtcgctgattcgaatgttctcggtggctgtctgcctggctttgccgaaacctaactgctgtcgataaccgtttgtggcgaacgatttgcaggtgatctgttgtaatggctcgattgtacatcggcaacctggatccccgggtgaccgctcgggagctggaggacgagttccgcacgttcggggttcttcgcagtgtctgggttgctcggaaaccacctggctttgcgtttattgattttgatgataagagggacgcagaggatgcaatccgtgacctagatggcaagaatggatggagagttgagttatctcgtaatgccagcggtggtcgtggaggtcgtgaccggcatggtgggtctgagtccaagtgttacgagtgtggtgagactggccactttgctcgtgagtgccgtttgaggattggttctggaggtctaggcagcggaaggcgccgaagccgtagccgtagccgcagtcgcagtcccagatatcgccggagtccaagttacggtagaaggagttacagtcctgcagcacgctctccaaggcgtcgtagcgtctcaccagctcgtggacgcagctatagcaggtcaccacagcacaagggtgcacgtgaagaatctccctatgataatggataccgccgcagcaggagctagagccagatcgttgtatccgacgacgagcgttatgtgacagatattgggaaagctatggtcaataacctgcttgacagatccttcgtcgactgcttgactttggttaaggttctcataactttctatatacctattatcttgtgtctactttataagtagcagtaaaaccttttgatgagtgtatttgttgaactaagacctactgtcttttcttgtgtggtaaaaaggcatcgtcctgcactgcttaaacgactcggccgactacggctttcagttctgtcttcatggttttgttctgcgctctacattcttcgcacaccctcgcatgcttcattcagtctgccgtgtgttaatctgcctgcgtatcttctcgaagatgctgcgcatcgcaaaagcagtaatgaccttccttctcataccatttggtaaggtttgatttgctgacaaatgcagcatctggtaagtttctccccgtaggtttggtctccgtgctgcgtgcgctgctcctggttcaggaactgcagtatgttagatggatgaggatgactgaatgactcacctactcacgttatcatgccttcagaggacccaagttagtgagcgccaggaagtgaattgaccaggccaaatgctacgttgagccgactttggctttgctctgcgatctccacttgccaacatgtgttgccttcgacgaagtcttcttcgccttccgcttccttctctgcagcatcctgattgatattcttcattcttcgagtgacatgcagtcaccctaattgatcgtcatagagcctgcgttgaagtcgaatcccccctaatggacaatgtagttaaattgttattagcttgtttcttgttggatagactaatgtcagatgctgtttggtataaaatggtaaccatctggttgatgattggcggcgaactatttgttcagcacgtggttgctatatgacaagtcacaaggtattattaacctgagtggtaggctgcatttggatcaaccaggctggttgagaggcagcatgtgcttgtttggttgctcgtccgtgcatctagtagcttaagttgaagtgtttggttaatggttgtatgtatttttgtgctcattgcaccgcggaatgcagaatctgggcagctcgcttga

SEQ ID NO: 2080 - DNA, 1578 bp, Zea mays
cggtcgctcttctcccctcctctcaatttgcgctcgtgctctgcttcttcggctccaaggagcggcgaccattgctcgtaaagacgacctctcctcgtgccttttccaaatcaggcttgttcttgatgcggtctgcgatccgattcttgtggcttccattcactctcttgggattcttttaccatttcgtggactcttttgtttcttctcgttttctccccccgttaattggagcagcgacggcttgctcctcttcgtgtaacgagatttagtttccttcggattgatggcgatggagggacctgttttctgccgtcctgcaatgcaagcgaaactgcctgctgctgcgctgatcaacaactccctgaccaaatccgggcagcttgggactgcattgtttggtgccatttcaaaatacagaaacatttcaagattcatttctcccatctctcaaacatctacgaagaacataggtccatgctgtagcttcagctcgtcttctgatggtaatggatacatggctggaaactctagcgagagtgatgaagactatgttaattctactgtgctagaagcagttgaggtgagaagtggatcagaaggatatgtgataaagatgcgagatggaaagaacttgcgttgtgtccatagtaattttcaagggagaaatattccagagaatacaccacaacctgctattgttttgaggattgaagatggaagcggaactttactcccgatcattgttttggagatgccaagcgttcttctgatggcagctattcgtaatgtccacattgcacgaccgaccatatatcaagttgtcaaggaaatgattgataaaatgggttatgaggtaaaacttgttagggtaaacaaaagaattcaagaagcctactgtgctgaactttatttaacaaaggtcaatgatcctacagacaacatcaccttcgatcttcggccttcagatgccataaacattgctgttcgttgcaaggttcctgtacaagtccatagaagtcttgcatacagtgatgggattagaccagtcgagccagcaagaatggcagtaacagctggcctatcagatgggttgttatttacagagcttgacagacctgatggacagccatgtgtggaggctcaagagtttggactggtgaggaacatgctcattgcagctatcgaagagagatacaaggatgctgcatcatggaaggacaaactgattcggctcaggtctaagcgggagaactgggcctgagagcgtcgcatgtctggatggtgtaaataaagatgacgctcagctgaattccagtatgcactccagacaattgatactgtttatggctctatgtaactagctgtacatattgtaactagctgtacatattgtacgtactatgctcaggtctcagctaaattcagactaagatttgaagtgaaaaactaatccttttgtaatcttggccgtattaatttgtatgttagtctgttaggttgaatgtttggcatgaatttttagctcatcgacctgcggtgagatatgcagaatttcggttgtacacggaactaagc

SEQ ID NO: 2081 - DNA, 357 bp, Zea mays
atgattttggagactgcagggggtcacggccgcaaccccaatggcatcctcggccttctatgcagggaacacttccctagacttgtcgagtacgccggagtgacgagcccagcatacaccttcgaccactacgccgtcgcccccgatgcagtagatcgggacggcagacaattcaacaacaaggcggagcgggtgaagcaagagctgtgggtaagtcttcctcgcactatattgtttaataagtcgcatttgttgcatattcttgaaataatgtatggatacatcgtctttgtatgtaggatttcttcagatgcgaggctggatacgaggcacgggcggatgcggtggctacgatga

SEQ ID NO: 2082 - DNA, 722 bp, Zea mays
atgggaacaggcagagagcgagcaggacgcgcggaggagatgctcgcgagcacagctaggcaccgtacatggggagccgcacagggagagcagggagcatggcgcgcagggcagagaaccgctcggcgagcaggaacagcgcgcgcacaggagctccgcggcaagggagagagaggagcagagctgggcgcggctactcgcggcaacagagcagaggggcgcagtccgatagaatctgagcagagggcagagcgacggacgcacaggaaacagcgccggcaactcgccatgggagcatggaccgctcggctgggaggagaactgctgccgctgtgcggcagagggagatgccgagcgctgaaatatccgagtagagcggcggctggggaaagagatgagagcgttcgggataaggccaaaggccaagcaacggttggaagatagagatagaaaaatctcacgccagggataggatcggctggtaaggtttttttttttatttctttcctttcttctttctttttttaaagggaatcgctgatattttagaatcaagatttttagtgataaacagagagggtcgatggtacttacggcacagttgattcgattcaaaatctgagaaatttacctggagctcaattaaaatttctcggacgagctgtctcggttttgatttaactaactaaatcatgtaccaattacttactgttagtattaat

SEQ ID NO: 2083 - DNA, 486 bp, Zea mays
atgggaacaggcagagagcgagcaggacgcgcggaggagatgctcgcgagcacagctaggcaccgtacatggggagccgcacagggagagcagggagcatggcgcgcagggcagagaaccgctcggcgagcaggaacagcgcgcgcacaggagctccgcggcaagggagagagaggagcagagctgggcgcggctactcgcggcaacagagcagaggggcgcagtccgatagaatctgagcagagggcagagcgacggacgcacaggaaacagcgccggcaactcgccatgggagcatggaccgctcggctgggaggagaactgctgccgctgtgcggcagagggagatgccgagcgctgaaatatccgagtagagcggcggctggggaaagagatgagagcgttcgggataaggccaaaggccaagcaacggttggaagatcagagatagaaaaatctcacgccagggataggatcggctggtaa

SEQ ID NO: 2084 - DNA, 423 bp, Zea mays
atggcccacgaaccgggtgacccacctgccaagcagctcgacgtgaaggtccaaaaggcctcccgaggatggcccaccaagccgaccagctcgcccaccgaacaaatacccgccgagcaacccagcgaggcagggctgccgaccaaaccgcccaccgagcaacccagccaggtggggctgtcgaccaaagcactcatcgagcaacccagtgaggcagggttgccgaccaacctgcatgtcgagcaacctaacaagacgacagtcgactcttgggcgaacacctctactgaaaggaagagccgacctagtaccatcgagccacatcggcacgatggaacatcaccaaaccatccccataccatggaagcgatattgaaaggtctctatcaaacacgatgccagatatgtatccctattaactag

SEQ ID NO: 2085 - DNA, 294 bp, Zea mays
atggcggagcatagaggcgagccgagcttgggcggccttgcgatggaggacgactggcgaccatggaggacgatggcggaggacgagcttgggcggccttgcggcggcgaggtgctggcggcggcgcggtcagctttggctgcggggcggcgagccgaggacaggatttggtgggctggcagcggcgcggtgaccttaggcggtgtagcggaggcacagtgctgtgctagcggcgaccggtgttctggcggtggccggtgttgtggcagcggcgcggtgggcgggagagggtga

SEQ ID NO: 2086 - DNA, 1532 bp, Zea mays
atggtgtcgctggtgccgcgtcatcgtacgaacgaacaggatacctccggtggtgcgcaacagtcgctgatgccaccgagggtcgggtctagtaggagcagggggcctggcaacgtggtggtggagaacttcacgctggacatgctccacgcctcgacggacgggttctccgacgacagccagatcgggaccggcagcttcgggtccgtgtgccgtggcaccctccccgacgggcgcgaggtcgcgatcaagcgcgctgaggactcggcaaaggcatcaagctcggtggcgcggcactgcgaccaagagacggcgttcgacttggagctgaacgcgctggcgcgcgccaaccacaagaacatcgtgtgcctgctgggctgctgcgccgactccggcgagcgcgtgctagtgtacgagttcatggcaaatagcacgttgcacgaccagctccacagccgcagccccctggcggcggccatgtcgtcgtggcgcggccgcctgaccatcgcgcttggcacagcgcggggcatcgagtacatcctgctcgacgacgcgtggacggccaagatcgccgacttcgggctgtcctccgtcctggaccccagcgctggtgccggcacgccgcaggtgccactctacacggggggcacggtggggtacatggacccggagtactaccggctgcagcacctgacggacaagagcgacgtgtacagcttcggtgtggtgctcctagagctcgtgtccgaccgtcgcgtcgtgcagcgctacgccaagagcgtgacgcccaagaacgtggttgagttcgcggtgccgcacatcctggccgacgacgtcgcgcgcgtgctcgacccgcgcctgcccgcgcccggcgtggccgaggcgctggcctacgtgggctacctcgccgccgactgcgtgggacccgtgggctgtgaatgcccgtccatgaccgaggttgtggtcgccctggagcgcgccctcgtagcctgcggggcggcgccactgtcccatgcaggcaccggctgccgctccgtgctctcccgctccggcaccgacgagttcgacctcaccgacactgactagccgtcgtggaccatggtggctgccaactgcgagccgcagcacgcgccgaatcgcctgtccctgggccatggttctcccgttgaaaaggtaatgaagcaagagagagcgggatcagaaggcggttgacgccgacatctcggatgccgctgctgccgcgtgatcaacgactagattaccttcgattgacttgcgaacaacccacacagggacagggcactggatcaacagatggcccggtgaaacggttgacgagagaccagtagcacgacggaaaagatcattcattctttctttcttcccactttctccttccttgctatgttccttgtatacttgtctctttcctcgttgggcggtttctccatgttctttgaccaatgtgcatagatagatgagtgacaaaatttgagaagaaaagaatcacgatttatatttgcttccaattt

SEQ ID NO: 2087 - DNA, 1671 bp, Zea mays
gcctccacaagtttcatttcacaaacaaaagaacgggcgagagagaaaggagaaagacagcgctctctcactcccttgtctgcaacaagagtgtggtttcaagggattgcaagagagggtgtgcgatcgatctatggagcttttcccctcccagccggacctctcactgcagatcggcctccccgctcgcgctacgtcccaccaccacggcgctgccctgagcgccaggctcctcgcggcagccgcaggtggcagtgtcggtggcggcaacggggtccctggcaacccggcggcggctatggcgccgtccctgcaggtgcccattcccataccgctgcagctgccgctgccgatgccccccaacgccgccgccatgctacgacccatacgcggggtaccgctgtaccagcacccgcacacgcacgcggtgccgccgacgttcccgccgcacgcggcgggcgcgggcccgtgcttctgcgagccttgccacgtcgccgcgggcgcctggcgccgcgccgggtgcggcttcggggctcgcgtcgccgggttgttccccccggcgaagcgcgccgccagggcgccgcgcatgcgctggacgtccacgctccacgcgcgcttcgtccacgccgtcgagctgctcggcggccacgaaagggcaactcccaagtcagttcttgagctcatggacgtgaaggatctcaccctggctcatgtcaagtctcacttgcagatgtacaggaccgtgaagaacaccgaaaggccggcagcttcgtcagatcaagctgatgggttcgagagcgggtcgtcatcggctggcgagatctgcgacgacgacaactcctcgctggatctgcacggcactgacggcaggcggccggagtcgtcgtcggcagttcggcatggaaggttaactgcctgtaacgatcatgggagcagcaccggtgctcatggtggtgccctctggaacagctcctcaagggaagactgggccggctttcccagcgactccaacaccggcagcatgagcatgcattctcgatctctcaaggatcagacgatgcagtccaagagcctggagatcctgtcggacatgaactcctcctgcgtgtcggagacgacgtcgtgtgccagcgagttgaacctggagttcaccctagggccacgcatcaggcactagcagcacgcaaagcaatcataggccggtacgtcatggaggacggcgacaagcagcatcggaggattagctaggctagggacggggaaaagggggtgctttgcactgcatgcatgttcatgtgatcgatcgatcgtgctaagatggaggatgcattcatatcatggtcccagagacaggacaccatacatgcatctttcactgttaaaaggaggccatgcatggacagacagcagctagcatccaggaaagaaggattaaaggtgtaggagcagcagctaggtacgtcgtagtggtagaggtgaggtgatcgcgatatgatcgaaagctagcgaacagccgccatgtgtgtaatggggtcgtcgttgttagatcgagcgcgtttaggatcggacaatctgtttaaaggcctttttgcagcaacattgcaatatgcatgagcttgttgcgttgctagctaggggcccgggtacgtccaaaggaacaaaagggatgac

SEQ ID NO: 2088 - DNA, 2500 bp, Zea mays
accagtccgtgctcccaaaatggcggcctccccagcggccgccgctaccttccttcaccatcacctcccctttcccagtcgccccaagacacttctcagaccacgcctccaccgcctcgccgcgtccatcaacccctcgtccaccgacgagacccccgccgcggacccaccggtcatcccctcgatcagcatcaagaacactgagcccgaggaggtcgcccgccgccgcagttgggtggagcacggatgggctccgtgggaggaaatcatgacgccggaggtcgcctttgcgcgccacagcctcaacgagggcgaggaggtgccgcttcagtcgccggagtccctcgaggctttccggatgctcacgccttcctaccggaagaaggtggaggctgagccaggatacctggagcgcctcttcgcgacgcgcgacacgcccgagcctctcgagacgacgtgggccggccggctcccgctgcggctcgtgccgccgcgggactggccgccgcctggctgggaggtggacccggacgagctggagttcataagggaggcgcacagggcggcctctgagaggctggacatggaggcggcggctgcggcaggggtgaccaacgtggagaagctggaggatgcgccacaggatctggcgctagagaggtacaaaatgttcctgaagcagtacaaggaatgggtggaggcaaaccgagataggttggagcaggagtcctaccagtttgatcaggattacttccctggcagacgaaaaagaggtaaggactacagtgaggatatgcgtgaacttccattctactatcccggacaggttctgttggaacatctctacttcacctttttttctctcttagctagtccatttaattctaaccattttttaaatggctttatgctcttgcagatatgttacgggcaagtaacgactgttcacctctaccagggagcctttgtgaacattggttgtgtccatgaggggtgggtaccgataaaaggaaatgactggtactggatccgacatcacatcaagcctggcatgaaagtctacgtggagattctggccaaacgagacccttaccgcttccgcttcccacttgagatgcgatttgtatatcctaacattgatcacctaatatttaatagattcgacttcccaccaatatttcaccgtaaggaggatactaacctagagcagttgtggcgtgaagccggacggccacccattcctaggaaaaaacctttaaaagatatggaaaaggaacctttggtatcagaccatccttttgttgacacgctttgggaatggcataatgcagagcagatgattttagactacgaggaacaaaatccagataaattcaagaatacaacatatgagtccacagttgatgcaccctcaatcgatgaagaaaaaagagttgaatacaccgaaggatatttcaaagaaacactgctaaaaaagaaagttgtgaatattagcatcaaagaacttgatctggatgctgcccgtgctgaacgccagctgataaaaaggctgaaaaaggaagccgaggagagaggggaggaatacaaggttaggaagctccgacgaaacaaagaaatggatgagtatgatctgatgcaatggcgtcgttcatttgaagagagggaagcgcttatcagagacatctgctgccggaaagcgcttgatcttcctatcgaagagcccgggcgatacgacgtggacgagacagaggtgtacgggaaggattactatgacccagagaagccaatgtaccggtacgactactggggcgagcccaagaacacggagaagacgaagctggagcgggacgtggagcgccacaaccagcaggtggtcggcgacgcgaagaagtggtgcgagatgtcgtacgacgactacgtccgcaagaagctgcggttggaagcggctgaggcgagggaaaggcggaggaaggcggccgaggcgcaagaggacgagcaggagtacgatgacggcatggacctggacctgaagaagatgaccgatccacgcgccccgcacaaccggttttacatcacgaaatgaaaggttagagatagttgttagttgtgcaaaaggttcgattgccttggttgttgttgttgggccaccgcttccgcctatggtgcaagagttgggggcgcttgatcaggtcgtctgacattctccttgttgacccaaccccattccgattggggcgacctggtcaaacgcgggggcgtgctagctacgctcagtacaagtattcagcatggaatctccagtattttattctagagaacatatcttgtgtatattgaagtttagtgcacatgttacatatattaaatcagtatcactcattttagatttagcatctctagttgtttgatatattttgttaaagacacgctccgacattgtgggtagtggtggacgatgttatttataaattgcaatgatcaaccatataagttagattta

SEQ ID NO: 2089 - DNA, 1624 bp, Zea mays
agtagcagttgctttgcttccatttccctccctacgccggccagtacacacacccgaccgcgaagaaaccgagcaacaaaaacatgcgagaaatggagcacaagaggccggttgtccgccgccaggagcccaccgtcgcaaggacggaggacgacgtggcttccggcgacgaggaatccgacgtcgagttcgagttccccttcgtgagccaggagtccggcgcgggcgcgggcgccgcggcggccgacgagctcttcgcggacggccgcatccgcgcgtcctacccggtgtttggccgagtcctagacgaggccgcggcgccggcgccgagggcgccgctggggcggctgttccagctggagcgggcgcggacctcgtccgtcgcgtccaggtcgtcgtcctcgtcctcgtcttcgtcgacggcggcggacgcggacgcgggcgtcgacggcgcgtcgccggacagctactgcctctggacgcccgggtcgtcgccggcgtcctcgccctcgcggccgccgcggaagagcgggtccacgggctccgtcgcgcggtggcgccgcatcggcgagctcgtcgtcggccgcagccacagcgacgggaaggagaggttcctcttcctctccgcgccgccgtccccggccagggacagggaccactccacggactccaaggcgaagcagccttccagagcaagtaaatccgcagccgccgagctcgacacggtccccgcggggcgccggatgtcctacggcggcggcggcggcgccaaggcgtccaccggcggccggcgcacgttcctgccgtaccggcaggacctcgtggggctgttcgccagcgcgcacgggctcagccggagcaccctgccgttctgagccggtgtagccacgacgcgcagtggcgtggaggacccgttccaaaaggcgatgccttggagattgaaattgaaaccgggatttgaaatttcaagacatttgaattggagatccactgcatgtaaccctgctttgcgaagaccagtattagcattagcatacgtgtgggattaaagcgattattacgcgagtcaaaaaaggcaaggtgtcaagtcagagaaagcaggggaaacgtgagccttaccattagcattcggctcggaatcgggctctcgagtcggttccgaccaccgccattcattctatacccaaccaacacgcgaagaaattaagacacgttttcctctcacacgggatttgcagcatccgcaggattaacgttgagcgcgttcggctgccctgcacggagcactgttgcagctgcaatccctagagagaaaatactgtagaagccgcagccgcagtcggattaaagccgcagcgaacaagccaaagcatagacacgtggcagttataattttcatgtggacacgttataggagatacacatatacggacacgttggacaagaagtttacatgtggttgtttgtacatgatcattgtatagtactaatgcatagagattacacaagtcagaagtaggtgagtttgtttgcaaggaatccaggtttccttgtctgcaatctattgtttgtttgtttttctatgtattgtcgcatctctaatctaattgcttatctctacttt

SEQ ID NO: 2090 - DNA, 2957 bp, Zea mays
atgcttctcatttcaaagatcggagaggagtaccctgatcggatgatgctgacattttctgtctttccctcgcccaaggtgtcagacactgttgttgagccatacaatgcaaccatgtctgtccatcggctggttgagaacgctgatgaatgcatggttcttgacaacgaagcactttatgacatttgcttccgaactctgaagctgacgacccctagcttttgtttctggacagttggagacttgaaccacttgatcagtgcaacgatgagtggtgtcacttgctgcctctgcttcctaggacaactgaactctgacctgcacaagcttgtagtcaacctgatctcgttccctcggctctacttcttcatgatcggctttgcgccactcaccttgcgtggctcgcagcagtaccgtgcgctcaccgtctctgagctaacccagcagatgtgggatgccaagaacatgatgtgtgttgctgacccacgccatggtcgctgtctcacagcctctgccatgttccgtggcaagatgagcactaaggaggttgatgagcaaatgattaatgtccagaacaagaactcgtcctactttgtggagtggatccccaacaacgtcaagtttcaccccttcgtccccatcatccgggattcatccttcgacccctcccccccacggtccctccccctacccacaccaacgcgcacacggaccgggagtcgcagcggaaaccacaaaaccagcgtgaaggcgcccgaaccaccgcgagccccgcccaccactccacgaaacccaaacgcacctccgcagcgagggatatcccccatcaccccctaccagtttcaattttcaaaagggcgtggaggcgccgcaccaccgccgccgccaccactgacgagggaggaaacgccacctccccgagccagtccgatgttgtccgaccaggagctggcccagtacgtggagtccctcgtccagcacaccgctgcgcagggtggcaccgggatatcggcggatgccgtggtgcgccagctcggggcgcagctcggcgttgacctctcccccaaggcgcagctcatccgcagcgtcctcgtcgcgctcctcggccccgcggccgcgccggcgccggaccccacgggttcgcgtaaggatcccttcgaccccgcaaccgctgccgccgccggcgggccccgcgccgagactcctccacagcagatgcacttctctaccgccgccgcgtcgtcggcccccgccccttctccagccgttccccacttcttcccgcagcagcaccagcaccagatgcagtacttcctgtccgccccgcagcagtatcagcaccagcagcagcagcaacgcgccggcgcgtccccttcgccgtttgacatccccgcgtcgtaccgctacgggcaccagcccttgccgcaggccgaccaggcgcagctgcagaggctcgtccagctacagcaccagcagcagcaactggccgccgcggcgagagttgcagctgcagcggcaccgactccgggggagagtccccgtgcgccggagccgccaccggcgccggcgccggcagcctccaagaagaacagcagtgctagtgttggagcaaaacgaaaaggtggtcctggagggttaaacaaagtctgtggtgtgtctccagagctgcaagctatcgttggtgaaccagccatggctagaactgagattgttaagcagctttgggcatacattcgcaggaacaatttgcaggatcctaacaataagagaaagattatatgcaatgatgagctccgattagtttttgagactgatagcacggacatgttccagatgaataagcttctgtccaagcatatacgtcctctggagagtaaaaatgattcgaaaccagaagcaaagaaattgaagccacagggtgatgaaccaatttcttcagttgaaactgatgttaaccaacttccccttatggtttctgatgcgcttgctaccttttttggtaccggagaaagagaaatggtccattctgaggctgttaagcgtgtctgggatcacattaaaagcaatgatttagaggatccagagaatcctacggtgatactgtgtgactcgaagcttaaacaactctttggacgtgaaagtcttaccgctcatggtgtctcggaggttgctttcagaccacctttacacgcaatctaccaatatctgactgatgcgactgtttggcttgttggctgcaggcgatacgattttctggactcggctgggctaacatcctgggtagtaggcgctgatgaaaggacaagggatctgctcaaattaagtgttgtatttgtatcctccatattggtgaagactgatttacagtagtaagggaaaaggaaatggcagttgtgttgcatactatctagtcagacatagtagtctacgtgacttggaatgatgcggcgttaaactaaaaaggacagcgagagctgatgtaaattcggcagccgtataccgtaggcgcgtgcgttttctggtaagactctcttgcattgctagtgccctaagttgactcgaaacatctgtacctcgaaatgttgctgtgttaggtgatacctaaccttaatacagtttagatcgttatccttactcatccttttcctgaacccctgcatgtatcatcattgtgtgtgcatcgtatgcggcagcagctgtttacgaaaggaacagctagctactgcttttttctgttcctgcatgatgcaggccgtttacaagatcctgcctactgtacaaggctagatacttgctccttgccctcctggtggtgctgctggtggcgacggcgacgacgaagctacaagttcttgagcaatgcgtagaacagcagcatgacgaggaggccgatgacggcgcagaaaaccatcgtgctcctctgcttctcgtcgagggtgccttctggcagcaccttg

SEQ ID NO: 2091 - DNA, 1814 bp, Zea mays
cttcctttacccccacagcttgcgtggtctgtggtctcatctcactcacactcactctctctctcggcgacgtctacgccgagtgcccaggcattcttcaggcgcaggtcgctgccgccctacgccaggtgccccggtcttctttcgtcccttcgccggcgacgaccaccgccagtatagcggatggcttcgtcggtgcgggcgccatcggggtcggtgatcgccgtggcatcgtcctcttcctcagcagccttggccggggtgtgcggcacgggctcgccgtgcgccgcgtgcaagttcctgcgtcgcaagtgccagccggactgcgtgttcgcgccctacttcccaccggacaacccgcagaagttcgtgcgcgtgcaccgcgtcttcggcgcgagcaacgtgaccaagctgatgaacgaaatccacccgttgcagcgcgaggacgccatgaactcgctcgcctacgaggccgacatgcgaattcgcgaccccgtctacggctgcgtgggcgtcatctccatcctccagcacaacctacggcagctccagcaggacctcgcccgcgccaagtacgagctctccaagtaccaggcggcagcggcggcagcatccgcgtcgacggcgccgaccgggccgcaggcgatggcagagttcatcggcagcgcgatgccgaacggcgccgcgcacaacttcatcaaccttggacactcggcggcgctcggctccctcggaggctccaccgccatgttcgggcagcaggagcagttcggcagcaacgcgcagatgctgtccaggagctacgacggcggcgagcccatcgcgaggatagggatgaacaacggcggctacgagttcggttactcgagcgcgacgacgatgggcgggtctgcaggcgctgtctctggcggcctcgggacgctcggcatcagcagcccgccgttcttgaagtctggaaccgccggcggcgacgagaagcccagcggcggtcagtaggcggttccatccgtgtgaccgatccttctatccatccatccatccatcagtcttgtcaggtttggtttggttttgcatttgcatgctgcctgcacagtgttctagtctgttgtgttttgccttgtgcttccgattaattcgcgagtctggtggactactgttagtcagtttattttctaggtagaggcactaatgaagcatgactaaaataagggtttcattccatttccagggctaaataaataccttttgttgcatgatgctagttggagcgtccttgttcggaacaaaacattgtagtagaactgtttggatccataatatatattatcaatgatgactaggtgcatgcatgcatgcatatatatgtgtgtacttgaacactagagcttttctgagcttctttctgatcgacggaacgcgcagcatctgttttgtcaaactgttttgcttttagatcgggtggtacatgcacacgggcgtgttgaacagatctcttttcggtttttgcgtcgatcgtgtgtgtgcctgtgtggtcactggtgaacctaagcttccgtttcttttcttttcttttctttgacaagtgcgctcctggcctgctaaatctgttgaaacagaagagacgccattggctagcaaatcctggagctgttcttgtttgtatatatactatctcttggcagcacggtcctctaacaattaaccaagtgtattttttgtaaattaaaaaaaaatgtctatacgagggcacacagaatttggtggacgtgcatcgaccatctcaatcttatcatatgctggcatgcctaatgtcc

SEQ ID NO: 2092 - DNA, 1542 bp, Zea mays
tcgcagttatggcggccgaatcggccgccgtatcttaggcggggtgtggcgctggacgccagcgtccaaacaggcccttagccacaaacaaacatgcccgtgtagaatcactgtagcaataaagaagcgtctagagcgctcgtccggtctgaactgtggtctctgtacttccgttcacttcttcagcggcggcgtgacaacgagagcaagaaagtatcaaaacccgagagcaatggaggcggtggggaagagcgtgtgcgtgaccggcgcgggcggcttcatcgcgtcgtggctggtgaagctcctcctctgccggggccaatacaaggtccgcggcaccgtgcgcgaccctggtgctagcaagaatgctcatctcaaggtgctggaaggagctggggaaaggttgcagcttgtcaaggctgatttgttggactacagcagtgttgcttcagcaattgccggctgtgagggtgtcttccatgtagctagccctgtcccttccggtcggtcctccaaccctgaggtggaggtcataggtcctgctgtaacaggtacaaccaatgtgttaaaggcttgctatgaggcaaaagttgggcgagttgtggtggtgtcttcatgtgcagctgtctatgctaatcctaattatcccaagggtaaggtctttgatgaagactgctggtcagatgaagcttactgcaggaagaacgaggattggtattttgtttccaagacactggcggaacgagaggcttttgcttatgcagcaaaaacagggctggatgttgtaactatttgcccgtcattagtatttggacccttgatgcagcctacagtaaattcgagcagcaaaatcatccttaaatatttcacaggagatcgcgagactgttgaaaacatactcagaaatatggtggatgttcgtgatgttgctgatgctcttcttctggcttacgaaaagccagaagcgtctggacgatacatctgcagttcacatgcaataaaagttgctgatatgataaacatactgaagaccttgtatccatcttacccttatcccaaaaatttcgtggaagatgatgacaactctgtatacagctctgagaaactgcagaagctggggtggagcttcaagcctatagaggaatccctccgtgacactgttgaatcctacaaagcatttggcatcctgaattgaacatccagctaggactgttccatctgctgtttttgcctccgaactctttctgaataatgtatgtaggcagtgaaacagcattgccagcaggttaatcctggcatcatgctggagcagcactgtagttctatctttttcttttttttttccatccccaatactatctagtggttcaggaccaaataagtaggcccagtgctgactggtttatggcttgtggcctattgtcgctgctaaaactagaagcgttcgtactatcttgcactcatggccggccctgagaatttggaggccctggacgggacaaaaataggggcccattgacaataaacataacaagattatac

SEQ ID NO: 2093 - DNA, 3703 bp, Zea mays
atgaatgacgtcctgcgtacctacctccgccgatttgtgcttgtcttctttgacgacatcttgatatacaacacctcatgggcggaccacctccggcacctctgcgtcgtcctcaacaccctgcgccagcaccgactctttgtcaagaggtccaagtgctcctttggtgttgactccgtcgcctacctcggccacgtcatttcagcggctggcgtcgctatggaccccgtgaaggttcaggccatccacgactggccccaacctcgttcggcgcgagctgtgcgtggcttcctcggtttggcaggctactatcgcaagttcgtccacaattacggcgccattgcagcacccctcacggcactcctgaagaaagaggggttcatgtggtccgacgaggcaaccgccgctttcagtgccctcaaaagggcattgacaacagcaccggtgttgacattaccggacttcaccaagcccttcgtcgtggagtgcgacgcgtccacctatggcttcggggcggtgctcatacaggaggctcatccgatcgccttctttagccgatcggtggcgccccgccatcgctccctagcggcctatgagcgcgaactcatcgggcttgtgcttgtcgtacgacattggaggccatatctgtgggggcgacgcttcgtcgtcaagacagaccactacagcctcaagtacctcctcgatcagcgcctggcgaccattccgcagcatcattgggtgggcaagctcctcgggttcgacttctccgttgagtacaagtcaggagcaacgaacacggtggccgacgcgctctcgcgccgcgacaccgacgaggacggcacggggactctccaggcaatctcagctccccgcttcgacttcatcagccgtctccgacacgcccaggctactgagcccgctctggctgccatccacaacgaagtcagggcaggcacacgcactgatccatgggcggtggccgacgacatggttctctacgacaggtgcctgtacatcccactggcctcgccacttctgcaggagattgtggcggctgtccataatgatggacatgagggcgtccagcgcacactacaccgcctccgtcgtgacttccattttcccaacatgcggagtgtggtgcaggacttcgtacgggcatgtcccacttgtcagcggtacaagtcggagcatcttcacccgacaggtctcctcatgtcactaccgattcccaccgtcgtttgggcagacatcagcctcgacttcattgaagcactgccccgtgtcaacgggaagtcgatgatcctctccgtcgtcgaccgcttcagcaagtattgccacttcatcgccctcggccacccatacaccgccgagtcggtggcgcaggccttcttcgccgacattgtatgcctccatggcgtgccgcaatccatggtgtccgaccgcgacccggtgttcacctcgacgttctggcgtgagctcatgcggctcatgggcactaagctgcacatgtcgtccgccttccacccacagtccgacggccagatggaggcggccaaccgcgtcatcattatgtacctacgctgtttcacaggcgaccgtcctcgacaatggcttcactggctaccgtgggccgaatacgtgtacaacacggcctaccagtcctcgctccgggagacgccattccgggtggtgtatggtcgtgacccgccctccatccgctcttatgagcctggtgaaacaagggtggatgcggtcgcacgcaacatggaggaacgcgaggcattcctcgccgatgtgcgctatcgcctcgagcaggcacaggcggtgcagaaacgccactacgacaagcaacaccggccagtgacatatgcagtcggcgactgggcactccttcgacttcgccagcgagctccgtcctcaccgccacaacagacatcgggcaaactgaagccctgcttcctagggccataccgcgtcatcgagctcatcaacaacgtcgccgttcgcctgcagctaccaacacaggcccacattcatgacgtcttccacgtgggcaccctgaagaagtttgtaggggcacctccatccgccccaccgcccctacccgacatccatcatggggcgattgttccagagccagctcgggtggaacgcgctcgcctggcacgaggtgttcaacaggtgctggtccagtggcggggcgaactagaaacttcggcgacctgggaggacctcgacaagtttcgcgccacctacccagattttcagctcgaggacgagctggacctcgagggggggagagatgtcatgtggggccgcacctacacgcgggcccgcgacgccaggagggctgatgctagggcgtttaagggaggcgccaacagcagctcacctaaggaaggttcgtccaaagaggaaagtagcagcagctcaaccaaggaagggaagagcaatttggcaagtggtgactatggcgagtcagtaaaaccttcccaaactaatggttctactctgaaacatcaatcagatatgccaccaccaccggctccaccccctcggaacaataatttcaatgggaaggagaaacaaccagtccctgtttctagagaagatgatgatgacatttttgttggagatggagttgactatttagttcctaacaaggaaatgagtcagagccctgtctctgatatggatgaatccccacataaccatcagaagcagtccaatttcactgaaccgctgtatggcccagttccaccatctgaatctgctcaagcttggcaacaaccgaacacgtacgatgctgctgttcaagctcagatggcagctgctggatatcaaggtgactggtcaagctatgtgtatgcggaacagcagttgggttatccagaacagtatgtgcagcaaagcacccaggaatacgatgtgttagcggaccctagtatatcccaggatccgaggttcatgactcaggcggacaaggatcggggtttaggttctgttttcaaacgtgatgatcaaaggcttaatcagctgagggaaaaagatgcacgggagagagatccaaattttatttcagatagttactcagagtgttatcctgggtaccaggagtataataatgagattgcaggaagcgatgatgaagatgatttatcgaagatggatatgggtggacgggcaaagggccgtcttcacaggtgggactttgagactgaagaggagtgggccaagtacaacgaccagaaagaagccatgccaaaggctgccttccagtttggggtgaagatgcaggacggcaggaagacgaggaagcagaacaaggaccagaagctcactaatgacctccacaagatcaacaagatcctggctaggaagaagggcgagaaagatggggcggaagatggcggtcactacgacgatgatttacctagctcgaagaaacagcgtggctgaagctgtcatttttcgtttctcctgctggttatggcattctacgggagagttacgatggtgtttagctggcagctgtatcatgatgctttcatttaaggtggcatcaggacataatacatgtcaaaaactttacaaccgtggtcgatattttaacaggaacagaatgatccttggtgattttgtttgtcttgtaagacatatcgaaattgtataaaatgtcaaaaatctaaaatcttaactg

SEQ ID NO: 2094 - DNA, 3274 bp, Zea mays
atgattgccaaatctcccgtgttgaatattataaacttgcgatatctatatttctacgaggacccaaccctgccttctcttcttccttattcccagtttcccacagcttgcgcggtctcactctctctcggcgacgactacgccaaggcccaagtgtgccgaggtattttttaggctcaggtcgctaccgccctacggccccggtcttcttccggcccttcgccggcgacgagaaccagcagggcagcagacggatggcttcgtcggtgccggcgccatcggggtcggtgatcaccgtggcgtcgtcttcttcctcagcagccgcggccgcggtgtgcggcacgggctccccatgcgctgcgtgcaagttcctgcgtcgcaagtgccagccggactgcgtgttcgcgccctacttcccaccggacaacccgcagaagttcgtgcacgtgcaccgcgtcttcggcgcgagcaacgtgaccaagctgctgaacgagctccaccccttccagcgcgaggacgccgtgaactccctcgcctacgaggccgacatgcgcctccgcgaccccgtctacggctgcgtcggcgtcatctccatcctccagcacaacctacgacagctccagcaggacctcgcccgcgccaagtacgaactctccaagtaccaggcggcagcggcagcttctgcgtccacggcgccgacagggccgcaagcgatggcagagttcatcggcaacgcgatgccgaacggcgcgcacaacttcatcaacattggacactcggcggcgctcgggtccctcggaggctccgcctccgtgttcgggcaggagcagttcggcaacgcgcagatgctgtccaggagctatgacggcggcgagcccatcgcgaggctggggatcaacggcggcggctacgagttcggctactcgaccgcgatgggcgggtctggcgctgtctccggcctcgggacgctcggcatcagcccgttcttgaagtctggtaccgccggcggcgacgagaagcccaacggcggtcagtaggcggatcgatccatccactcccatcaatcttgtcaggtttggtttgttttggttttgcatgctgcctgcacgcgcggtgttttattttgccttccctttttctgattaattcgcggagtttggtggactacggttagtcggtttattttctaggtagaggaacaattatgcatgactaataataattaagggtttcatttcatggttaaatataccatttgcatgatgctagttggagctaacgtccttgttcaaacaaagtatcgtagaattgtttggatctacatattaaattgatggctaggtgcatgcatatgtacttgaacagcagggcttttccgaacttctgatcagcagaatccagcatctgcttttgtcaaactgttttgcttttagatcgagggtacttgttagtatccatgcacagcacacggtgtggccgtatggtgaacaaatctattttcagatttgcgctcagctcatcgtgtgtggtgtacctaattaagcttccgtttttttgtattctttcttttttataaggacgctcctgttaaatcgtttgaaacagaagcaacatcattgattattagcaaatcctgaagaatgcatgcaagttcttctttatctgtatcactatctcttagcaccgttctctaactttagatgcacgtacaagtctaatttttttttataaaaaaattgtctatatataggagcacacagaatttttggacgtgtacatcaatcatcacatgctcttatgcctgtggattggtgttcgactagtgaattcgagctgtcctccatattttccatactagaaatgctcctatatagtcctatatatcaagaacacgcacgggtgtgttctccgtgaaatatcagtgtatcagtaaccgggcatcatatcaccaactagctagcgacagcagtagctactacaatagggtgtagctactataatagcgtgttgggttcgagaaataagatagttcattatttttttactcctcattttattgtttagttcgtggaaatgaatggattgatccatcatcattttattactcatatgttaataattcataataatgaggaatacgtttgttccactaaatttatgtaataaactcatgatgcatcatcatatatagaacggattgactcttcaaaccaaacactctctacgtatctctaggaacatttctttctttctttaacttaaaactggttcgagaaaagagaactgcaatttcattagtttgtaaagttaacagagcttgcagagaaaaaacatatgtccggaatgtgctgtcagctttgaactgtgctaataatataagtaccccaacacacagaagcttctgtgttgaaatagtatagctgtattccattctttgtctattcataagtgggaaaaaaacgtacctgcatttagcatatgcagtttctatttacgacagtttgtgaacagctcatattattgttcctatatatatatatatttctcgtgtctaacaatcatgacgtctacatttcagccagagagcactcgagctcactcatatatagccagcatatatagttaaggtttttttttgtcagctacataaataccaactgacacagacatttgaaactgttttttttgtgtgttcaggttactgaattgaaacgagaaaaaaaatccataaagttctgaagactaagtggatcgagcctgcgcgcgcgagggttgtcgtaaaatgtccaccgctattaggagggctaatgatgaattccccgtcgattgtagctacatgcatgaaggagtacacacgcatgcctatgttgtttgaattaatcaaattgcttgtttgttagtaattatattaccgcctccaactaggctccgatccgtacgtccacatgatcatcagctatttcatgcaagtgtcctactatatgttgttgctgttactgaaacgcatgcatgcttgtcccgaaccctctttttcttttttttctttttctttttttggtctcgcactcggacggacggacgactagcgcccgtgtgtttctagttttctgcgcgctcgcttctgctgctagtgctactgctccatgtgtattattattgctaggttggctatatatgctacgaagttgacctttggagaaggtgcagttcgcttatgaacacaatagacattgggtggacgatgcgcatctgcgattccggccgtgtgcgtgac

SEQ ID NO: 2095 - DNA, 1424 bp, Zea mays
gccgattcacggcgtctcggccgattccatgtgccgccgctgcgcctgctctagttccggagggcgtcggcctcctaagcagaaacgatgccagcggttgtccaaaaccacagacatcccccaagcccccaacaagaaaccagaggcgagaggaggcagctgcagccggccgctccagctgagagcctcgagacggagagggatctccggatagctatgggtgacgcgaagacttcggtactaatcacgatgcccagccgcgaccgcgaccgggaccggctcgtgcctaccgctgccgttgccacccatgagtccccgtccgccctcactgtcggcgactccgatgacgacaagagcaagccctcctctgcttccgccgccgctgccgccgcgcagaccggccgtgaggcgttccataaagttgtgcatagctgggcgtccaagaagttcatgaccggatgtgtcatcctcttcccaattgcagttacattctatgtgacatggtggttctttcgctttgtggatgggtttttctccccaatatatgctcacctgggaatcaaaatatttgggcttggttttgtaacatcgatatctttcatttttgtggttggtttattcatgtcatcttggctgggagcatctatccttggccttggagagtggtttataaaacgaatgccatttgttcgccatatttacgatgcatctaagcaaatcagtgctgccatttcacctgatcaaaacaagcatgcattcaaagaagtggtcatcattaggcacccaagaattggcgaatatgcatttggatttatcacttcggaagttctacttcagggttattctagtgaagaacagatgtactgtgtttatgttccgaccaaccatctctatattggtgacatatttctggtcagctcaagtgacgtgattagaccgaacatgtctgttcgcgaaggcattgaaattgttgtctctgtgggcacatcgatgcctcaagtattgtcgattctggaaactgagccaaaccagttgaacaggatcagatccacccgaagctgagatgacttcacattttgtaatttcgtgttacaaagtccttgttgtacaagagtaggttctgacagattgtacagttctcctgggtagaaagcaaaatctgtttgtgaacacatctcacctgaacgcgattgcttgtatggccgtctcagcttcttcagaaatgtaacttagcagttgagtagagttgacctatgttaagagttgtcaagttttgaagtggaagaattttcttaaccatttggtttatgtgtccagggagtcttgtgaggcctgtttgaatgggagggattcattttttttacagtctggttcaaacttgacctgaattccaaaaagattattcaattacatgatcgtgtaaa

SEQ ID NO: 2096 - DNA, 2332 bp, Zea mays
ccggaccccactggtacaccgacgcgcacggacgctccccattatggccagctgcccagctacgcgtacggcgtaccacaccaccagtgcagcaccacactgactggacacagtagagcagagtagaagagtcctcgagcggccatcaccaattccccaagctatcttttttttttatgagcaagcaccaggcattccattgccagtttgccactacaagtagttgcagcagcagctaatcagtcagcaactaggcaccaaaccatcacttcactcccacctctctgcgccctgcacctgcacataggtactacgatcaccacacgcgcaccaagcccaagaaccgtgcgcgcgccatggccgagaagccgcctctgtcggccaagcctcccctgccgtccaagccgaggcctaaggcggcgtcggcggcaaggccgacaacgacgacgccggcccccggcagcaggccggccgcgtcgcccttcaagaagcccacgctcgcgccgccgcaggtgctcccgctcaagccgccgccggcgcaccagtaccgccagcagcagcagcagcagcacccggcgcccccgggcggtgcccggaagccgcgggcgtaccgccagcagcagccgcacccgcaccgccgcggccgcgggtgctcgtgccgccgcgcgtgctgcctggccacgggcctcgcgctgctcgcgctctgcctggcgctggccgccgcctgcctggcctacctctactaccggccgcgcgcgccgtcgttccacctgcagccgctggcccccgtgcgcctccgcctcggcagcaacgcctccaccgtggacgccaccgtcggcgcccgcgtcgtgtcgtggaaccccaacgagcgggtcgagttccggtacggcgacggcgagggccgcgtcgcgctggccgaccccgacggcgacgtcgcgctcgggtgggcccccgtgcggggctttgcccacgcgccgcgccgcgtcgccgccgtcgcgttcgtggccaccgccaggggcgtcgtgctcgacgacgccgtcgcggcgcgcgtgcgcgacaggtaccggcggcggcggcaggggttcagggtggtcgtggacgcccacgtcggcgtccgcgtcggggcgctgcgcacggggatggtgccgctcaggctgctgtgcgatgacggcgtgatggcgccgcgcgctgtggggtcgtccgatggggccgtggtggggcccatgaccaagtgccaggtgctcctgttcagagtaagatggtttagcctgaactgagggaaaatctggagcaaggcagctatagctgaccatcgagctgatacccagaggcgccggagctgcagacgccgtaaattatctgcatgtgtttgccgacaagatgaaggtgattgatttgctacggactttttgattggtgatggatgcatggtctgaagactccgaagcacacgtagaaaacaaagtttgtaactgtatattacactccaggtcccaattcttttgattgtgtggtgtatacattaatacatagcaggaatggaaagaacgatgggtgtgttcctgtcagtcgaaagttgaaacacatacaattgtttctccattgccttaaaactagtattgagatgacgactctgatctgaatttgagcaatctgccaccaaggtttaaagcagcagcaacaacaacagtcttctaattccaaataagttggagtaggctagaattgaaacctaaccataatttacggttcagacacaatgggtagctcttttttttgtgtgaaattgatttagtactacttgtatatcttcagagatgaggtgaggagagttcctgttctggctgtacatagatattaagatatatttaagtatagaacatgaaccattggctggtcgaaagtcacatgttattcatgcgatatcaaactgccaatgttcagaaacaaggtaaatgtttttgttaaaaaagaaattaagtaaatggtgcttacacatgatgtttcgcatttcaccattcaaacattccaatgtcacaagcatgagtaccgacaacaaaaagccccgcatgaaccttcagatgattggtatagtatcatcagagcacacatagcaaaaaggtttccggtgaaaaatacccacgcaatccaatttggaaaactgctccgacaaaacttcaatactgatttcctggttcatgtttttattagaagccttccttcaaggcataaactctgctacggaaagacggtggcaatttgtttattgccgcatcaatttcctgcaaacagaatagccataactaatgagatttagattttcggggcagac

SEQ ID NO: 2097 - DNA, 1805 bp, Zea mays
tgatcctgccagtagtcatatgcttgtctcaaaagattaagccatgcatgtgcaagtatgaactaattcgaactgtgaaactgcgaatggctcattaaatcagttatagtttgtttgatggtacgtgctactcggataaccgtagtaattctagagctaatacgtgcaacaaaccccgacttccgggaggggcgcatttattagataaaaggctgacgcgggctctgcccgccgatccgatgattcatgataacttgacggatcgcacggccttcgtgccggcgacgcatcattcaaatttctgccctatcaactttcgatggtaggataggggcctaccatggtggtgacgggtgacggagaattagggttcgattccggagagggagcctgagaaacggctaccacatccaaggaaggcagcaggcgcgcaaattacccaatcctgacacggggaggtagtgacaataaataacaataccgggcgcgttagtgtctggtaattggaatgagtacaatctaaatcccttaacgaggatccattggagggcaagtctggtgccagcagccgcggtaattccagctccaatagcgtatatttaagttgttgcagttaaaaagctcgtagttggaccttgggccgggccggccggtccgcctcacggcgagaaccgaccggctcgacccttctgccggcgatgcgctcctggccttaactggccgggtcgtgcctccggcgccgttactttgaagaaattagagtgctcaaagcaagccatcgctctggatacattagcatgggataacatcataggattccggtcctattgtgttggccttcgggatcggagtaatgattaatagggacagtcgggggcattcgtatttcatagtcagaggtgaaattcttggatttatgaaagacgaacaactgcgaaagcatttgccaaggatgttttcattaatcaagaacgaaagttgggggctcgaagacgatcagataccgtcctagtctcaaccataaacgatgccgaccagggatcagcgggtgttactaataggaccccgctggcaccttatgagaaatcaaagtctttgggttccggggggagtatggtcgcaaggctgaaacttaaaggaattgacggaagggcaccaccaggcgtggagcctgcggcttaatttgactcaacacggggaaacttaccaggtccagacatagcaaggattgacagactgagagctctttcttgattctatgggtggtggtgcatggccgttcttagttggtggagcgatttgtctggttaattccgttaacgaacgagacctcagcctgctaactagctatgcggagccatccctccgtagttagcttcttagagggactatggccgtttaggccacggaagttttgaggcaataacaggtctgtgatgcccttagatgttctgggccgcacgcgcgctacactgatgtatccaacgagtatatagccttggccgacaggcccgggtaatcttgggaaatttcatcgtgatggggatagatcattgcaattgttggtcttcaacgaggaatgcctagtaagcgcgagtcatcagctcgcgttgactacgtccctgccctttgtacacaccgcccgtcgctcctaccgattgaatggtccggtgaagtgttcggatcgcggcgacgggggcggttcgccgcccccgacgtcgcgagaagtccattgaaccttatcatttagaggaaggagaagtcgtaacaaggtttccgtaggtgaacctgcggaaggatcattg

SEQ ID NO: 2098 - DNA, 2705 bp, Zea mays
gagtcgacggttcagaaacctgagaatgcggcaaggaagctgacgaggcgggaggccctccacgggcgcacgctgccgaccctgatcttctgtgaagggttcgagttggagcacgcctgtcgggacccgaaagatggtgaactatgcctgagcggggcgaagccagaggaaactctggtggaggctcgaagcgatactgacgtgcaaatcgttcgtctgacttgggtataggggcgaaagactaatcgaaccatctagtagctggttccctccgaagtttccctcaggatagctggagcccacacgagttctatcgggtaaagccaatgattagaggcatcgggggcgcaacgccctcgacctattctcaaactttaaataggtaggacggcgcggctgcttcggtgagccgtgccacggaatcgggagctccaagtgggccatttttggtaagcagaactggcgatgcgggatgaaccggaagccgggttacggtgccaaactgcgcgctaacctagaacccacaaagggtgttggtcgattaagacagcaggacggtggtcatggaagtcgaaatccgctaaggagtgtgtaacaactcacctgccgaatcaactagccccgaaaatggatggcgctgaagcgcgcgacccacacccggccatctgggcgagcgacatgccccgatgagtaggagggcgcggcggccgccgcaaaacccggggcgcgagcccgggcggagcggccgtcggtgcagatcttggtggtagtagcaaatattcaaatgagaactttgaaggccgaagaggagaaaggttccatgtgaacggcacttgcacatgggtaagccgatcctaagggacgggggaaacccggcagatagcgcgatcacgcgcgtcacccgaaagggaatcgggttaagatttcccgagccgggacgtggcggcagacggcgacgttaggaagtccggagacgccggcgggggcctcgggaagagttatcttttctgcttaacggcccgccaaccctggaatcggttcagccggaggtagggtccagcggccggaagagcaccgcacatcgcgcggtgtccggtgcgcccccggcggcccttgaaaatccggaggaccgaattccgtccacgcccggtcgtactcataaccgcatcaggtctccaaggtgaacagcctctggccaatggaacaatgtaggcaagggaagtcggcaaaacggatccgtaacttcgggaaaaggattggctctgagggttgggctcgggggtcccggccccgaacccgtcggctgctggcggaatgctcgagctgctcgcgcggcgagagcgggccgccgcgtgccggccgggggacggaccgggaacggccccctcgggggccttccccgggcgtcgaacaaccgactcagaactggtacggacaaggggaatccgactgtttaattaaaacaaagcattgcgacggtcctcgaggatgctgacgcaatgtgatttctgcccagtgctctgaatgtcaaagtgaagaaattcaaccaagcgcgggtaaacggcgggagtaactatgactctcttaaggtagccaaatgcctcgtcatctaattagtgacgcgcatgaatggattaacgagattcccactgtccctgtctactatccagcgaaaccacagccaagggaacgggcttggcggaatcagcggggaaagaagaccctgttgagcttgactctagtccgactttgtgaaatgacttgagaggtgtaggataagtgggagcctccgggcgcaagtgaaataccactacttttaacgttattttacttattccgtgggtcggaagcggggcaccgcccctccttttggctccaaggcccggcctcgccgggccgatccgggcggaagacattgtcaggtggggagtttggctggggcggcacatctgttaaaagataacgcaggtgtcctaagatgagctcaacgagaacagaaatctcgtgtggaacaaaagggtaaaagctcgtttgattctgatttccagtacgaatacgaaccgtgaaagcgtggcctatcgatcctttagaccttcggagtttgaagctagaggtgtcagaaaagttaccacagggataactggcttgtggcagccaagcgttcatagcgacgttgctttttgatccttcgatgtcggctcttcctatcattgtgaagcagaattcaccaagtgttggattgttcacccaccaatagggaacgtgagctgggtttagaccgtcgtgagacaggttagttttaccctactgatgaccgcgccgcgatagtaattcaacctagtacgagaggaaccgttgattcacacaattggtcatcgcgcttggttgaaaagccagtggcgcgaagctaccgtgtgccggattatgactgaacgcctctaagtcagaatccaagctagcaaccggcgcctctgctcgccgcccgccccgacccacgttagggcgttcgcgccccaagggcccgtgccattggctcagcccgcccggccgacgcgccgcggcgggccgcctcgaagctcccttcccaacgggcggcgtgctgaatcctttgcagacgacttaaaacgcgacggggcattgtaagtggcagagtggccttgctgccacgatccactgagatccagccccgcgtcgcacggattcgt

SEQ ID NO: 2099 - DNA, 2005 bp, Zea mays
ccccctccccctcccctccgagccattggcaattttgccattatcatttgtgggcttcgccagtatgccatcagacccacaaatcatagacacagacggtcccaccagtcatagacacgagatggcataataacagacagccaaatttgagagtggcaaaacagcaaatttctcctcccctccctagtccctaccaaattcgccaccatccccatctatattatccagtcctctgctcatcctatacctttgctttgcctctccttcacttcacttcaactccatcgcccgttgcagcggcggcggcggcaatcatatcacccagacgcggacgccatagtagattagattgatctctccgtggggaggaagaggagcaagagccatgtccagccccacgcacgtccgcaaggccatccgcttcgcctccctgcgggcaaagatcgcgcagcagggtaagacaggcctggcgctgcgcctgctcctcgccgccgcactcgccggcttcctcctcgtgttcgccgcgcgcaccctggtcacgccgtcccctgccccgacctcgtcgtcccaggcgcaggaatatcaccaggacgccgcgccggagtgcggcaaggggaacgcgggcctgccgctggcggtggcggaggcgctggtgcactacaccacctcgaacgtgacgccgcagcagaccgcggacgagatcggggtgtcgctgcgcgtgctgcagcgccgcgcgccctgcaacttcctcgtcttcgggctgggcctcgacagccctatgtgggcggcgctgaaccacggcggccgcaccgtgttcctggaggaggacgcgtcgtggatcgccagcgtgcgttccaagcacccggggctcgagtcctaccacgtcgcctacgacaccgtgctcaccgacgccgactcgctcctggggctccgcgaccacccggcctgcgtcgcgcagccagacctcgccgccgccgccgccgcgtcctgccgcctcgcgctcgccctcaagggcctcccgcccgtcttccacgaactggagtgggacctcgtcatggtcgacgcgcccacggggtggacgccgcaggcgcccggacggatggccgccatctacaccgccggcatggcggcgcgcgcgcgcaggcccggggacggacccaccgacgtcttcgtgcacgacgtcgaccgacccgtcgaggacaacttctccaaggcgttcctgtgcgagggatacctcgccgagcaggtcggccggatcaggcacttcgtcatcccgtcccaccgtgagaaggacggcacaccattctgcccttgacaatctttattttgattctttgagagtttgagtgagagccatccatccataatccatctctctttttttttttgcttttcctgcgctctgccttggctttatttacatacatatatatgagacgaaaaaacactacagcatgcatatgcagcagccgtcagcaactggagctccttcatcattctttctaattttgcgggtgaaccacaccatgatggagttaagaggcgggtctgcgcacgccgcccgatcaggaagtggactcgccagattcgacgtcggatgcattaattattctatcttctttgattgttctgctttggatcggcggtgcacgttggctgatggtggttcatcaagaggtggagcttgtgatgtgacgtgggcgtcgtagccaaactatggtcatttctgcatttttttgaaaagaaagatattaagagttttcaaaaaccatacaatagagttgaagcaaagtcttggaaagcatcttccgaccactgttttgcaagtaaacacacatccaacaaaaaggagactctaaacacactctagtgacccttaatcttaagactagacggccacccatgtgcccaggagaaaatatccatagccactcgcgcttagaaatgtgatgcctccatagcaagatcttgtgaattcgagcatcggtggatagccaaagataac

SEQ ID NO: 2100 - DNA, 3368 bp, Zea mays
acaaaatttcttccttcccgtcgccatcgcgcggtagcatcaccatacctcttcatctcgctcgctgtcactccgctctgcgcgcttgggtcatgcgtgactcacacctacgcattctgtgagttcggaatcagatccgatagagttcccagagttagagttagctcgggtacagtccgtcggttgcctcaaagcttatcccggcatcccgcggaatctcgctttgcgatgaaaccatagctccacccaattcttgcggcttcagagaaccagcgctccctgccgtcgctgtccctcgttctcccagcgcctctcattcagtcatccctcctctccgaactgaccgatgcggttggtgccaaggttccggccctctaatgctgcttgaactccagccttctaatgggcgcggctcagttggtgattctgttcttggcccttgccactgcggtgggggcgccgccgagcgaggtggccgtgggcgctctcttcacgtacgactccacgattggccgcgcagcgaagctcgccatcgagctcgccgtcgatgacgtcaactcggacggcaaggtcctcccgagaacccaactcaatttggtgccccaggataccaactgcagcggatttcttgggaccatcgaagcgttgcagctaatggaaaaaaatgttgttgcgctgattggcccacaatcctctgggataggccatgtcatctcccatgttgttaatgagctacatgtacctcttctatcatttgcggctacagatccaactctttctgcatcagagtatccgtacttcatcaggacaaccataagtgactacttccaaatgaatgctattgctagcattgttgattattatcaatggaaaagggtgactgctatattcgttgatgatgattatgggcgaggtggtgtagaagccctcggtgatgcgcttgcattaaagagggcaaagatttcatataaagcagctattcctccaaattcaaatacagacgtgatcaacgatgtactatttaaagcaaatatgatggaatcaagggtcatgattgtgcatgtcaatcctgacacagggatgaggattttttctgtagctaagaacctgcaaatgatggccagtggctatgtctggatagtaactgattggctagctgctgtccttgattcctcagcaaatagaggtcttaaagatatgagtcatattcagggactaattgttctgcgtcagcacattcctgaatctgaagccaaggataagttcatatctaaatggaataatgtggctcataacagaaatattacttctggcttgaactcgtatggtttttatgcttatgactcggtttgggctgttgctcgtgctgtcgataaatttctcagtaatgggcaacagatcaacttctcaacagatcccaggttagaagattcaaatggcagcacgttgcacctatcaagtctcaagatatttgacggtggtgagcagatgctgcatcaacttctcctcacaaactttacgggtgtaacaggtccagtccagtttgattcagagcacaatttggtacgcccagcgtatgatatccttaatgttgttggttctggctcccgcttgattggctattggtctaactattctgggctttccgtggctgctcctgaaactttgtatcagatgccacgaaatacatctacaagtgcccagcagctgcatgatgtggtatggcctggcgattccactacgaagcctaagggctgggtattcccaaacactggccttcctctgagagttggggttccaattaaagcaagctttaaggaattagtgtcaggcagaggagataacatgagtggttactgcatcgagatattcaacgcagcaattaaacttcttccttacccagttccttgccaatttataactattggtgatggcacaaaaaaccctagctatattgacataattagaatggttgctgccaattcacttgatgcagctgtaggcgactttgctatagtgagaaatggcacacagcttgcagaatacacacagccttatattgagtcagggcttgtgatagtagcgccggtgaaacatgtaacttcaagtgcgtgggctttccttgaacctttcacattggagatgtggtgtgtcacagttgctctttttattttggtgggcatagtagtgtggcttcttgaacatcgtactaatgaggaatttcgagggtctccaaggcgacaagtcataacaatgttatggtttagcttctcaacaatgttcttttcacacagagagaacactgtaagcacacttgggcggttcgtgctgataatatggttgttcgttgtgctgatcatcacttcaagttacactgctagcttgacgtcaatcctcacagtccaacagctctcaactggaattacagggattgatagtttggtttcaagttctttacctattggataccaggctggaaaatttaccaaaagatacctgactgaaaacttcaatgttcccctctctcgactggtaccactgaattcgatccaggaatatgctgatgcccttaaccgcggaccaaaaaatggcggtgttgctgcaattgttgatgagaagccatacattgatatcttcctgtcaaactactgcagcttcagaatagtgggggaggaattcacaaaggaagggtggggctttgcattccagagagactcccccctcgctgcggatttatcgacggcaatccttcaactttcagagagtgggcaacttcagaggatccacgacgagtggttctcacggtctagttgctcctcagatgacagcgaagtgggagcaaccaggcttggcctcggaagcttttggggccttttccttgtgtgtgccctgatatgcctcttcgctctgctggtgttcttcatacgagtctgccggcagtataaccagtactccagttctgaagctgccggcgagccccagcacagctgctgcggatcctgtcctaagacagcggcgaccatcacgccttggcagcttcaaagacctgatccagttcgtcgacaagaaggaggaggagattaagaaaacgatgaaacgaagatcaggcgagaaagatagccaagctgcaggattctcatacgctcagtcagtggcttcagcataggacattgctccaaccatattgaattaggttatctccaaaagcataggacattgctccaaccatattgtaaatagtagtggtgtactgtgatcagaacgaagatcagggttctcatacgctgtttgtatttgacaactgttttcggtgattggtcattgctccaagctgtgcgaagtggcttattttagttttttttttcctg

SEQ ID NO: 2101 - DNA, 1515 bp, Zea mays
ccgctgcggcgtctgacccactgccgcaaatcccaacaaagcaagggcagaaaggaagcgggcaaaagcagccccgccttccctactactactactacacaacccgctacccgccggttctcccctctgcccccgctctgtcatctttgactgcccctgtccggtctcctcccctccatcccactccacgccacccccacaccccaccggccaagcaaacacgctgcacatttcagttcagacagtccaagaacagcaccaagaaagactccttgccgctcttcttgcttggctactgactaggagagctccctgccgctggttgatcaacagagaggcaggcggacggcatggtcagctccctgccgctgtcctcgttgctgctgctgctgctgctgctctccgcagccagcttcggcggcggcgtaaggctcggcgatggtggctacgaggactggaggctcggcaccgccacctacgtcaaggagttccagtcacaccctctcaatgacggcggtggcgcctgcgggtacggcgacctggacatcttcaggtacgggcgctacacggcggggctgagcgcggcgctgttcgggcgcggcggcgcctgcggcggctgctacgagctgcggtgcgtcaaccacatccagtggtgcctccggggcagccccacggtggtggtgacggcgacggacttctgcccggccaacatgggcctcgccgacgacgacgccggcggctggtgcaacttcccgcgggagcacctcgagctgtcggaggccgcgttcctccgcgtcgccaaggccaaggccggcatcgtgccggtgcagttccggagggtgagctgcgacagggcgggcggcatgcggttcaccatcaccggtagcgcccacttcctgcaggtgctcatcaccaacgtggcggcggacggcgaggtggcggccgtgaaggtgaagggctcgaggacggggtggatcccgatggggcggaactggggccagaactggcagtgcgacgccgacctccgcgcccagccgctgtcgttcgaggtcaccggcgggaggggcaggacggtcaccgcctacagcgtggcgccggcggactggatgttcgcgcagacgttcgagggcaagcagttcgccgagtagagatcgacgccgaaaaccaagtctccggcggtggtgatgtaagtagaattatacgggtggcttcttgctcgcgagtcgtgaccggtgactcgacaaaacgagacgtattgaatggcgaaaggatttccagtcataagaaagtggcagtccaaatatgcgtgatgatggatcgtcggtaacggtacaagattaggcgatcaccgtgagttcagacttgtgtactctggcttaacgggagagaacgcaatgtgaaaaagtgtgtctggtatcgtaattaggggtatctagattatgtaccataaaccgcgtttcatccgaggcctttctcgggggtcgccttaattcggcttcgtccgagcctgccctc

SEQ ID NO: 2102 - DNA, 1840 bp, Zea mays
cagagcttctccttccttctcacgttacctctggtaacactagtgctggatttgttttgaaaccacaaccatatggatgatgtccgtcgccagctgccggcaatccagctcctcctcggccagagcgatgctccgtccgtcgcgttggcgtcgcgatcactccgatgccgccgtggtgaggacatgttgacctccactccaagcgagactgcgcgcgtccaaccggctggcggcagctcggcaggagcgcatggcgccggagtgcagccgccgcgacgctccccccagcgcgacgcttctgatcgtttgcgttgcactctacaccgtcgtcctcgccgttgcctccagtccgaaggcgttggcgtcctcttcggcgctgtcctctcgcgctcgcgcagcgccggaacagcagctgctcctgtccgctgatctcaccacggaggagagcgcaagaaggccgggggagacgcggagaccgccgagcgtggagcaggagctcgacgtggcgcgagctgcgatccggcgcacggcgcagcggcacggcgatgccggccgagcaggcgacggcaatgtcagctccgcgaacacctggttcgacgctggagtggagtatgctctcttggccagcgtctaccgcaatccggccgcgttccaccggagctacgcggagatggagaagctgttcagagtgtacgtgtacgaggaaggcgagccgccgatcctgcacgccggcccgtgcaagaacatctacaccatcgagggccgcttcatcgagcagctcgagctcatggcgccgtcgccagcctcgtcgtcgaggcggggaacccggcgtcggtctgccagtgacgtccggacgtcggaacccgcgcgagcccacgccttcttcctgccgttcagcgtctctcagatggtgcagttcgcgtaccggcccaacacctacgacaaaacccctctccgcgccatcgtcgccgactacgtccgcgtcgtcgcgtcccgacacccctactggaatcgctccgccggcgccgatcacttcatgctcgcctgccacgattggggtccggaggcgtcgacgggacacccggagctgcacgcgaacggcatccgcgcgctctgcaacgctaactcctccgagggcttccggccgtggcaggacgtgagcgtgccggacatcaacctctacgacggagacatgccgcggcagctcctggcgccggcgccaggggtgacttcgcgtccgttcctcgccttctttgccggcggccggcacgggcacatccgcgacctcctgctgcggcactggaagggccgtgacccggacttcttcccggtgtacgagcacaggcatgaggacggattcgactactactcgttcatgcggcgggcgcgcttctgcctctgcccgagcgggtaccaggtggcgagcccgcgcgtggtggagtccatccacgccgagtgcgtgccggtgatcctgtccgacgggtacgtgctgcccttcgctgacgtgctgcggtgggaggcgttttcggtggcggtgccggttgccgacatccccaggctgagggaggtgctggagcggataccggcgccggaggtggagaagctccagcaaggagtgcgcctggtgaagcgccacttcatgctgaaccagccgccacagaggctggacatgtttaacatgatcctgcattccgtatggctaaggaggcttaacctcaggctagatcactgatgtcacacaccaaaaatttctatttcagatcatgaatacaaaacataaaataacaatatttcattttttatttttttaaagattagttaggatgttgatacttcgagc

SEQ ID NO: 2103 - DNA, 1705 bp, Zea mays
aaacgtaaccattccctcccaacgaacacctgctctgctctcgcctctcgccgtcccaatcccctccgaaaatgcagcgatccggtcgtcagcagttgccgcgccgggccccggcagcgatggacctattccccgacggagccttcgtgcggctacagaaccgcgttcagcagaagtacctctacgccgacgacgacggggagggggtctccgttcgcccgtacggccacgtcttctccctgaacgcggtgtggcgggtgcaccgcgtcctggtcgccgggaacaacatcgtcctcctccagggcgtcgcctacggccgctacctcgcgatctcgcccggcatggcgccgcccggctaccgcggccgccgcgccgtccagcgagactacgcgggggacaacgtgggcgccctcatgtggaaccccttgcggatagtcgacggcgagagatacgtccgcctgcgcaacgagttcaaccgcaacctcctccgcgccaacggcaggtaccgcacctggcacaccgccgtcaccgcggatatcgacgactacggcaggttgagcacgatgatgcagtggacggtccacagattccaagtggtaccggggctaccaccccttccacgtccgactgtgtatcttggaggtcgccgtggcctgttcgggcggcgcatgcccgaggcggatgaacggcggacgatccggcacgtgcgggcgaacaacgaaggggacttcgaccaggactctaacaactggcccacattcaatttcttcggccggtccgtgttcaacctgaggatccaggtggggatgcgtcagcccggcggggaagtctgggccatcacaatggccgtgcggcccggctcgcaagggcggctaacccctctggtcaccgacctgcctaacagcgtagataacatggacatcgttgtcttcgacaccggatcacaaggtgctcagaatttagtgtacccagctatatgatgcagcgtagaggactacgagagcagaaattctgacaactttgtaaatcatctactcggcaatcaaaagcgtttaagcattggcgttcccgagacagtgacaagagaattggctgtcgccttttgttaaggcagtttccgaaaatcgagcgactcttttgtaatggtggttagatttgatgcgttctactgatcggaagtactttgaattgaccctctcaagttgagaacctgaaaactgacgaaaagcattatgtggagttaaatgatgaatgattctgcgaagtaatattggtcgcagttaccagcatcttcatctttgttgggtggtggactgatgtcaagaatagattctactgatttttgttcggtcgcaacttgttagtggataggcctgaatgtcgtgcatgatggtattgagcagttgttccagcgtctgcgcttcgtgtaggactcgccgacatctttcatttgtatactgttgtctgctgctagctttcttcgtcggtatggtcatgtgagggctcttccaaaaaaaatgacagtgagctgaatgcactgcatcatggtcatgggagggctcttccaaaaaaaatgacagtgagctgaatgcactgcatatatgaacaagagaaggaaaagttccttcggaaagtattcatatagcgcaaagtttcttcagaaatgatgatgaacagctttgattggatcaggtacattgtgcaa

SEQ ID NO: 2104 - DNA, 5428 bp, Zea mays
gtgctccacgcgtccagcgcgagccaggcgtccttcctttccttctccccgccgtcgtcgtgtcctcatccagccgtgcaggcagtggcggtggaccggagatctccgctccagctccgattgagcccaagagaagtcgttggtgcagacagccttggattggatgtggaatgaggcgatggcatctgacggatcatcctcctctaccttccgggggttgtacggcaacgtccacggcccggcggtgctcactggcgcggcgttcgcgctcgtggcgctcctcatctcgctctggctcatcctgcagcacctcagatcctacagcgatccagctgaacagaagtggatcatagctgtgctgttcatggtgcctgtttatgcctgcgaatcgataatctcactgtggaactcgaagctctctctggcctgtgatatattacggaattgttacgaagcctttgctctgtacgccttcggacgatacttggtggcttgccttggcggggaacggcaagtgttccgtctgcttgagagcaggaagagggacgagctgagccaggagttgctagacaaggcacgagctcgtaaccgcggcggagcgtacagtttcttctgtgaccctgacgctctgggagagaacctgtacacgattataaagttcggccttgttcaatacatgattctcaagacactatgcgctctcttggcgttggtcttggagccttttggagcctatggagatggcgaattcaagtggaattacgggtatccttacattgccgctgtcataaacttcagccagacatgggccttgtattgccttgtgaagttttacaacgcgacgcatgaaaagctacaggcgataaggccactagccaagttcataagctttaaggccatcgtgtttgccacttggtggcagggagtcggcattgcgatcatctgccaaactggactcctgcccaaagagggcaaagtgcagaacgcgctacaggacttcctcatctgcatcgagatggctatcgcagcggtagcgcatgcctacgtcttcaccgtggagccgtaccagcacgtccctgctctacctcctgatcacggggaagtcatgtgtcaggaaagcaaaatggaggtggaggtggatgtcgacgacgatacaggcggtacaccagcttccattgcgcagcaggagacccatgtcgaagctccaggagggacgagcatcaaggagagcgtgcaggatgtcgtcctcggcggcggccagcatgttgtcaaggatgtcgcgcttacgatctcacaagcgatcgggcccgtggaaaagggcgtcgggaagatccaggagaaattccaccacatctcgctgaagccaggggacaagaaagagcctcaagttgctgtggaggagcacgtaactgagaacgtggtggatggcaaacctgctgttgcggtcaacgcggaggttgaagtccaacagaaggcgcaggatcgtcgtggcgaggaagaaggtgtgcaactcaaaagaacagagaaggaaggacgattgtcacacctgagagtgccatggtggaagatgcaaaggaagcgggagcaggtgcaggagcaagcggagtcgaaggctgaagctgtgcgagggccggacggtgaacaggggtgattgtgttggcctgcatctaaatgggctgtaagaccaactccagcagcctccgtatacggctctccatccccttttttcactgcgcagtacactattcatcagtccagcagactccgtatccctctccctaaaaagcacgctgtgtacttatactcctcttttccacgtcttctctcctctccgtacaagtctgagaaatggtgcaattaaaagccccgatagagtgtaaatacggagtctgttggaatgcaccatgcaaaaaaaccactttatctatgatcacgtctgcttattttacggataccttattttacggatatggagccatgctggagttggtttaagtggtgtgtggatgaattgtggagtgtgtcggcccaacagggtcagttctggtgtttaaaggagttgtaacagacttaagagagaaattaagaagaaaatagagaactcaccacagaacgttgcgtcgaccctctctggcggcgaaaacgtgctcacgtcccggcgaacctccctcttgccggcggccaggggccatcacaacgatgcagcatcgatctgaaggatttgcacaaagctaacggaacgtgtgcgcttctgttctgtcccttaatacagtgattaacacacgtgacgctcttactgatcaagccaagttagataaacacgtacgtgatgccaaattctatacattactgggagcatttacatcactatacaacaacacattctcaccaacttgctcggttgctgtggcctcactcagttggacccgccgcagcacagctctgagcagcactcgaagcatcccaggcacgcgatggcggcgcaggcctgcgccatgacgatggcgcactggtcgttcatcttgctgcacgccttgatgaagcacatgcagcagcagcagtccgccatgcggctgcagcagccagcggccttctccaacatcacaaacttctcggctgctttcatgtctccgaatcctgttgtcaggttctctgttgttgccgctacgtcgccaaatccgaccgctaggccacctagcggcatcgctggcagctcatctgggctactgctttgtttcgttggtttattcttcgcctgatcaaatacaacaatatttcttttatacaggaaatacagcaatattagtcacagattgtggaggctttttagtttacatgctgtcatactcctcctattccgtaccaaattataagacgtttcgtattttctagatatattatctagataccgtgtgctacgtgtctagaaaaaccaaaatatcttataatttgaaacggagggagtacatggtttagctagcttaaaacatcagattggttcaagcagtgtgctttgggtctggatataaaagttgtctagaactcttggaagaatgttggagtaaatggactaatgaaaatgttgaagaaagaacaagaatatccaaaggtgcgttgccttctatatgggccatgttgctctgatctttatagtttaattagcagcttggattgacaataccaaccaaaatttctttacagagatgtaagctttaagggcagaccctgtttcggaggctcccacgtgaggtcttgttcggttgcgcagggatcgaaggggattgagagagattaaatcccattctattcaattttgactaggaagagatttaatcccctttaattctatcctaaccgaaggaaacccaactaagctttctccccgtaaatgcagagagaccacttcaaactcacggcttggtaaatagtgactcactgcaccaggtctaccctttatagaaatgtaagctttattaaagaaaaaaaatccacctgttgtgctggatctattttgtccagactggtttgaagtagtaccatgcgtgtgtactcagaaggaaggctattttgtatgcttaatttcacaacctgtaaattagagcaaagagaatacaatgttataaacaacattgttcttaactgcacagaaaacgaagagtaaaaaaagagataatttcatttcactcttggcaaagttgcaacgtcattatactgattgcaaggcctactatctcaaaggatcagtagtcgagtactggtaatacctcgcaaaaggaaatatcagagaaaaaagtgatgtatgaaactacgagtacaattttagacattctttttttccagtgtcatatgtgatatgcttgtttcgtaggtaaatttgttaatgactcagtttttcccaaggttatgggactgcctcatggaaatttcgttgactgaccaagaggatcatcacacttggaggctagatgctagcggatgttattcttccaaatctggcttatttctatggcagtgacctttgagccttggggtcggctatggaagacctgggccccagccaaatgtaaaatgcttttatggttgacaatttgaaacagatgttggacataggcttgttaagaggggcctccctcatccggataaatacccactctgtgtaatcaagaagatgaaacgatacatcttttaacattgttgtgggaagacaagtatgattcagatgcaacaattccatccgttgaacctagcagattcagtcccctgacaaaatgaacggagctttgtagattggtggactggtgacacaagaaagaaaagttaaaagggagcacaaaaaaggaggacattctaattatactcaggttctggattatttggaacataggaatgcttttgtgcttgagggggctcttctccttcggttagcacgccctatggtgtatggctggtgcgaagaaactgcatgggctagttcttaagtttgcaacctaggacagttgggctaggtcaagtcgtgtctgtttgctatgttgctaaagtcttgagtctgtaataacctcactcatatttgatccctgtatgagtgaggatcctgttgggaaccatcagctctcttgcgttatcaaaaaaatctcatgattttggtcattatttcatagttcaaagaatttattttaaataaaaacattaagcactggcctaaaacgagcacatcaagtcatcaacagccatactaaaactcagcatcatggttccagtgcttcatttaaggaccttcagtgttcagccactagctgatatgattctaggcttctaactatttgtttctctagtatgcatgacagctgtgtatcatttctgatacacacagctctcttgcatgttcaagaaaaaaattgtgtaaactttcattaaagaaagaatatattatacaacgtgacacaacagattaaaattagccttcaatggatcaaattacctttcgctcaagctccttgttctccataagccatgcttttgctgtgagaagatccatctgttgctttgccaatacctgagattcgaatcgacagcacaaccctttagtctcaaacaagcttgggtagactagaaaaaaaaactacacgtaagtagaccaagagtacttgtttagttcaaaggataattattttcttataggctactacaacaagatttaaggcataatccattgtggcactgacttctgtctcaaatccaaattgtcagtgacacagcgagggacttagcaaaaaattgaagtggctagtgaatattgaatccttttttaatcaaggatatgcagatactttcacaactacagacttcagcaataaaacatatcagtttaataaaaaggacagacctaggaccggaggagggtaccggggaagcgtcgggtggagtgcta

SEQ ID NO: 2105 - DNA, 1768 bp, Zea mays
gcgccccacgaggcagtcccttcgtcccttcccttccattaataattgcggtgcacaggagcggagatccacttcacccgcaccgcacagctcatgatttgcacagccaccctcgtccgtccccgcccagctgctagcgcaaggaagcagctggctggctccaatcccccgccaccccgcctatttataacaccaccacttcccttgccccctccgccgtcgccgccaccgccaccaccaccaccgttgccgagccctcgcctcaccctcacagtcgtctcaggatgatgccccaggccagcgctagcctcgacctcggcctcagcctgggcctcaccctcacctcccagggcagcctctcctcctccaccaccaccgccggctcctccccctgggcagccgcgctgagctccgtcgtggccgacgtcgccagggcgcggggtgacgcgtacgcgcagcaccacgccggcgccgcgatgacgatgcgcgcgtccacgtcgcccgacagcggcgacaccaccaccgccaagagggagagggagggggagctcgagcgcaccggctccggaggcgtccgcagcgacgaggaggacggcgcggacggcggcgccggcgggcgcaagaagctcaggctctccaaggaccaggccgccgtcctcgaggagtgcttcaagacgcacagcacgctcaaccccaagcagaaggtgcagctggccaaccgcctgggcctccggccgcggcaggtggaggtgtggttccagaaccgccgcgcgcggaccaagctgaagcagacggaggtggactgcgagtacctcaagcgctggtgcgaccgcctcgccgacgagaacaagcgcctcgagaaggagctggccgacctcagggcgctcaaggccgcgccgccgtcgtcggccgccgcgcagcccgcctcggccgccgccaccctcacaatgtgcccgtcctgccgccgcgtcgcggccgccgctagccaccaccaccagccgcccccgccgcaatgccaccccaagcctaccgtcgccgccggtggcggcagcgtcgtgcccaggcccagccactgccagttcttcccggccgccgccgttgaccggacgagccagggcacgtggaacaccgccgcgccgccgctcgtcaccagagaactcttctgatgccgccgtgacacacgtccatgtccgtcgaccgatccatgcattgctcgctgctcggtcgatcttgccatggcaagtggaaaaaaggttagatcgaagaagatggtgattgacgacgattaggagaggatctcgcaggtggtggactggcggttggggtaattaatcaattaattaattacaattaatcaatcaggagacgagaggagatttgttttttttttcttctgttctttccttcttcgatgaattcattcatcagttgggtgggtttctgaaaacgacgaacgagcaacaaacaaacaaacaaaccaaaagatggctgtctgctttttttttccctgatggacgccgtgttagtgtcatgtaaaaccagctcgcacctaacctctgctgctgctgggttggtgagaaataacagcgtgagtgattgtttgtactactactaattgattggtgaagaaagttaatgggaatgaaatctctactacaagcagcagtattatttctcggtcgcccgacagcgctatcattatctgcggccatccatccatccatgtctgtggatccgatcggaccaatgatttctccttcccgctgcc

SEQ ID NO: 2106 - DNA, 1755 bp, Zea mays
aacttccaattccagtcctttaaaaaaacttccaatttcagtttcggaggagttggttcttggatcgaggcgccgggagccatgcgcaccaaacacctcatccctaacaacgccgccggactcacctacgcggcgcgcgactactccgccggcgaggatcacggcgggggcgacggagtcggcggcgacccgtttgagggttttcccgacgcggtgctggggctgatcgtgtccaagctgccgttacggtccgctgtcgcggcctcggctatctcgcgccggtggcgcggcgctgtcgccgctgcgcccgcgctggacctcgacttcgccgcggcgttccccgccgcgccgcgccgcagggcggcgttcgcggccgccgtcactgccgcgcttgggtcctccgctccgccgcatcgacacccgctccgtcgcctccgcctcgcgctcgagggtttctttgaccaggcgtttgctgcctccgccgccgaccacctcgcctcgtggctcaccgcggcggcggcacgcggcgtcgagcggttagagctccacctcccgcgctcccgcctcgccgttcttccgccctccctcctggcctgcaccagcctcacgtccctgacacttcggctcgaccgctacgcacttccgctcccttctttcaccacattcacccgcctatcccgcctccacatcgcttgtgtctcgctcaatgcggaggatgacttcttcggggacctcttcttgcactgcaaagaggtccgctacctgattcttgaaaaatgccgcgtcggtgctcttcgccttaccggtccgtcgcggctttgctcgctcgccatcacggactgttcttggacggaggagtcggctcttgctgtttttgagatgccggagctgcggatactccactactccggcgcaatagcagctaggcacattattgatggggaagtttctttggaggacgtcctccttaacatcgagaagccattggtcaagcctcgggaggctgctctcagagagcttcttactttggttggcaatgcacgaagacttgctctttcaccctggtgcatcgagcaatttgcacgtccagaggaatggtcgaagttgcagttagacaaggtaaggtggttgacatgtatagttgagaggagggaagaaggtgcattatccattgtgccactgctatcaaactgcagaaatgtggaagagctctgcgtgtctgttgtgccatcgcagggcaaatggaggcggaatagtggcgatggaggaagtcatggtgtgcttggtggtaagagggtatcggtgaaacatctaaaggtcgttaggatgaagtacattgatgaaagcagaagtggatttaaactggtaaaggtcctgctcaagaacgcctctgcactggagaccatgacaattgttccttccatggatggccttgagcaggccaagtttaggcgtagggtgttgaagctgaggaagtcctctcaaaatgctagcgtccagttttgcacagctggatgatatgatgtgtatgagtagagtaggtccattagcaaaagctcaatgttgcagcccaggaagaaaggcctgtccatgaaggtcttcctttttcgtcgggttacttttagcctgtgtatgtagctgctaactgttgatgaattccttacagaattaatggaaccattgtcagtattcatttagtttaagccatcaattttcagttctttgatgaagtttctttaaacttaacagaaattc

SEQ ID NO: 2107 - DNA, 2804 bp, Zea mays
ttcgctacttcgccggcgacaggggcgaccgcgcgcgccccggccggtgctgatccggactctcccatgcacccattctgctgtgcgccgctcgtgcctgtatcgcccgtggcctccgccgcggccgcgtcctctgcggtggcgggcgccccggccgtgatgccgccaccgcagcccccgcctcctccgcctcctccgccccgaagcaaccccgcctctggcggtgagaggcgcgcgcgcgcggcgggggtcagcggtggcggaggaggcggttcctcgccgcccgagggggtgaagctgaacgagatcgtcggcggcggcatctcgggaatcctgtacaagtgggtcaactacgggcgcggttggaggccgcgctggttcgctctccacgacggcgtgctctcctactacaagatccacgggcccgaccgcatcatcctatcgcgcgagaccgagcggggcgccaaggtcatcggcgatgattccctccgccgcctcaaccgcccctccacctcctcgtcgtcccactccaacggccaccaccatcctcgaaaccccatcggcgaaatccacctcaaggtgtcgaccgtgagggagagcagatcggacgacaggagattctccatcttctcggggacgaagacgttgcacctgagagcggagaccagggaggacagagctgcgtggctcgaggcgctgcgggcgaccaaggacatgttcccgaggatgtcctccagcgagatggtcgggccaggggacaccgcagcggcagtggccgtctcgaccgagcgcctaaggcagcggctgcagcaggaaggggtcagcgaggcggccattgctgacagcgagatgatcgtgcgggcagaattcgaggctctgcacaagcagcttgtgctctccaagcagaagcacgcgctcctcttggaaactcttcgccagctagagacagaaaaggttgatttggagaatacccttgtcgatgagagtcaaaggcagtcgaaagagtatggatctgcttctaaaccaagacatgagaagtatagtgaaggaagtgctagtgaatctgatgattataatgaaccacaagatcctgctgaagagactgatgatgatgagaacctttattttgatacaagagattttctatcctcaagctcttttaaaagtagtggatctgatttccaaagatctgaagctggttcagatgatgaagacgattatccaatggatggaattgatccttccatgaagtctattgggattagttatccatatgtaagaaggcggaagaagctaccagatccggttgagaaagaaaagggtgtaagtttgtggtcaatgatcaaggacaacataggaaaggatcttacaaaagtttgtctgcctgtttacttcaatgagccactttcatcgttacaaaaatgttttgaagatctggagtattcctaccttattgatcgtgcatctgaatgggggaaaagggggaatagtcttatgaggattcttagcgtagcagcatttgctgtttctggatatgcctctacagatggcaggagctgtaagccttttaacccccttcttggggagacatatgaagcagactatccagacaaaggcctccgttttttctctgaaaaggttagtcatcaccctatggttgttgcttgccactgtgagggaactggctggaggttttgggctgatagcaacctaaagagtaaattctggggtcgttccatccaacttgatcctgttggtgaattaacactggagtttgatgatggggaagttttccaatggagcaaggtgacaacttcaatttacaatctcatattgggcaagctatattgcgatcactatggtactatgcgcattcaaggtaatcgtgagtattcatgtaagcttaagttcaaggagcagtcaattatcgatcgcaaccctcaccaggtgcaaggtgttgttcaagatagaaatggtcgaactgttgctacactatttggaaaatgggatgaaagcatgcactatgtaatgggtgattgctttgggaaaggcaagggaactgaacagttatcggaggcccatttgttgtggaaaagaagcaaaccacctaagtttcccactagatacaatctcactcaatttgcaattacattgaatgaacttacccctggattgaaggagaaactgccacctacagactcaagattacgaccagaccagagatgtctggagaacggtgaatatgaaagggcaaatgctgagaaattgaggcttgaacagagacaacggcaggcacgaaagatgcaggagagcggatggaagcctcggtggtttgcgaaggataaagctactgacacataccgttacgtcggtgggtactgggaatccagagaaaagagcagctgggaaggttgccccgacatcttcggacaagtccctaacgatctgatggtaactgactaggttcgagtaggttataggtcttttgcttctccttatcggtatcacttgattccggaaattttagtggttcatattatagagcaattaagtgcccgttgacaagtaaacattggcagtgcctccggtaatattggtctcgtacataataagaagaaaatggttcggtctcacatgttaccttatttttttttggcttttggtatagtaatagttttttttccttgtgaggttttcatgctcacaagttcagtcttcaaagtggtgtagcgtgggcgattagtggtcatgactaaatatatgtaactacgctacgcatacaggaggaggccgtgaatttgttc

SEQ ID NO: 2108 - DNA, 2577 bp, Zea mays
atgtatatgtgttgtttcattttggcaggaacatcagtgatgaagaacgtagaccgaccaccttccaatccaaaacagatcataatccagtctactcaggagtgcttcagcgttgacataccgcgtgctccggcggggactgttagacccgagacaaggcatgctgctgatgaggatgatgactttatgccattatccaagaagcgtaaattggacgacagccctgggaaagttttgaagaagcagaagctgaatgtcagatacaacccccaagatgtgttagtaagcatacagatattaaatgacagacagcaacaagcaattgcacgtaggggattttctagtattcttgatatgagactggacgcactcggcagcagatcacacttagcttggctgatggaaaagctcgaccacaatgacatgacaattcgagctggccctggaaaggagctgaaaattacaaaggatacggtgcacctaattttgggtttaccgaatgctgggggaggaactgcattgggcatcgatgaagctgttgttgccaacaatttgagagttgaacttgggctatcgaaagaagattttggggttacagctctacaagatcgtttgaggaaaggttctgacgatgatttaagcatcagatgctttttcttgatattgttcaataggttgttgttccctactgccagctggggaataacgaaccatgaggttcttttaaccgagcagatggatcgtttccaccagattgactggtgccagcttattttcaatgatttatgccaagctgccaagaagtggcataacaggagcgttacgaacgtttctacaaccatctatggatgttccatcgttattcttctgtattatttggatcatttgcatgactcagcggcaccccagaacaaacgtggaacaccacgaatcaaatactttgataggaatattattcaagccctgacaagagctgacaagggcaagatacgcaaaggagaagaagcatttggacattgctcgcataagaccaggaccaaaacttttgatgttcctcgtcctgacccatctggacagcactcaatttacatcgaactcccgctcatcagggatttgatatcaagcaagcttaatcagcttccatcccgccaccgcatgggtttcatagagaagctgtcacattttgatgcggaggttggtaaggcgtgtacagttattaaacagactcttcagcagattgttgagaaacaattcaatctatctgatgtttttggcgagttaattgatgaggtcctccgtgccgaggcgggtgacaacaaagatgcttatgatgtgcagaaaaccacatcaaaatcagatgatattcttccccagacagctgaaggatgtacgtgtctggcccccccaactgtacccgatatgtctactccagtttctcagctggatacgcagtttacagacacacagggtaaacatggtgacggtggcaagaacatgccgaccaatacaaacgtcactcctaaagcaacaccacacatggatcctgacgcgccgatatttgatgcgactccgcaaatcaagtctactggcggcgtacaacaagtggcagaaacagacttgcctgacagtggtccatgctttgatcagactccatctgaacatgtttatgttgaaaccgatccagctacaaacactccacaggttggccagacttctcttgattcggagatgcaaactgtgttagctctacgcgaatatttgtgtggtctgcaatctgacaccggcaggaccataatagattatggtgaatattcagcgacatgttctgacatatatgaatcttttgccgatgggaagtgtctcgacaatggattcatgcagtgtttcatccaatgtgttattcatgatgcaaaaaatcagcagacttccatgggttcgaacagtttggttcttgatgttaatgttgggtcaatactcaactttgaggaacaggaacgacacagtcgcaatcctcaaccttttgatgaatctgtacttcacacacttctagacaattcattgcctgagacagatgagttggaccaatgcaaagcgatcatggtccccatggtaagcagggggcattggacattgtatgttgtcaacaaggtcaagaagtgcattcatattttagattccaacccatatggaccaacacttggtggaactacatggaaggactatcattttgcacatttgggctcaggtggcagaaagttaccctgggctaaggttattatgagcagattaaacaaagcaatacaacatgtgcggcccagttcatgctttcccaagtttggtaacttcacaattgacttgtgccaaaattgtcctaacatggcagctggatcaaatgactgtgggttttatgtcatgggttacattctattttatcaatgcgacgaaggatctttgcggtcagacatagaagcaggcaacaccagtgagatacggtctcttgcgctgcattacatcacattccacccgaagaacaaagcattatcgctgctccaagacatccaaagattcaaggtctaa

SEQ ID NO: 2109 - DNA, 3111 bp, Zea mays
ccgcgaccccaggtcagtcgggactacccgctgagtttaagcatataaataagcggaggagaagaaacttacgaggattcccctagtaacggcgagcgaaccgggagcagcccagcttgagaatcgggcggcctcgccgcccgaattgtagtctggagaggcgtcctcagcgacggaccgggcccaagttctctggaaagggacgcctgggagggtgagagccccgtccggcccggaccctgtcgcaccacgaggcgccgtcaacgagtcgggttgtttgggaatgcagcccaaatcgggcggtaaactccgtccaaggctaaatacaggcgagagaccgatagcgaacaagtaccgcgagggaaagatgaaaaggactttgaaaagagagtcaaagagtgcttgaaattgccgggagggaagcggatgggggctggcgacgcgcaccggccgtatgcggaacggctcctgctggtccgccgatcggctcggggcgtggaccgttgtcgcccgcgccggcggccaaagcccgggggccctaggcgcccccggcagccgtcgtcggcgcggacggtatccgcgcgcctctggcgcgcccctcggggcgctgcgccgcaacggcctgcgagctccccatccgacccgtcttgaaacacggaccaaggagtctgacatgcgtgcgagtcgacgggttcagaaacctgagatgcgcaaggaagctgacgagcgggaggccctcacgggccgcaccgctggccgaccctgatcttctgtgaagggttcgagttggagcacgcctgtcgggacccgaaagatggtgaactatgcctgagcggggcgaagccagaggaaactctggtggaggctcgaagcgatactgacgtgcaaatcgttcgtctgacttgggtataggggcgaaagactaatcgaaccatctagtagctggttccctccgaagtttccctcaggatagctggagcccacacgagttctatcgggtaaagccaatgattagaggcatcgggggcgcaacgccctcgacctattctcaaactttaaataggtaggacggcgcggctgcttcggtgagccgtgccacggaatcgggagctccaagtgggccatttttggtaagcagaactggcgatgcgggatgaaccggaagccgggttacggtgccaaactgcgcgctaacctagaacccacaaagggtgttggtcgattaagacagcaggacggtggtcatggaagtcgaaatccgctaaggagtgtgtaacaactcacctgccgaatcaactagccccgaaaatggatggcgctgaagcgcgcgacccacacccggccatctgggcgagcgacatgccccgatgagtaggagggcgcggcggccgccgcaaaacccggggcgcgagcccgggcggagcggccgtcggtgcagatcttggtggtagtagcaaatattcaaatgagaactttgaaggccgaagaggagaaaggttccatgtgaacggcacttgcacatgggtaagccgatcctaagggacgggggaaacccggcagatagcgcgatcacgcgcgtcacccgaaagggaatcgggttaagatttcccgagccgggacgtggcggcagacggcgacgttaggaagtccggagacgccggcgggggcctcgggaagagttatcttttctgcttaacggcccgccaaccctggaatcggttcagccggaggtagggtccagcggccggaagagcaccgcacatcgcgcggtgtccggtgcgcccccggcggcccttgaaaatccggaggaccgaattccgtccacgcccggtcgtactcataaccgcatcaggtctccaaggtgaacagcctctggccaatggaacaatgtaggcaagggaagtcggcaaaacggatccgtaacttcgggaaaaggattggctctgagggttgggctcgggggtcccggccccgaacccgtcggctgctggcggaatgctcgagctgctcgcgcggcgagagcgggccgccgcgtgccggccgggggacggaccgggaacggccccctcgggggccttccccgggcgtcgaacaaccgactcagaactggtacggacaaggggaatccgactgtttaattaaaacaaagcattgcgacggtcctcgaggatgctgacgcaatgtgatttctgcccagtgctctgaatgtcaaagtgaagaaattcaaccaagcgcgggtaaacggcgggagtaactatgactctcttaaggtagccaaatgcctcgtcatctaattagtgacgcgcatgaatggattaacgagattcccactgtccctgtctactatccagcgaaaccacagccaagggaacgggcttggcggaatcagcggggaaagaagaccctgttgagcttgactctagtccgactttgtgaaatgacttgagaggtgtaggataagtgggagcctccgggcgcaagtgaaataccactacttttaacgttattttacttattccgtgggtcggaagcggggcaccgcccctccttttggctccaaggcccggcctcgccgggccgatccgggcggaagacattgtcaggtggggagtttggctggggcggcacatctgttaaaagataacgcaggtgtcctaagatgagctcaacgagaacagaaatctcgtgtggaacaaaagggtaaaagctcgtttgattctgatttccagtacgaatacgaaccgtgaaagcgtggcctatcgatcctttagaccttcggagtttgaagctagaggtgtcagaaaagttaccacagggataactggcttgtggcagccaagcgttcatagcgacgttgctttttgatccttcgatgtcggctcttcctatcattgtgaagcagaattcaccaagtgttggattgttcacccaccaatagggaacgtgagctgggtttagaccgtcgtgagacagggttagttttaccctactgatgaccgccgccgcgatagtaattcaacctagtacgagaggaaccgtgattcccaccaatgtcatccccgctgatgaaaagccagtggcgcgaagctaccgtgtggcgattatgactga

SEQ ID NO: 2110 - DNA, 1810 bp, Zea mays
tacctggttgatcctgccagtagtcatatgcttgtctcaaagattaagccatgcatgtgcaagtatgaactaattcgaactgtgaaactgcgaatggctcattaaatcagttatagtttgtttgatggtacgtgctactcggataaccgtagtaattctagagctaatacgtgcaacaaaccccgacttccgggaggggcgcatttattagataaaaggctgacgcgggctctgcccgccgatccgatgattcatgataacttgacggatcgcacggccttcgtgccggcgacgcatcattcaaatttctgccctatcaactttcgatggtaggataggggcctaccatggtggtgacgggtgacggagaattagggttcgattccggagagggagcctgagaaacggctaccacatccaaggaaggcagcaggcgcgcaaattacccaatcctgacacggggaggtagtgacaataaataacaataccgggcgcgttagtgtctggtaattggaatgagtacaatctaaatcccttaacgaggatccattggagggcaagtctggtgccagcagccgcggtaattccagctccaatagcgtatatttaagttgttgcagttaaaaagctcgtagttggaccttgggccgggccggccggtccgcctcacggcgagaaccgaccggctcgacccttctgccggcgatgcgctcctggccttaactggccgggtcgtgcctccggcgccgttactttgaagaaattagagtgctcaaagcaagccatcgctctggatacattagcatgggataacatcataggattccggtcctattgtgttggcttcgggatcggagtaatgattaatagggacagtcgggggcattcgtatttcatagtcagaggtgaaattcttggatttatgaaagacgaacaactgcgaaagcatttgccaaggatgttttcattaatcaagaacgaaagttgggggctcgaagacgatcagataccgtcctagtctcaaccataaacgatgccgaccagggatcagcgggtgttactaataggaccccgctggcaccttatgagaaatcaaagtctttgggttccggggggagtatggtcgcaaggctgaaacttaaaggaattgacggaagggcaccaccaggcgtggagcctgcggcttaatttgactcaacacggggaaacttaccaggtccagacatagcaaggattgacagactgagagctctttcttgattctatgggtggtggtgcatggccgttcttagttggtggagcgatttgtctggttaattccgttaacgaacgagacctcagcctgctaactagctatgcggagccatccctccgtagttagcttcttagagggactatggccgtttaggccacggaagtttgaggcaataacaggtctgtgatgcccttagatgttctgggccgcacgcgcgctacactgatgtatccaacgagtatatagccttggccgacaggcccgggtaatcttgggaaatttcatcgtgatggggatagatcattgcaattgttggtcttcaacgaggaatgcctagtaagcgcgagtcatcagctcgcgttgactacgtccctgccctttgtacacaccgcccgtcgctcctaccgattgaatggtccggtgaagtgttcggatcgcggcgacgggggcggttcgccgcccccgacgtcgcgagaagtccattgaaccttatcatttagaggaaggagaagtcgtaacaaggtttccgtaggtgaacctgcggaaggatcattg

SEQ ID NO: 2111 - DNA, 1995 bp, Zea mays
cagcttcactttctctttctctcccacgccggcccacaccctcccctcccctcctctcctctcctcgccgccgtctcctccttcgccttcgctagctgattcccgtcaccatcaagcctcagctccccggcctcccactatctccgcgtcgccgtcccagtcactgtcccacgcgcccagcaccatccatccgtccgcaagggggaaagcacgctagctgagctgagctgctgagagagagagaggcaaaccctagcacgcacaagcacagcgacgtatacgcttccttccccccgccgattcatccatccatcgcagcgcgcaccgggcggggcgggccgggacgacgacagctaagctagcacatcgcaatagcatagcatctatctccgccgcagtacccaccaccaccaccaccaccatgatcttcccccctgccttcctgcaggattcctcgagctggaacgataaccagcaccagcagcagcagcaccaccaccagcagcaaggccacggccacctgcagattgccgtcagcggcagcggcgacgccaatcatgagctcctccagcaaccaatcatggggggagcgcttcccgatggaggaggaggaggtggtggcggggggcaggttgggggccccgccaagcccatgtccatggcggagcgcgcgcgcctcgcgaggatcccgctgccggagccggggctcaagtgcccgcgctgcgactcaaccaacaccaagttctgctacttcaacaactactccctcacccagccgcgccacttctgccgggcctgccgccgctactggacgcgcggcggcgcgctccgcaacgtgccggtcggcggcggataccgccgccacgccaagcgcgccaagcccaagcagcagcagcagcagcacgcggccgccgggaccggggctgccaccggcgcgatgcagcagcctcccgctgggtccatggcgtcgtcggccgccgcgtgcaccgcgaccacgacgatgacgaccaacgcgctccacgccgggcccggcggcggcatgctgcccatgctgccgccgctgctgcgcctagccgacttcgacgcaatgagcctcggctccagcttctccggcatatcgtccatggggaagcccggctccatcggcgcggcctgctacccgcactcggtcggcgggctggagcagtggagggtgcagcagatgcagagcttcccgttcttgcatgcgatggaccagggcccgctggggccacctctggccatggcgatggcggcgccaggagggatgttccagctaggtctagacaccaccagtgataacagccgtggcggtggcggcggcggagaagacgggtcgtctgccggagaggcgctccatatgatgcaagccaccaagagggagagctaccccgcggcaccaagagccatgtacggcgaccaacaacacaatcacctggctgctgctggtggctacacttcctattccaccaatgctgctgcaggtaaccatctcttgtaatggccggccgatcgatcgatcgagagctcaacaattcaagtgtcctgctatagctagctactacgacgtcgtgctacgatcgtatcggttcgtttcctacaaatatagcctagagatagagtgtctctgtctgtgtgatcgatggtattgttatgatcatatagaaaagaccagtagcatgcatgcacttgttgcaatgtttgctttcaagaagaaactctggagggaggagaggctcggtttggatgctgatcatgcgcaaatattactagtgtctacagctgctacttcattatagctgctagcatggtcacttgttttatgtttcttcttctgctgcttttttatctgatccctttgttagggtttactactactatcgatcatttgtggtcaagtaatgtgtactggtgtacgttcatcattttgttaacgaaaacacctatcatatatatgtcaattattcaaccccaccc

SEQ ID NO: 2112 - DNA, 1113 bp, Zea mays
atccagatatatatagatagatagctttcttgttagcctcgaatcgcgatccagtagctcatcagctgattcacaagtgcaagcatttgatgaagaggtttgcagttcaggagagcgagatggcgcgcatgctggtgctcatgtcgcgctcgcacggtcaggaccaggcgctgccactgtcggcctgcctcgccggcggccagcgcggcgaggaccggcaggcgccggagcgggtgttcgtgtgcaagacgtgcaaccgcgtgttcccgtcgttccaggcgctgggcggccaccgcgccagccacaagaagccgcggctggacggggacggcgccggcgacccctcgctcgccaagcccaagctgcacggctgctccgtctgcggcctcgagttcgccatcggccaggcccttggcggccacatgaggcgccaccgcgccatgacgggcggcgtgccggcggtgccgcccgcgacgacgaggatcgtcgtcgacgagaagccggacggcgacgtcgtcggcatcatccgccacgaccacggcggcgtcaagcagcccggcggcgggctgtggctcgacctcaactacccgccgtgcgacgacggccgcgacgcggtggaggcggagtgtggccgcaatgccgccgccgccacggggatcacgttccatcagttcctcgacactgccaccatggccgtcgactgccttggctactagatagatagatatataccaccaagctccatgattcttctcccctgccgcgtactactggtgcaccggtctcttcttcttcttctttcttttcttttcttttctggaatcttcttcctcatttgcttctgggcggagggggagaaatccacattttgtagcagtagtagaatgaaggtgcctaatgcatgcatgggcttggctgatgtgcatgaaggttttgggatgtctttgagctgctcggtggataatctggaggattgattccaccaaagctagcttattttgccttgggtttcatgttattatggataaaaaccctttggtcaaaatggctttgatcgttgtaattatttaatctgagcaagataaacattatatatacagagcttgtggttgt

SEQ ID NO: 2113 - DNA, 2512 bp, Zea mays
tgcgtaggcgacgggctgtaaccgatgcctaccgcaccaactcttttaacccccttcctctccagggaacgagaccagaatcccccgtcgacgcgcacgcgcagagctccgcatccgcaccggccgccggcggcgtggatggggaagctctccgccctgaagcgggaagcggtcggagtggactaggcgctcggtgacttcctagtttagaagcggtaggtggaggcgatgcggggcggggcgatgaaggccctgcggcgatccagcacctcctcggcgccatcgccaagggtgccgtcttccccgcggtcttattcgtggatccaccgccggtcgcttctcgttacctcgccggcctcgccggcgacgtcctctgtgtctgaatcggcgaatttgcccgcggagggttcggattcagcgccagcgtcagtggtggcagcttcctcgtcgccctcgctggctgcttcgtctccgaacatggaatgtacatttcattctaggggtggaattaaatctccgtggtctcgaagaaaaaggaaacgggcgcttacttgtcaacactggaatcgtctattttcagcaaatgggaagcttcgtgatgggggaagaaagtttctaaagaaggttcgcagtggggggattgaaccgggcataagggctgaagtttggccatttctgcttggagtctatgatttgaacagctctgaagaggacaggaatactatcaagataaagaaaaggaaagaatatgaaaaattgaggcgacagtgccaccgcatcctgcattgtaatagagaaaatggtctgaatgttataaatgagttcatgaacgaggacttttctgatggggctgaaggttcagagtcaccatattcaaatggtgttagtaagagggtttgtgtgatgcccaaagaattgaaatctttaggcagtaaggcagaagaatcagagagttctaactgggatgctgtgaaatgcatagatgaagacataacctctgttgatccatgtttggtagaatcagaatcttctgaatctgagtcttcctatgaagaggaccctgatagaacacctgtctctaccaatatggaagagaactgtggtcccaaaccaaaatttgcccggaccgcttcatctaagtcggagattattatttcagacagaactcctgaggattttgccacatggcagcgcattatacgtgtagatgctattcgagcaaatacagaatgggttctgtttgcccgtaaccaggctgaagtctctaaagagaaagcgctgcagtctgcaatatctgtcgggttgaaagattttgaccatttagagccttacatgatctatcatgctgcacgattagttgcactgcttgaggcatatgcactttatgatccagagatcgggtactgtcaaggaatgagtgatctcttgtcaccaataattgcagtcatggaggaagatcatgaagcgttctggtgctttgtgggtttcatgaggaaagccagacacaacttcaggcttgacgaggttgggataaaaagacagctgaaaaccgtctcgcagatcatcaagcgcaaggattcacacctctacaggcacctgcagaaacttcaggcggaagactgcttctttctgtaccgaatggtggtggttctcttcaggagggagctcacttttgagcagactatgtgtctgtgggaggtcatgtgggctgaccaggccgcgatacgagctgggattggaaggtccacttgggcaaggataaggcttcatgccccgccaaccgacgacttgctgctctacgccatcgcagcctgcgtcttgcagaagaggaagctgataatcgagaagtacagcagcatggatgagatactgcgggagtgtaatagcatggccgggcagctagatgtctggaagctcctagatgatgcccaccacttggttgttgaccttcatgacaaaatctgatgcgactgccttcctcagctatgtttttgggtagagtatgcagacatgaacacattttccgaggtgtatttagtaagctgttgtgtactgttcatcacccggaataaaaaaaaactttcatgggagtacatgtagagaaccttgtagcttcaagtgaggacgaagttgtcttccactttggttaagctgataaaccattggatagcgcaatggtttattcaagccatccatagttaaaacttcatggaaaattttgttcttgcttctaatgtctgtccttggcagaaacaacattttccatgaagttttttacaggaaagttaagttcccagattttgggtgtaatgtgtagtaataatgaaatcacagcagtttctttcatcatgtgtagtaatgtactccctctgttttattttagttgtagctggatagtgcaaaattgaactatcaagcgacaactaaaaagaaacggagggagtacatacgtgtgtggttgtgtgtgtagtgtgtacacacggcgacgctattcatcatacaggtgtctgaa

SEQ ID NO: 2114 - DNA, 1923 bp, Zea mays
atgaccctcgatagctactccctcaacattgctttctatgccactgcccgcctcccatctgtttctgttggtgcccagcttcattccctttctgtcaaacttggcttggtttcagatacatttgtccttaattctcttatcaacatgtactcgtcttgtagctatccaacaactgcaagacaagttctcgattctgctccccaaggagcttgtgacacagtttcttggaacacaataatttctggatacctacgatgtgggatgcctaataaggctctgcaggcttttggccagatggtcaaggagccagttagactggatgatgtcacattgctgaacgcactcgttgcttctgccaaggcaggcaaagcgaaggtcgggaggctgtgtcacagtttagttgtggtgaacggggctggaattaattgttatatgggatcctctctgattagtatgtatgccaagtgtggattggttgaggatgcccgcaaggtatttcacggaatgcatgagagaaacgtcgtttgctggacatcaatgatttctgggtacacacagttgggtaagtttaaaaaggctgtcgatcttttcagggatatgcaaattactggaatgaaggctgatgatgggacgattgctactgttgtgtcttcatgtgcccaaatgggagcacttgacttgggacgatatgttcatgcttactgtgatgttcatggtttagggaaggagctttctgttaagaattcactgattgatatgtactcgaaatgtggggatataactaaggctcatgagatattctgtggattgaccaagagagatgtgttttcttggacggcaatgataatgggctttactgttaatggcttatgtaatgaagcacttgatttgtttgctcagatggaaggagagggtaaggttatgccaaatgaggtcacttttttgggtgtccttacttcttgtagccatggagggttagtggaacaagggttccatcacttccagcgtatgtccatggtctacaatcttgcaccgaggattgaacactatggatgcatggttgatctcttgggacgtgcaaagctattgacagaggcagaacaatttattaacgggatgcctattgccccagatgttgtagtatggcggtctttattgtttgcctgcagagcttgtggagaggtgggacttgcagaatttgtagcagaaaggatcctagaactggagccaaaaaagtgtgcaggacatgttttactttctaatgtctatgctgccacatcaaggtgggttgatgtgaataaattgcggacatctatggacagttgtaggatgagtcaaatagcacaggtggttgtggaatttcttgaggtagcaatcagctgcatcgtcttcctcaaaggcttctatcctcctcgtgcctttgagaggagaaggtacatgaatgtggtggtccagaaagcactgcatcctgagcttactagctatattcactctgtgactttcggtcttctacctttcattcagaagggattggtagagagggtcgtggtcatcttctatgacaaagggcatgtaccgaccgagaagttcgtcttcaagcttgcagtcaaccagtcataccgttccaagttagaggaggcgaacctggagttcgctctgcgagcattcttgatcaagctgactgttgctgagcctgttaccagaccccttccaccagatggtagctgggaggtgaccgcctacttccggtccctccccggcgacggtgaccgagaagctcagctgtggattcctacggacgccgagctgtggatgcagcctccgcagatcacccccatcaagtcagtcagctgtgaccctctgacgatgcagctctacttggagcaccctagcgtcacggaaccgaaggagccaccggcataa

SEQ ID NO: 2115 - DNA, 1694 bp, Zea mays
atcggatagctggatgaatttgaccgcaaaagcttcagctgttttggaaagcaacataaatttctgctcattctaaagatttgttctttactgctataaccaagtcgattagtacgtctttattaacttgtaacgtccatcgaggtccatccattgcacttgtcgtccatggccacgcacacgccgcaaccgcaggacctcgcgagcaatggcggcgacccgcacgtgcttcttgtgccgtacccggcgcagggacacatgctcccgctcctcgacctggccacgctgctcgccgagcgaggcctcgcggtcaccgtcgccgtcacgtccggcaacgccgcgctgctggcgccgctgctccgcgcctgcccgtccgcggccgtgctcgcgctgcccttcccgccgtcctcgccgctgctcccgccggggagcggcgagaacaccaaggacctcccgcgccacctcttccgccccttcatggcctcgctcgcggcgctcgggccgccgctgctcgcctggtgccacgcgcagagccggcacggacgccgcgtgacggccgtcgtctccgacttcttcacgggctggacgcagccgctggccagggacctgcgcgtgccgcacgtcaccttctccccctcctccgcgctccacctcgccatgtcgcacgcgctctggcgcagcccgccgacgaggcacctcgacgacgaggcggtcacgttcccggaggtccccggctcgcctaccttcccgtggcgccacctctcgggcctgttccggcagtacgcggcgggggacgaggtgtccgaggcgatccggcagctcttcctctggaacctgggcagcgactgcttcgtcgccaacacgttcgcggcgctggaggcggactgcgtgacgcggccgctccccgacctggcgtccaagcgggtgttcgcggtgggcccgctgtcggacgccagcgcgtcggccgaccgcggcggggagcccgcggtggcggcggcgcgggtgtccgcgtggctggacgcgttcccggacggctccgtcgtgtacgtcagcttcgggacgcaggcggcgctgtcggcggcgcaggcggcgtccgtggcggacgcgctggcgcggagctcggcggcgttcgtgtgggcggcgagggcgggcaccgcggtgccggaggggttcgaggcgcgcacggcgccgcgggggctggtgatccgcggctgggcgccgcaggtggaggtgctgcgccaccgcgccgtgggctggttcctcacgcactgcggctggaactccgtgctggaggcggccgccgccggggtggccatgctggcgtggcccatgggcgccgaccagttcacggacgcgcggctgctcgcggaggccggcgtggccgtgcccgtggcggagggcgccgacgccgtgcccgacgccggggcgatggcggccgcgatcgcaaaggccgtcgggaatgagtggggggccgtgagggagcgcgcggacgagctcgggcgcatggcggcggcggcggtggcggagggcgggagctcgcacagggacctggaggagtttgtgcagatgctgctgaccgccagctttcactgctgatgctccatggaattgtagttgcaaccgtcaccgccattgcaggccgggcctaggctataagcatatagttatgtgcctaatttttggttcaccagccc

SEQ ID NO: 2116 - DNA, 2341 bp, Zea mays
gctgttcactgtttactgttcagcgcgtgtgcgggtctggaatctggatagagtagagtgtggaactccgagccgccgctcccccgaccccgatctaccagcttcgtgtgtgagcaccgtgccgcggtgattcgattgcccgcgctcgcggtttccgtcgtcgtcgtcgttctctcatcgtacggcggccatcgctagctactgccgctggatggcggtaataaccaggcccgaggggtaggagcggtagttgtttaactgcggcgggcggaggcaagtggcgtgttccggtggactggcactctgacacggtcggttgctgtgcttcgcgtcgcatctaccgacccctcacccacatggaaagcgaggaggtgagctgcagctgcgacggagactgagcgagaagccccccctccctccctccttccttcgacgtcaagctccgccccactccatggattcgatctgggaggcgaggagctgaggccaggacagggggaggagctgctggggggcagggacaggatagcgcggctaagcggcaacggcggcagccatgagctggagacgaggcggaagcggaggcgatggcggggtctcgaggaggtgggccgtcctgctctgcgtcggcagcttctgcctcggcctgctcttcaccaacagaatgtggacgctgcctgaggcaagtgagattgctaggccgaatgcgaatgtggaggaaggcaccgtgccgattgccgcggagtgtggttctaaaaaggtccaagaaaagcaggattacagagatattttacaggttcaagatagccatcatgatgtacaaacactggataagacgatagcaagcctagagacagagctctcagctgcaagatcgctgcaggaatccctgctgaacggctcccctgtcgcggaagagtataaagtttctgaatcaatcgggaggcgaaagtaccttatggtgatagggatcaacaccgcattcagcagccgcaagaggagagactccatacgttacacctggatgccccaaggtgaaaagaggaaaaagcttgaagaagagaaggggatcattattcggttcgtcattggccacagtgctatatcaggtggaattgttgatagagcaatcgaagcagaggacaggaagcatggggatttcatgaggatagatcatgttgaagggtaccttgcattgtcaggcaaaaccaagacctactttgctacagctgtttcactatgggacgccgacttttatgttaaggttgacgatgatgtccatgtgaacatagcaacgctcggacagattctgtcgaaacatgcattgaagccgagagtgtacatcggatgcatgaaatctggacctgtcttatccgaaaagggcgtgagatattatgaacccgagcactggaagttcggcgaatcggggaacaagtacttccggcatgctaccggtcaattatatgctgtttcaaaggacctggcgacttatatatctataaacaagcatatccttcacaagtacataaacgaagacgtttcgttaggatcttggttcatcgggctagatgttgagcatatcgatgaccggaggctttgctgtggcactccgcctggtgagttttttcatcacttcatgcccctgactgacaaactcaagcttgtttgttcatcattcacgaggccgcgccatttgaattgctcttctgaaacatggctttgggaacctgctgctgaacaatgccaactatttttcatggagcctcatcttatgacgcctttaaccacagattgcgaatggaaggctcaggcggggaacgtctgcgccgcgtcgttcgactggaggtgcagcggcatatgcaactccgagggaaggatctgggaggtccacaataagtgcgctgagggcgagaaggcgctgtggaacgccactttctagcacacacacaaaataaaaaaggaagcagcaacagaagctgctatataatagatcaaaccattttggtttgttgtctgtacattgtcccacggtttgtgtgtacgtaattcattgtaggtagctgcgggtttttttttttggttgttgttgtaacgggcgaaagcggaccaccattttaggtagtgtctgtcagccggtgccggtgaagatgatggagaaggatatggtgtgagcggtgatgtattcttttgtgcggtaaatgtgtggaggtggtcatcttgttgtgccgatctcctgtactgcatgtatggctgccgagatacgtgagaccgacaaacactttcgtgccataaaagtagagctagtaaataaatctggtaattgctgtccactctatgccgt

SEQ ID NO: 2117 - DNA, 5279 bp, Zea mays
accagatttaaagtgctcatatgagcacaagagctccatgagcacatgatacgttccccaaacaaatagcctctctctaactactccgtccatcatcttccccgtccgtcgcattcatccgatccgccccctcctctcccatggcccatcacccctgctccaccaatctctagcgccttgcgcaccagcaagcttccaaatctctgctctactcttggacggacagagaaagggaggggacccaaaccagatcttggcaacaccactgctccacccaaacacaggtagagtagagtagagtagagtagggctgtggtggttcaactccctcccatgttcatgggctcataggtgaaccaccgccgcccacccagggcattggggcttcttcgtctcctccccccccttcaaaaactcctgctttcttgggggttttggttcccgcacaaggtcggagccacggagaggggaggggtcttgctgctacaacagctgggcctgggaggacgaatctatcttggcaacaggtgagggaagccgtcctgtttgcgcatggaggcggtctcaatgtcgccgtcaaccgtctcctcccacacccacgacgaccacgacgccgcttccgtcaccgaggccatgtccttgcaggaaggcctcctcttctccgacaccctcaaggacctgaggaatctgcggtcacagctgtactcagcggcagaatattttgaagtattttacaggaacaactcgcacaaatctactgtgatgacgagtttgaaagattacacagttgaggcccttgttagcacagtggaccatctgggttttgtgtcatacaaggtggataaccttgtcagcgagaaagctgtcgaggttaaggagactgaattcctagtgtcttcagttgaacagagggtacgaatttgccaacagacaactgaccaggaggcaagatcccagcaagctcttcttatcaaggcgccaaagtatcataggcgttacatattaccaggcctggatctactggaatcttccatccacccggtttcagaacctccacggtatagcaggcagtatacaggccgcaagatgcacaagtcccagtcttccatttctactccagttcgtcggcaggctacgatgaggcgtgaaccatctcctacacctaacgatcggtcgcggtcgttatcgccttctcgtaaagcacgagctaaatctccatctcctcgaatcgtgaacacaaatactgcaagagaaacaagggcaggctccccgataccaaattccagcccgatggcacggtccgcctctacggttgcaagaagaccgccttcgaactcgaggcatttgagactagcttccatgcagttgcacagcgactgggagcagcaggagagaagctcaagcaaaggcaggaggggtttcctcaggtcgctgctcacgaggcgccggtggaggaacgacgagtcgtccttgtacagttacttggatgagtactgattgctggaatgttggaactgaaaaaagtctggtgttaactgaatcttctatagatggatgcgatgctctctgctttgccaaaaggttttggtttcccgtttccattcttcacttgcccatggtgaaagcgacgggtagatgatgcaccgatccgatcctacccaccctgccctggtcctggtcctggaatggcagaaggcgacgacctcttcgttggatccgtacgtcggccgtgggcgtcgccatcaggacagccaccactacagcagggacgcgagcgcggggacggtggtagaatattactgcccggtgcgcgtcgactgcgacgcggtggccggagcagctgctgctgctccatgcgccttttcttggcatctactaatttctctgtttgttggggctgctgtgacagtgatgtatgtatgcatcgagcccgttgttaattatccatccggatgcaatcaatcaagcggagaaggacctgggcattggccactgccaacccgccacaagtgacggccgtcatgccgacatgccgtggccggtccaccactaccttcccgacgggccgcattggattcctcccgtcctcctcccgtctcgccatcgcttcctgttcctcttcttccgccgccgccgtacgatcacactagcaccgccagccgcaaggtcccatggacctcgacccggcctatcccccatcagcctgcgccgacgcctggccctttgactcgctcaccacgtccctgctcttctccccgcagctcacgccgataccggccaactcatccttctcctggctcaccccacactcgccgctctggctcttcgaggaccgccacctgctcccgctcgacgcgcccgccgtcttcgaagaggtccagcggccacgctccgggaattctcacacttcaagcaagccagctgaacagatcagtcacagatggcagtttcatctgtccctggacgaagatggcacagacaactccagcttgttcaaggagaagctgacacacgctcttcgctacttcaaggagtccacagatcaacatctgctggtccaagtctgggcaccagtcaagaatggagaccgctatgtgctcactacttcaggacagcctttcgtgcttgaccaccagagcattggcctacttcagtacagggctgtatccatgacctacatgttttcagttgatgcggaaaatgttggagacctgggcctacctgggcgtgtctataagcaaaaggtgcccgagtggacaccgaatgtgcagtactatagcagtggtgagtaccaacgacttaaccatgcgatcagctacaacgtccatggtacagtcgccctgcctgtttttgatccttccgctcactcgtgtatcgctgttgttgaacttataatgacatcaaagaagataaactatgcctgcgaggtcgataaagtctgcaaagcacttgaggcggtaaatcttaaaagcactgaaatacatgaccatccaaatgtccagatatgcaatgaaggccgtcaagctgcgctggtcgaaatactggagatcttgaccgtagtatgtgaagagcacaagcttcctttggcacagacctgggttccttgcaagtatagaagtgtcttggcgcatggtggtggtttaaaaaagagctgcttaagttttgatggaagttgcatgggggaggtctgcatgtcaactagtgatgtggcgtttcatgtgattgatgctcatatgtgggggtttagagatgcctgtgtcgagcatcacctacagaggggacaaggagttcctggaaaggcgtttatctcacacaaaccttgcttttcaaaagatatccgcaagttctgtaagttggcatatccccttgtacactatgctcgcatgtttgggttggctggctgctttgcaatatgcttgcaaagttcttatactggaaatgatgactacatattagagtttttcttgccgcccgattgtagtgacgaagatgaccaaaatgccttactggagtctgtattaactctgatgaagaggtgtcttcggagcctaaaggtagttggtgacagagatttgagtggggtctctcttcaccttagcaatgtgctaaaacttgagaatgaagaattcaagacagatgcacagtttgataactctgatggttccctttgccaatcacctaacggtgatagacatggaggatcccatgagtttgatggtgggaacaagaaggttttggatgtgccagagggacaattgttgactgatgacttctctcaaggcaatggtacttctgctggcagaccaaatggtagcggtgcttctgattcttctgtgcttcacaaaaccaacaaaccccctgaaaggaaacgtgggaaagccgaaaagactatcagtttagaggttcttcagcaatatttttctggaagcttgaagaacgcagctaaaagccttggtgtttgtcctacaactatgaagcgcatttgccggcagcatgggatttctcgttggccatctcgaaaaatcaataaggtcaaccgatctctctcgaaactaaagcaggtaatcgagtctgttcaaggctccgatgcggcatttaatctcacatctatcacaggtcctctccctattcctgttggcccttcattggattctctcaatgtagagaaattaactcaaagtaaagtggcagaactttcaaatatcgctgttgatggtgacagagattctttgcaaaagtcacttggaaatgatggccattttggtatagtcatgccccagcaaggatctacagaccataacaatgacacacagcttgaagctgacaaggcgtctcactcgagaagttcgtctggagaaggcagcataaattcacgcacttcggaaggctcatgccagagaagtccagcgaaccagacatttgtttgcaagccaattgcttcaacattcgcagaacctcaacttaatccagaggagttcaataaagagcctttccaagaaccacaactaccactttccaggatgctcattgaagattctggtagctccaaagatttgaagaatctcttcacttcaacatctgaccaaccatttttggcccctcccaataatttggtgccaatgaagcattcagggtctgtaacgataaaggcgagttttaaagaagatattgtgaggttccgtttctcatgctcaggcagtgttattgtattgaaagaggaggtagcgaaaaggctaaggatggatgttggcacgtttgatatcaagtatctagatgatgaccatgaatgggtaaagttgacgtgtaattcagacttggaagaatgcatggagatctcacggctttcgggtagccatgtcatcaggttatctgttagcgatattgcgacacactttggcagttcttgtggaagctccggttgatatgcctgtcagccttttgctctgatcaatgggtactcgaaagtgcttgtaccatgagttcagttccacttgaagagttgtacttttgttgctagttagcattactgcattagcgggagcattagttgcttcattgtgtttgataaatgtatcattgtatttttccgcaaaatgcatgtaattgtgcagaatgcacttgtagtcaactttgtatatgttatgtgcaagaaattctatttcaagttataaactagataattgttgtctagagtttgcacagtatattgcattggaaatgaagcagattttcctaagtcataattcatgttgtaaacatatttattcatatctttgtga

SEQ ID NO: 2118 - DNA, 3254 bp, Zea mays
cgcaaaaactggcccaccacggagccagaaggcgtgtccacacaaacggacaaaccagaccaacacgaaccggataaaggccgccctcctcgcagtacagcaaacggcggccaacaacaaccaccccggtacacgcttcccaccaaaagcaaccctgaccctgacctgcgctgcctgtgaccccgccgatccgagcgtctccatggccgcttcgtcctccgaggctgccacagccacgcccacgaccaccgtcggactcggagggagcgggaccccaggccctccgccgccaacgccatcgaaccaccacgcggcgccgtcctccgcggctggtggggccacggacgcctcgctctctgctttcctgcaccgcctcctcctctcgtccccggctccacagctacggtctccactcgcagctcggtcgcaggcgtcgccgccctcgcttccgcctctcgtctcgctcgagtcccccgaccagcgcgccctccgcaacgccgccgacgtgggctacttccacctcgccggccacggcatcccttcggggctaccgtcgtccgcgctcgccgagctgtcccggatcgacgcgtccacgcgcctggagtctaatcttcgcacgctcggcttctccgtggaggaaggggaagagcaggatgtggacggcggcgccgacgatcccgcggtagtgttcgacgcctgcgagggggacttggacgcgctcccggctgcggcggagtacgcgcgtcggatgaaggacgtgggcatgcgggttgtcgcgcttctctccgggtgccccgacacgggcttccgggagaagcccttcgcggaggggaggaggaagccgcggtgcctgctgtgggcctcccgggtctccaccgccgatacggcacctccggccgtcgggaaggcgaaggcgtacccgtacgtcgtggcgcttcattgccagtgggaggcatcagggcaggaagaggcgccgccaagctgggttatgaaccacggcggcgagtggacggcagtggccgcccgcgacgacgcgatgcttgtcaccgtcggcgacattgcccaggtgtggagcaatggcaagttgaagaaagtgagagggatggctcgccccacatccgcaccacccatggcggcgcagcatggcgagaccgaccgtctgtcgctgacggtccttatcactctgcctttggacaatatcgtctcgcccttggtcccgctctccaatgcggccggagaaggccgcgaggccgaggcaaacggtgccggagccgacgacgaggatggatggaggtttcactctttcctactggaggactatgcgtggagggtgtacaaccagcggcttcagttcaaggatccattggtccggtatcggatatgatatttgccgcgatgatctatagcgcttctttttttccttttggtgtgccaatatgcaactcatgtcatgtgtgacttcgtgttgtgatctactatttgccttcggagtggtttgagtacatcccgccttgggtttcaatgtatgttgctgacgttttgacctttgctcaaatacctgagccgctgagggattcggacaagcagtaggattctatacgaacttccaaaaatccctattgctctgtcacatgctttaaaaagcacaaaggtactgtcccaaccttgcagtttgtcaactttaaatttgtcaatgatttaatgtattctgacaggactaaagaatagattggaatgctttttgtactgtgatctccgacttagattgtttctcttgtcctgggagcagtggccacatgcttacaagctgtataacaatcaagtataggagttccagctgccttacatgaatgtgttgttatttggtgctaaatattgctttctttgcagaggaatcttgtcaaaagatattgcatcaggaagaaattagcaagtcagcattgcaggaggaagttagtgagtcctctagcttttgggaataaaattattaaaatgtaactgctttattaacatagttggcaatagggacttactccagttagaacagggtatgaggcgtaaattgcgactgttgtttgcatatgtttgtccctaatcgttacatactttggtagtttccttgggtgaagatatcaactttgttagttcctaaaaaaggtacaaatgttcttattagggacttatttactcttgctaactgtagggttaatccgttaatgcctggcttacgttcacatatgtttagcagacaagtactacagaaatgcatatgttgtgttggatttggatttgtggccatacgagaaggaaccaagtctaggacgatgatatacatgataggctaggggtagcaccaattgaaaaaaaaaatgtccaacgctgattaggatggtttggtcatatctaatgaagacctctagagactagtgcgtggtgggatcctaattcctaagacgcgatagtaatgggaagagatgcaaggaaatgctgaagttaacatcggaagagacagtaaaatgagacttgaaaggatggaatatacccaaagatttagctttcaataggagcgaatggaaaatagctatccacccacgtgcatgaaccttgatttatggcttctattgattttcaactctagcctaccccaacttgcatgggactgaaaaaactttgttgttgaacattttgtttaaagaagtaaccatccactaggctacaactacctcgaactgtatacagtggagctaatattctttcttagtttcttaaatcaaggtaatgtaaaatgattacctcaagtgtaatacaaaatgctcttgttgcttaattatgtgtttatgaatgcctataaattgtttaactgtaatctccctgtttttcggcagcactgcacaccacatgcactgcagaatctccaaatacagcgtgccctacaaaagctcttgaagttgaggacctaagctggcttgttgacaacaatagactaaggtccttaggtatgggtgtaaggcctagcttagcaccaaggcatcaagcttgattacatttctaggcacttcatattgcgttaacagagctgtcatataggttagttactttagaaaaggtatatatcatcatttagaatgcccctgtgacattggcacattgcttacagtccactgcaactactgtcttataaacatccatcttataactaagatgtacatcttcacttgtggtttattaacatatagggaaaacctcaatggata

SEQ ID NO: 2119 - DNA, 2746 bp, Zea mays
atggcctccgcaccctgctccaactcttcccccgccgccagagccccgagatccgccgctgccggcaacaagaagccgacgacgtgcctctgctcgccgacgagccacccggggtcgttccgctgcagccggcaccggaacggggccgccgcgccgggcggcgaggcggcgcacggcgccagcaggggcggcactgctggcagggcggccaaggggcgccggaaggttagaccaaaaacgagactacacgccgacgccgtctaccctgcctggagggtaaacccaggctacatatttgacgcgctccttgtgcaggctgcagcggaacgagcccgggtggttggtcggcgagcacatgcagctgatgatcctgcatctgcatccccgcaattgatcctgcacgttgtgtttgtgtatgcacctttgctcgatctgccgaatggactgatgatgatgacttgtgttgatccgatcctcgccaatgccagcaccaccgatatacgccggcacggtacggcaacagatccttttcgcgcctcccaggcagcccagttccttcgctggaaacttgagaaggcgtacatgagattgagaaggagagaacgctttgtttatagggccgcaatggatcagagcggaatcgtggtcgtggagctggccgaggcccacgccgtgccggtttcaggcgggcctagtgctcgcggcccatttaagaagcccaggacggatgaaacgaacggacaagagaagacggaactttcccagcccaacagagcccacccgcgcgtgcgctgtactctctactactcgcgagataacgaacttcagcacgctctccgcccgaagctgagcagtgactgtgagcaggcgtttcttcctccactggtctcggtctttgccgcaaatatccgctcgccccccttctcggcctcgggctctcactcaccctcgaccctcctcgcgcagcgcagccgcacgcgcgccatggcggcgctctgctccgcctccccggccatctccgcggcggcgtccctcgggtcgcccgcgcgcgtggtcgcgtccttcctccgcctgcgcctgcgcctgcgcgccgccaagcgctcctgctcccacgcgccggcgccgtcgtggcgggcgcgacggcgcttcgcggcggccgcggcggaggcggaggagtgctcgggtgtggagacgctgatcccgcccgacaatcgcatccccgccaccatcatcaccggcttcctcggctctggcaagacaactttactgaatcacatcttgactgcccaccatggaaagcgaattgctgttattgaaaatgagtttggagaagtagacattgatggctcactagtcgctgcacaaaccgctggagctgaggacataatgatgctaaataacggctgcctttgttgcactgtgcgtggtgatttagtccgtatgattggtgaattggtgaacaagaagaaggggaggtttgatcatattgttattgaaaccacaggtctagcgaatccagcacccattatacaaacattctatgcagaggatgtagtttttaatgatgtcaagctggacggtgttgttactttagttgacgcaaagcatgctagacagcatttggatgaagtaaagcccaagggtatagtcaatgaagcagttcagcaaattgcctatgctgacagaattatagttaacaagattgatcttgtcaaagaacctgaagtgttgtccttggttgagcgtataaggggtatcaaccacatggctaatttgaagcgagctgagtatggtaaagttgatttggactatgttcttggaattggaggatttgatctggagaggattgagagtgctgttgctgaaaagtcacatgaagatcacgcagagcatgatcatgaacaccatgagcatgagaatgaacacgaccatgaccatcatcaccatcatgatcatgatcatgatcatcatgcacatgaccacactcatgatcctggtgtttcttctgtgagcattgtttgcgaaggggagatggatcttgaaaaggctgacatgtggttggggaacctactgctggaacacagcgaggatatatacaggatgaaaggtctgctttctgtcagtggaatgccgcagcgatttgtctttcagggagtccatgacattttccagggatctcctgagagaatgtgggagccaaatgagccgcgcatcaacaagattgtcttcatcggcaggaacctcaataaagaagagctggataaggggttcaaggattgcctactgaagaaatagagtgatttcagaatagtcgggatatagatctccagttttggccttcttcgaatgtagtcagattcacatcaattcatatctgttggagtggattgaagacagtgaagcttgaactaaattctaccccaattcatccgacatatgtagattaaggtgaatccgacaacatctaaacaaggccttcatgattttgagttttgtggccgcagaacttatcctcgatatctgacatgacatgtaacgagagatgtatcgaatcgatagcattattgcaaccttgcatcctcacgaaatagtctatcatagttttattgcacggtgttgcaatgtaaccaatagagattattataggatgtctttgtctctgtgatacgaggaaatcatattgcatggtataatatactattgaatgtgttagcaatcaggagttgtttaaaattaacatttttgt

SEQ ID NO: 2120 - DNA, 4708 bp, Zea mays
cgctgccgtcgtcgcgccggcctcgatacgttcccgggaagtcggaggcgccgcgctcgtcacgccgccggctccgacgagatggaggatggcgtatctacttatactgtggatgaggcacttgtgtccatggggtttgggaaattccatgcattcgtgcttgcatactctgggatggctaaaatctctgaagcaatggagatgatgcttttgtcatttgttgggcaatcagttcaagctgagtgggggctttctgcacatgaagaaagcctcataacaagtgttgtctttgtggggatgcttgtaggagcatatgcttggggcatagtttcagataactatggaagaagggttgggttcaacttcacagctattgttactggaggagctggccttcttagcgcttttgctccaaattacttatctttgattgtactgagatttatggtcggtgttggactgggtggtgggccagttttaggttcttggttcctagagttcatccctgctcctaaccgaggaacatggatggttatgttctcagcattttggactgttggcacaataatggaagcttctcttgcttgggccgttatgccagcttttggctggaggtggctgctggcactctcatcattgccatcgtttgccctgctactcttctacccagtgacacttgagtcaccaagatacctatgcatgaagggtagaatagctgaagcagttcatgttctggaaacaatgtcacgcgtgaactgtgtttctctcccctctggccgacttgtctctggccatcgggtggaacttcatgatatcggggattcttcagaaacggcacagttggtgacatctaataagaataacactgctgatcgtggtagcaaatccgagattggaggcctcagtgccatcttaaagcttctatctccaaacttaatcagatcgactcttctactctggactgtctttcttggtcatgcctttctgtactatggtcttgttctactcacatcagaactaaatcatggaaataggatctgtggatcagaagagggggcagaagtgacaacaacagcccacatacatgatgagaatctctacagaaatgtatttataacaagctttggagaggtccctggtcttctcctgtcggctgccattgttgacatgatcgggcgcaagctctcgatgtcttccatgctttacatcagttgcctgtgcatatctccgcttatgttcgcccagacggaatcgctgacgaccatctttttgttctgtgcccgggtttgcatctctgcaagcttcactgttctgcacatctacgcccctgagatatacccaactgctgttagggccacgggtgtcgggtttgcaagctcgattgctcgctttggtggaatcctgtgccctctcgtggccgtcggcctggtgcacgcgtgccaccagatggcagctatcctgatattcatcacggtgatgctggcttcaggcatcgccgtgtcatacttccccctggaaacaagcggccgaaagctgagcgaccacgtcgccgccgcgtaagagctgattaattgaagaactgactttttgagagggatacaccaatacagaatcaaggcccaaggggccattattttttttgttcagttgttgacaaaggatacagtgggaaagaaagtgcaaaggaggcactagattgttacgttattatactgttgcttctcaatagaaatctacagatcactatatgatttttgttctcttgtcaatatggtattagtatgaattctaaacgccctcaaaattcattttttgtttcaaaagtgaaacgtctttttatatatgaattgggaaactaaaaaatgaaattccgttgccgggactcgaacccgggtctttcgggtgagagccgaatatcctgaccagctagactacaacggattctgtttatgttgtgcatagtaatttataagattacgtagagctattcacagtaatggcttagcgacattctcgctgctgcaatggcgacggtctcgttccatcactgtcccccgtcattctcgctgctccaatggcgacggtctcgttccatcccccgtctcttcctcctccgtctcctaattttggaaaggccatagtttcccatcgcgagacctgtatccccatggatccatgagagaaaggcggaggagatcaggcgacgtacgcgcgtgggggtctcctcctgcacgctctcagctgaaccgccccgtgctcccctgggcgcgccgcgcgcaatggcccgacgacggcgccccctaccgccgccgctgctcgtctggttggccgtcctcttctctgcggtggcgcccgctgtcgccaagaccgacaagtctgacgttgctgcgctcaatgtgatgttcaatagcatgaacaagccatcgcaattgtccggttggaaatcgagcggcggtgatccctgcgatgacgatgacgagtggaaagggatagagtgcagcggctcatctgtcacagaaattaacttgtcagggcttgaactcagtggctcgctaggatatcagctatcaagcttgaaatcagtaaccaaatttgatctcagcaataacaatctcaacggcgatcttccatatcagcttccaccaaacgtggttgaattaaatctttacggaaactctttaactggaggagttccttattcgatatctcagatgggtgatctggaaacactaaatttgggcaagaaccacctaagcgggcagttgacggatatgttttcagaacttccaaagctctcaacattggatctctccttcaaccgcttctcaggcagcctgcccaagagttttcagcacctaaaagacctcaagacgctgaatgtggagagcaaccaattcagtggtcatatagatgttctagcgaaacttcctctcgaggatctatagtggaaactacgcttcgtctttctgagaactaaagctataatggcttcccctttgtgctcaaggaatctgcagaacaacaagtttactgggtggatccctagtaaactaaaagacatcagcaatctacagattggagggaaccagtggtcgtccggatcagctcctcctggtatggagaagggctctgcactggagggctcttcaggcggaggtggtcgaagtggagtaaacggtatcgccatcgcagctgtggtgatagcggtgcttgttgcagctctgattctcttgtctgtgttgaagaggaaccgttcttcttcctcgtctcattacctcatggatgagtcagcgatcaacatgaagccactggagcattcatcgtcaattagcagtacgacaccgtctgcaatgcctatcaagccgattagtgacaacgagttcgagaacaaactaaactattcgaggcggagcacagatccagtcaaccttgttgcttattcatcatcagacctccaagcagccactggaagcttccatagtagcaggttactaggtcaggggacaatcggtggtgtttacaaggcaaaatatgctgatggaacggtgctggccgttaagaagtttgatccattgagcttctcgggaagcagcgacttcatggatcttgtgaacagcatttccaagctgcatcatccaaacatctccgtgcttgttggttactgctcagagcctgggcactacatgttggtctatgactacaacatgaatggatccctctatgactttctgcacttgtccgacgactacagcaagccgctgacctgggacacccgcgtaaggattgctgttggtacagcttgtgctctggagtacctacatgacgcgtgttcacctccagtgatccacaagaacatcaaggcatccaacgtcttgctcgatgctgacctcaaccctcacctcactgactgcggccttgcatacttctatgaggatccgagtcagagcctgggaccagggtacgatcctccagagtgcacaaggccatcaggttacgttatgaagagcgatgtctactgctttggtgtcgtcatgcttcagctgttgaccggccggaagccctacgacagctcgaagcctagagcggagcagtccttggtcaagtttgtcggtccacagcttcatgacaccaacgccttggaagctctggcggatccaggccttcgtggcctatatccaccgaaagcattgtcccgtttcgccgatgtcctctcccgctgcgtccagtcggatccagaactccggccatccatgtcagaggtggtgcagttgcttctccagtgcgtccagcgcacaaccagcaacaggaggctgggtggccaccgcaccgtctcgcagcgaagcgacgattctgattggtgatgctctgtttctgcctccatcctgctgctgcggcccagttgctgaaactgtctcagaacagaaccgtaggtgtgcggcccttggcatgccgctgtacaaaagaaaatgctttattagacaatctggttgctcgaacagtgtggcaacaaataagtcggttgatttaggtaaaggtaaaagcagattgggtgttctagtgagtagtgacattgtatttgtactcataaacttaaaaacatatgaccagctaatttttaaaaatatataaaccatcttagaacaactccagcagggcctctcagatccctattctacttttgagaatgcaagagccaaaaaaaaaaaaa

SEQ ID NO: 2121 - DNA, 1520 bp, Zea mays
actcaaaaggagtgcctccaaaaggaaacgcgcaacaggagaccgggagagcgagcgaccaatcggactaccggccggagggtcggagggagctagcatgagagcgtccattccaacccaccaccaccatcgctgttcattcatccgttacgcacacaagtagtataaaacaaaaccctgtgctcaccagtccttccctccctccctgcctgctgtccgatcccgttccattgctcaccctccattggtgtggtgtctgtcttttcgtgcaatcaaaggcgatccgcaaacaaacacacggccagagatcaagcagccagctagcgcagcgcgagtggttccaatgcagggagacccggggtacggtggctacggctacgggtacggctatgacgtcgccggcaacggcggcggaggcgggtactaccctgcgaacgaccggtaccctgccgctgcctatgaggacccgctcgcgggtcggaggcagccgctgctcacggggctggagttcgaaccgtcggacacctgccccaggaactacgtcatcttcgaccagacgtacgaccggagccgggtgatgtaccacccctctctgcccgccgacaacttcgaccaccagggttactactccggtgagagcgcctaccacggcggcggcggcagcggtggctcggtccggcagaaggaggacaccgacgagatcgacgcgctgatgagcacggaggacggcggcggcgacgacgacgaggacgacgtgctcagcacgggccgcacgccggggtgccgcgccgctggctccccggactccacgtgctcgtccggcggcggccggaagcacgaggcgccggccggcggcgagaagaagaaggaacgggtgaagaagatggtgcggacgctcaaggggatcatccccggtggcgaccggatggacacgcccgcggccgtcctcgacgaggccgtcaggtacctcaagtcgctcaaggtggaggtcaacaaggccgatgcgcgtgggtccggcagctagctagctagccggcttccaactgctagtctggctttgccgatcaaaacaggagtatctatctctctgcgcatcggcagagaagatgggacacgtacgcgaacaaagaagatggtcaacggtgctggagagacagaggcagtaatggattggaatctaagtgcaaaaatagagagagttctatcactccctccgttcatgtttacacaggcctacgccaatttttgatttggccgagtagatatcaagggccaattaattactcgggagaaagaaaaaaaaaaaaacaaagcgatgcatgcatagctagcaacagctccgtacgtggcgtcagtagtcaagagtcaagaacacacttttattctctaccataccgtgtagccagttacttcccccctacatgctagtttaatgggaatatatcatatgcgaaccaaccacagtttacaaaatatgtaaaccaacattgattgagatagtaagatatatttcaaaatat

SEQ ID NO: 2122 - DNA, 580 bp, Zea mays
cgcaggtccgcgaccgcacccctccccccccccgccccacataggtccggtccccggcgccggcgccgcgatgcccaggatcagaagcggcgacctcgctcttgccgctcaagcacgaaagaagccccgtcgagccggaggccgcgtgtcgtgttccggccctcgacgccgtgctcgaccgcaatacgaccttcctcttccttcgccgagtgtgatcgttcctggcttccctcctgcatccgcatcggatccccatgccgaggctggaaagctgtacgaccttcgcactccgctacgcgcaagtggcggcctcgctcctgccgctcaagcacgaaagaagcccatcgagccaaaggccgtgcgatgtgttccagccctcgacgccgtgctcgaccatgatacgcccttccgcttccttcgccaagtgtgctcgttcctggcttccttcgccagagtaatatctgagtcagcaacttgacttcatttgaatcatgcggcttcttaggtttcagtctgactaaatatctaagtttgcagccgcaccttttgtttcatgtcttctttgggggtggccgggtgg

SEQ ID NO: 2123 - DNA, 1371 bp, Zea mays
agttcatcactaatcacacttattgtgccctcgacgagtatctatagctagctcattaatcgattcgggggtgtgttgtcgaaggcggcaatggcgagctactcgtcgcggcgtccatgcaatacctgtagcacgaaggcgatggccgggagcgtggtcggcgagcccgtcgtgctggggcagagggtgacggtgctgacggtggacggcggcggcgtccggggtctcatcccgggaaccatcctcgccttcctggaggccaggctgcaggagctggacggaccggaggcgaggctggcggactacttcgactacatcgccggaaccagcaccggcggtctcatcaccgccatgctcaccgcgcccggcaaggacaagcggcctctctacgctgccaaggacatcaaccacttttacatgcagaactgcccgcgcatctttcctcagaagagcaggcttgcggccgccatgtccgcgctgaggaagccaaagtacaacggcaagtgcatgcgcagcctgattaggagcatcctcggcgagacgagggccaagagcacgcctctgaagaacgctctgctctcggacgtgtgcattggcacgtccgccgcgccgacctacctcccggcgcactacttccagactgaagacgccaacggcaaggagcgcgaatacaacctcatcgacggcggtgtggcggccaacaacccgacgatggttgcgatgacgcagatcaccaaaaagatgcttgccagcaaggacaaggccgaggagctgtacccagtgaagccgtcgaactgccgcaggttcctggtgctgtccatcgggacggggtcgacgtccgagcagggcctctacacggcgcggcagtgctcccggtggggtatctgccggtggctccgcaacaacggcatggcccccatcatcgacatcttcatggcggccagctcggacctggtggacatccacgtcgccgcgatgttccagtcgctccacagcgacggcgactacctgcgcatccaggacaactcgctccgtggcgccgcggccaccgtggacgcggcgacgccggagaacatgcggacgctcgtcgggatcggggagcggatgctggcacagagggtgtccagggtcaacgtggagacagggaggtacgaaccggtgactggcgaaggaagcaatgccgatgccctcggtgggctcgctaggcagctctccgaggagaggagaacaaggctcgcgcgccgcgtctctgccatcaacccaagaggctctagatgtgcgtcgtacgatatctaagacaagtggctttactgtcagtcacatgcttgtaaataagtagactttattttaataaaacataaaaatatatat

SEQ ID NO: 2124 - DNA, 860 bp, Zea mays
ggcccatgggccatgaccccgttgcccgctataaataccccgccccgcccatcggttccaactcacaactcgcagatcgagtccaagcattcaccggagaatcccaaatcacactctccagtaaccgcccgcttctccagccgcatctctagccgagtctatctcctcctcctcctccgccgccgcaactatcctaatggctcgcttcgccgtggtcgccgccatcgtcgccctcctcgccgtcgtcgcggcggcgcaggccccggccgccaccccgaccacagctcccaaggccgcgcccaggatggccccgctgccgccaccccctgtgcggtccccggccaccgccccggcgccggccgccaagccgccgaccgccgcggcgccgtccccgctggcctctcctccggccccgcccaccgagggccccgccgcctctgcgccgtccgcgaaggccccgacctcgtccgtctccaccaccccggccggcgcccccaccgtcgcgccttccggcagcggcgccgcctcgcgcgcctccgccctcggcttcgtcgccgtcgccggcgcggtcgcagccgccgtcatgttctagacgcctccccgcggcgtcgggcggtgctgtttatactatcgtgttttacttttgtgcgtgtgtgtgtgggtgggtcgtgggtgattctttcttagatactgagagagcagaggttatgtgagagattctagtgggggtagcgatgggctgttacatatgaatatcatgattcatgatccagaggattattaatggaattctttcatttgtttctagtacgtcacgttgtcccttgtcatattactagtatactacacacgattgcacg

SEQ ID NO: 2125 - DNA, 591 bp, Zea mays
atggcggctaggattggatgcaaggtggggcaatacaatcgaggtgggccgcgcctccgcgaattgagccgtcgcaggaagacgaactatgtgaccactaatctgcgtcgcgtaaagaagaaacgggagtcaaactggcagcaccgagacagtgtcgagggagaggaatcgagaccatggaacacagcaccagcgaaacacagggatggtagtgaatacgaaggcggcggcgctgggcagaggaaggcgactgattgggagggaaaagaaaatactcgccttggtgccatggccgcgggagcagagggcggcggggttgcaggaccttcccaaggagagcaaaaatttaggtgggcgcgtccgcggatctcgccggtgtttgcctgcgcgagatggaggtgggttccgcagatggtggcggagcagaggggtaggagaggaggaaggggcggatcagcgtggggaggagggtggggatcctcggaaccttccagatcgaggcggggcatgacttgcggccgtgattggaggtcaggattgccagcgtccgcgggtctcgccggtgctggaggcaatgcagagatcgcgtag

SEQ ID NO: 2126 - DNA, 2405 bp, Zea mays
gcctctcgtaagctccgcccacggcgctgccctgtcggccgctgaaacctgaaaggcacaccgcagacgacacgagtcgtcgagtcgagtcgcaccacttttacgaaccactccgcgagtagccgagcaccccagcgctcaccgacctttctccaaaccgtcgtcgcgcccgccccgtgccgcccgccatggcgccgccggagccggagatgttcgacgtcgtcatattcggggcctcgggcttcaccggcaagtacgtcatccgcgaggccctcaagttcctcaacgcctcctcatccgcctccccgctccgctccctcgcggtcgccggccgcagcagggaccgcatcgcagccgcgctccgctgggccgcggccccggccccgccgcccgaggacgtgcccatcctcgtcgccgacacctccgacccggcctccctcgcggcgctcgcctctcgcgcccgcgtcgtgctctcctgcgcggggcccttccgcctccacggccacgccgtggcggcggcctgcgcggccgcgggcgccgactgcctcgacatctccggggagcccgagttcatggagcgcgtcgagtccgagctccacgagcccgccgccaggagcggctccctcatcatctccgcctgcgggttcgactctgtccccgccgagctcggcttcctgttccactccaggcagtgggagcccccgtccgcgccggccaccgtagaggcgtacgtgagcctgcagtcgaccaagaggatcgtcgggaacatcggcacctacgagtcagctgtgctcggagtggccaacgctggccagctgcaggcgctgcgccggtccagacccaggcgaccccggcccaatattccaggccctccacctcccaaagggtcgctgattgaaggtcacaatcctctgggaatgtgggctatgaaactgccttccgctgacacagtggtcgtgaagagaactctatcaaccttgactgagcatcctgagggccttcctggcgcagaagaaaccccagagtacgctgatcataggaagaaattatggtcttctgtcaaacctgcccattttggcgtgaagatcgcctccagatccctgctgatccttgtgcgcttcatcttcaccggaatcttcatcggcctgctcgccaacttctccttcggcaggtccctcctgctgaagtaccctgagtttttctccgctgggctgttcagcagagccggcccgaccgaggaagaggtgaagagcgcctcgttcaagatgtggtttgtcggtcacggctacagcaacgtggatagctcgttggagctcggaagaagcaagccggacaaggaggtgatcaccaaggtttcgggacccgaggtcggttacgtcacaactccgatcgtgctggtgcagtgcgccctcgtcctgctgagccagcgtgccaacctgcccaagggcggggtatacacgcctggcaccgtctttggccctactgatctccagcagcgcctccaggataacgggctgtctttcgaggttaacaccactagagccatgcattgaagttcactggctccactcagtgcatcctgtggaaaaacttggcagaaggatgcaacttgagcaataagaagcgccaattagcaacttaaagggcttgtttggaagtaaggataccgccggagaggagctgaaaccccttgctattcaattttgaatataaggggattttagctccttaaatcccgtcgggtataattgcttccaaaagccataactgtgtgtgtcgtaccaacagtcctatggagtcttactagttactaccgctgtaccttctgaattacctagttccttattcttatgctgtgtttatatagaggtgacaataggaaaacgttgtgatcgtgtgctgcagagaggatcatatgggttgcaatgcgcaatgccagactcggcgtgctgtggaaggaaagatgctattcgtgccacacaaacgtaatcctgcagttcaaataccgaccagggcccacgacatggatccgaacaaatcgcaagaacgtccacgacatggattcgaacaagaaccaagaccaactatctcccaagaaccaagaccaactatctccgttctctctctccaccaaagcaaatgccaaaggaaccaatgtgttgcttgtgtcacatgaaattacaactaacaatgtgcctttatacttagaaaacagaaaagtatcattaatagagagcacgagacgacaatgtctgaaggtctctacgcactgcaagaaacaccagaaagcacgaaagaacatctctctgtcattcctccatttgttaggtttagggatgtactcgtaatgcatgcatgagttttttgcttttaatgcattgaacaatgctggcaacttctcgtaa

SEQ ID NO: 2127 - DNA, 1597 bp, Zea mays
aattctgtagaactcgacaagaactggtgccatcacgtgggttatgctcccgctgtagcaataattgaagaaacgtctagatcgctcgtccggtgtggtctctggacttgcttgccgttcacttctcttcagcggcagcgtggcaaggcaacgagagcaacgaagagtattcaaaccgaaaacaatggatccggtgcggaagagcgtgtgcgtgaccggcgctggcggcttcgtcgcgtcggagctggtgaagctcctcctctcccggggccaatacgcggtccgcggcaccgtgcgcgaccctgatgcggatagagagacgtgggaatgtggaaccgcatttttcttggaagtcgaaagaagctccagattctttataaaaaaaggtgctagcaagaatgcccatctcaaggtgctggaaggagctgaggaaaggttgcagcttctcaaggctgatctgatggactacgacagcattgcatcagcagttgccggctgtgagggtgtcttccatgtagctagccctgtcctttcccatcgaccctccaaccctgaggtggaggtcatagctcccgctgtaataggtacaaccaatgtgttaaaggcttgctatgaggcaaaagttaggcgagttgtggtggtgtcttcatgtggagctgtgtatgctaatcctatttatccgaagggtaaggtgtttgatgaagactgctggtcagatgaggattactgcaggaagaaggaggattggtatttagtttccaaaacactgtcggaacgagaggctcttgcttttgcagcaaaaacagggctggacgttgtaactgtttgtccgtcattagtatttggacccttgatgcagcctacagtaaatttgagcagcgaaatgatccttaaatatttcaaagatctcgagactgttgaaaatgtactcagtaatatggtggatattcgtgatgttgctgatgctcttcttctgacttacgaaaagccagaagcgtctggacgatacatctgcagttcacatgcaataaaaatttctgatatgataaacatactgaagaccatgtatccgtcttacccttatcccaaaaattttgtggaagatgatgtcaactctgtatacagctctgagaaactgcagaagctggggtggagcttcaagcctatagaggaatccctccgtgacactgttgaatcctacaaggcatttggcatcctgaattgaacatcgaactaggattgtttccatctgctgttgcctccgaactcctcctgaataatgtaggcgcagtgacagcagcactgccgttctctttatttttcaacactattatgtagtggttcaggccaaataagtaggcccggtgctgactgttgtatggtttgtggcctattgtcgttgctaaaaactagaaatatgcgtactaatgttgcattgctgcacttgatttgcttgtcgtcattctgatgcattttgatttgagcttttgaaagatgcagcatatgattttctgaaacggagatcgacagccagttggggtaaatgaagtgtagaggtccgttatttgtgataaaaaaggcaaactaaaaaaccata

SEQ ID NO: 2128 - DNA, 444 bp, Zea mays
atggcgcggccgtggcactcacgcccgccccggctccctccctccccgtggcgcggcgcgcggtcccggccccggcgccctcggtgcggtggcccgcctgcccggcctcagcctcgtcccgacctcggcgtggcccggctcgcgcccgcccgcccggcgcggcccgcgaccccggtgccccacctcgcctcgaccccctccctcccctgcccggcgcgacggcgcgcccgtgcggccccgccctggcccgctcggtcaccgtcctcggcgtccgcccgccccaacccctccctgcacggcgcgctcgagtcccccgcgcccggccccggcattccccctccccggcccgacctcgcccgccgctgcgcgcagccccaccccggctcagccgccctcgcgccacgtcctcagtgcggcgtgcccgcggcctcgcccgcggcgtag

SEQ ID NO: 2129 - DNA, 537 bp, Zea mays
atggaagaggggctcggcaggtcgcgcgaggaagaagtcgagggcaaggccgagcagaggaagccggccatggagagggagctggggggaccgtggcgtggagactgggcaccgggcgcgagcagctgcttgggtcgagcggccgaccagcgagcgcaccagggagccaggccgcggccgagcgagctccaagctggggccagggacgcgtgcgcacgaaaatgggtaaacgagctggggatgcgctggcgaggagaagacgcacgcgcagccggcgacatggccgagctcggaggaggtgctgagccgatgacgagcgcacggcagagggaagaagacgcgagggtgagagaggaggaactcgaccgcttcttggggaagagagggagcagagccgactggataggacacgcgcagggaggagcgctatgcacaggagcgcgcaggggcgcgactgggtgcagaggtgagggtggccaggaagatgagcggtcggcgcggtcggctggagaagaagactgcgctcgtgggagataa

SEQ ID NO: 2130 - DNA, 1801 bp, Zea mays
ccgcactgtcgggcagtgcaacagccaagagtgctgaacctaaaccgaactgactgcggcgtcctcttcttgttcccaaacctcaccgcctcaactgcttcgccttcgactgcgggcggcggcggcggcgtacaaagaaccaaaagatgactccttgcgctctcaccgtcgactccctaaacccaaaggtgctggctctcgcggatcacctcggcgacaacgccattgcccgccgcgcgcagtgcatccagaacgagatagaagcagaaccggagtcacaccctttccgcgagataatcgattgcagcctcagcaatccacagtccatgggacagcggccaaacaagttcttccgagaggttcttgccttgtgcgactatccccatcttctagaacagagtggaactaattccttgttcagctctggtgcgatagcaagggcacgggagattctagacctctttcccgggagagcaacaggaggatatagccactctcagggcactgaaggattgcgcgacataatcgccgctggaatagccgctcgagataatttcccctgtaacgcggatgacattttcctgacagatggagcagctccgccggttcacatgatgatgcacctgctgatacgggataaaaaagacggcatcctctgcccagttccatcgcattccttgtacacgagtgctatgcttctccagggcgctactcttgtgccatatttccttgacgagtcaagaggctggggagtgagcatgtcagacctgaagaagcagctggatagtgcccggtcaatgggtgtttttgttagggggcttgtggttataaatccaggcaaccctactggacatgttctcgtggaggaaaatcagcgtgagattgtggatttctgcaggaatgaagatcttgttcttctagcagacgaggtttaccaggaaaatatttacgcagatgagaagggatttcactctttcaagaagatagcacggtccatggggtacggcgaaggagacatatctttagtgtccttccattcagtttctaatggatattatggtgaatgtgggagaaggggaggctacatggaagtcactggcttcaactctgatgtaaagaaacaagtgtacaaagttgtatccctaagctcgtgctccaacatctccggccagatcctcatgagcctagtcatgaacccgccacaggtcggagacgagtcgtacgcctcttaccaggccgaaagagacggcgtcctgtcatctttcgctcgctgcgcagaggccatggtgcgctcattcaacgggctggaaggggtgacctgtagcgaggctgaaggagcagtgttcgtgttcccttcagtccgtctgccaaagaaggcggtcgcagctgccgaggcaagcaacacgcagccagatgcgttctacgccctccgcctcctcgaaaccaccgggatcgtcgttgtgcctggctctgtttttggacagatgcatggaacgtggcatttcagatgcacggtcctgccacacgaagagaagaagacgatgacggtgatcatctccagctttgtggcgtttcatcgagccttcatggaagagtttcgcgactaacagatttcagctcctcttcttctatctctgtattgtaccacaacttaatgctgtacttcggagaaaacctagacctctccaaatgcatgattcctgtatgaaactgtttgagtttttctttttcttttgttgttgtgtctgttacggctattttagtccaacgcaactaattatatatatatatataggcaggt

SEQ ID NO: 2131 - DNA, 752 bp, Zea mays
atgctcgcgtcatccctaaaccctgctcggtctccatggaagggtcctccacctccgccccggatccgcgtcccagccatcctccacctcggatccgcgtccgcgtccacgctccccgctcggtctccatggaaaggtcctccacccgtggaccttgcccccaccgcactcgtcctctatacgggggagaagtttccatccaaatatttggggcagacctcctcgccccgcatctcccttgccatccacggatctggccccgccccggattctgctcgcgttaagggccagtactcggcgtgggcggccctgagcgcagcgctggtcgcgtaccggtgcctcagcggcagccccaagaaccggctggacatgtccgccgtcgtccaggcgctggagcccctgctcgaccttgacgacgacgtgcctatggcacccctgggccacgccgaccccgtcgtgctattcgtagcggccgccgcagaggagaataaggagcgggccccaaggaaggacgtcctcggccaccgacgcaggcccatgtcgcccaaggcgagccccaggaagcaccccagcgccggcaccaaggacgagttttgggtgtggcatctgccggccgaccagaagacacgtctgagcttgggcgatgttgtgcaagcgtgtgcgtgaggcaagctggcgaggtgctattggggctgagtttgtgccttggaccaaattattgattttcagtctgctgttacgatgagatgaga

SEQ ID NO: 2132 - DNA, 1540 bp, Zea mays
cgcatagccgcatatatttggcagcaggagcggcctctcacttgcttcgacgtatttctctatctatcgatacggttcaagggaccgaagaaggtagagagagaaacttgaaggggagaggaaggagatacaggttcatgttcatttaggtgtcagttcatctgatttctcagaagcaaaatgttgtttggagctcagtgacaccattttgtaatgcatgtgccttttacgggaaatggaggatcattatgtccatcccaagtctaagtctaaccatggctccttgtcaggaaatggttatgagatgaaaaatccaggccatgaagtttgtgatagggattcatcatcagagtctgatcgatctcacccagaagcatcagcagtgagtgaaagcagtctagatgaacacacatcaactcaatcagacaatgatgaagatcatgggaaggataatcaggacacattgaagccagtattgtccttggggaaggaagggtctgcctttttggccccaaaaatagattacaacccatcttttgcttatattccttatactgctgatgcttactatggtggcgttggggtcttgacaggatatgctccacataccattgtccatccccagcaaaatgatacaacaaatagtccggttatgttgcctgcggaacctgcagaagaagaaccaatatatgtcaatgcaaaacaataccatgcaatccttaggaggaggcagacacgtgctaaactggaggcgcagaacaagatggtgaaaggccggaagccataccttcatgagtctcgacaccgtcatgccatgaagcgggcccgtggctcaggagggcggttcctcaacacaaagcagcagccccaggagcagaaccagcagtaccaggcgtcgagtggttcaatgtgctcaaagaccattggcaacagcgtaatctcccaaagtggccccatttgcacgccctcttctgacgctgcaggtgcttcagcagccagccaggaccgcggctgcttgccctcggtgggcttccgccccacagccaacttcagtgagcaaggtggaggcggctcgaagctggtcgtgaacggcatgcagcagcgtgtttccaccataaggtgaagagaagtgggcacgacaccattcccaggcgcgcactgcctgtggcaactcatccttggcttttgaaactatggatatgcaatggacatgtagcttcgagttcctcagaataaccaaacgtgaagaatatgcaaagtccttttgagatttgctgtagctgaaagaactgtggttaggttatgagtttcttcctggagactgatccatacatgacatgctacctcgtgctgagtttctgaggtgaagccatcgaaacatgaccgtgtggttcagtacccttgctgccttcagtgtctgataagctagctctccagtttgcagtttctctgaattccagcatgtctagtctctgcttatcttttgcatgtaacgtgatggtgacttagcatacacatctattcatccatctatgttctc

SEQ ID NO: 2133 - DNA, 2337 bp, Zea mays
ttccctcccttctctattctgttcccctttcccccctccttctccctcctcgccaacccggtagtaaccccacccaccgcccgcctccagcctcgcgggtccccgccccgccttgccggaaccctagctccggcgcgtgccccggcctccccagccacctatcggttccgggggccccgcgcccctcggctcgatcgcgcgagatccggagccgccgccggccgggcgcagaagccatatgtcgggggtcggcagcggcaggccgccggcagcccagaagatcctgcagtccctgcgaccgccgctgtccttctccacgccgtcgcggccacccttcgccgcgcccgacgactaccaccgctttccaacgccggctgcggccacgtcccccgccgccacctcaggcggcgttggcgcgggggctgctcctcctgatactgtcgaggaggggctggtcatacggactccgctaaaaaggaaagccacatctgaagaaaatgctgctgctgactcaagcagttgtatcattaccagtccaatgctcactccggtctctgctaaaactgttaaagcttctaaggcaaaggctaagaacagtaaaactgggcctcagacacctacatcaaatgttggttcaccactcaatccaccaacgcctgttggcacatgccgctatgacaattcactaggacttctgacaaaaaagttcattaacttgcttaagcaagctccagatggcattctagatttgaacaatgctgcagaagtactagaggttcaaaagcggcgcatatatgacattaccaatgtccttgaaggcattggactaatagagaagacacttaagaatagaatccgttggaaggccctggatgattcaagtgttcaattagataatggtatctctgctttgcaggcagaagttgaaaatcttagtctgcaggagcaagctctagatgagcgtataagtgacatccgtgaaaaattaaggggcttaactgaagatgaaaataatcaaaggtggctctatgtgactgaagacgatatcaagggattacccagctttcagaatgaaacactaattgcaattaaagcacctcatggtactactcttgaagtaccagatcctgatgaggcaggtgattatctccaaaggagatatagaattgtattaagaagtacgatgggaccaatagatgtttacttagttagtcaatttgatgaaaaatttgaggaactgggtggtgttgcgacacccgccaagcattcaaatgtgcccagacatcaaccagctgaagatttcaatacatcatatgctggacaaagtagcacactaatgggtgtggcacatgatgcacagcacagccagaagattccccaggatcctagtgctttgcatgactttggagggatgacaaggattagtccttcagacgtccatacggattctgattactggctcctaacagagggggatgttagcatgactgatatgtggaaaacagaacaagcgcagtgggatgagatggatttcttgtcagaagatgttgtcacccctcgagcccataatcagcagctggtcacagttgatgggccacatatggaggttccaagcacagatccataagatcataatggcctcaacaaaactgacatctgaacacctggagcggtgagtgttgaatgggaaggattctcgtgtgacagtaaatgcttattattgcaacggaagagccggacgatttcatcagggaatgtcacctggagtttagtcagggcatcagttcacaacttcagattggtgcacaccgctgttgtgaagattggcgaggtcagcttggttaacaatttactgcctgattggtaacctgcagctatttagcttagccgacactgctcccggcttctgtgactttggtgttgtgctcattcatccctgctccattggcttgccaagctattatcataccagaccggtggacctccactgaaaaatgctgcacaatgtataaaacatcaggtcaaaacggtgcacagtgcatggggtgttggcgttacaaaaccattgggtgagctatcaatgtaaggcagaaaattctttgtaccgcgttacaaaaccattgggtgagctatcgatgtaaggcagaaaattctttgtacaattgtttgataccccagatcaaagcatagctgttcgattgtaaacaaatgtttctatgcatgtatcagagaggagctcaaattgtttggcatacatttgatccattcacaggttcataccctgttaaacgtaacaacctttgataacgaagaaagatgctctattatgtgtatgta

SEQ ID NO: 2134 - DNA, 3374 bp, Zea mays
cctagccttgccagtttccacgacagagagagagagagcgagaggaggaaagaagagtcatcgcagacagaagagggtgctccagcgtgcatctcgtcgcccgccgtcggcgtgattgcttggcagcaggatggaggaggccacgcggcgccgtatcacgccgacgacgacgctgctgctggccctggcggtgctggcggcgagcgttcccgccggcttctgcgccatcaaccctcaggacgcttctgctctcaacgccatccagagccaatggacgaacgcccccttgagctggtcctcggcgagcgacccctgcgacgggggctgggacggaatcatgtgcagcaacggcagggtcacgtcgctgcggctgtcaagtgtcaacatccagggcacgctcagcgacagcgtcggacagctcacccagctcatgtacctggacgtttccttcaacctcggtctcaacggccgaatgcccgctacaatcgggaacctggcgcagctcaccacgctgatcctggcaggctgtagcttcaccggagccatcccacagcaactcggcaacctgcagcagctctcgttcctggcgttgaattcgaacaagtttaccggcacaataccccctacgctgggtctactctcgaacctcttctggctggatctggctgacaatcagctcactggatctatcccggtctccacagcaacaacgccggggctcgaccaacttacccacacgaagcacttccacttcaacaagaaccagctgtctggaacactcacaggcctcttcaactccaacatgagcctgatccacatactgttcgacagcaatcaactgactggcccgataccagaggagctagggggcatttcatcgctccaagttctccgactagataggaacagccttaagggaacgattcctcctaacatcagcaacttggtcaatctgaacgagctgaacttggccagcaaccagctcactggaccgttgccagatctaagcagcatgaccaaattgaatgtcgtggatttaagcaacaactccttcgccgtttcagcagccccaaactggttcacaactttaacatctctaacctccgtatcaatatcttctggaaagctttctggcgctgtccctaagggtctcttcaggttgccccagctgcagcaagttgtgctgagcaacaacgagttcaacgggacacttgaggtcacaggcaacatcagcagtcagcttcaggctatcaatctcatgaataacggcattgctgctgccaatgtcaccccaagctacaacaagactctagtgctactagggaacccgggctgcgtggacccagagttgaaagtcttctgcagcctcaagcaggagagaatgatagcgtacaacaccagcctggccaagtgctcctctacggcctcgtgttccagtgaccagcgcctgaaccctgcaaactgcggctgcgcatacccctacgccgggaagatggtattcagagcgccgctcttcacggacctgacgaacagcgccacctttcagcagctggaggcgagcttcacgacgcagttgtctctccgcgatggctccgtgttcctctccgacatccacttcaatagcgacaactacctccagattcaggtggcgcttttcccgtcgtctggggtgtccttcagcgtggcggatctgatacggataggcttcgatctgagcaaccagacttacaaaccaccgtcgaattttggaccctattacttcattgcagatccatacgctcttttggcaggtgcttcttctcgtggcagtaaaaaatcacatatcagcactggcgctatcgctggaattgcggtagccggtggaattcttgtgattgccctcattggcatggtattatttgcgttgcgacagaaaagaagggtcaaggaagtgacaggacgaaccgaccctttcgtttcatggggagtttcccagaaagacagtggaggggctccacagcttaaaggagcaaggttgttctctctgaatgagctgaagaactgcaccaacaatttttcggacacccatgagataggctcaggaggctatggaaaggtgtacaagggaacactcgttgatggaacgcgggttgccataaagagagcagagcgcggatcaatgcaaggtgtggtggagttcaagaacgagatcgagctgctgtccagggttcatcacaggaacctggtgagcctgattggcttctgctacgaacaaggggagcagatgctggtgtacgagtacgtctccagcggaacgctgagagagaacttactaggtacatggacaaaaccacccgtccaccgcatatatatacaacatttcacagaatttccatctcccagttcagttgtaatcgtagcatcagttgttcactcaacaatctgtgtacgcatgcatgaacggccgccatgcagtgagaggaacgtacctggactggaagaagaggctcaggatcgcgctcgggtcagcgaggggacttgcgtaccttcacgagctcgccgatccgcctatcatccaccgggacgtcaagtccaccaatatcctcctcgacgaccacctcaaagccaaggtcgccgacttcggcctctccaagctcgtcgcggacacccagaagggccacgtctccacgcaagtgaaaggaacgctgggttacttggatccggagtactacatgacgcagcagctgtcggagaagagcgacgtgtacagcttcggggtggtgatgctggagctggtgagcgggcggcagccgatcgagagcggcaagtacatcgtgcgcgaggtcaagctggccatcgaccccaacgaccgcgaccactacgggctgcggggcctcctggacccggcgatccgggacaacgcgcgcaccgccgggttcaggcggttcgtgcagctggcgatgctgtgcgtggacgagtcggcggcggcgcggccggccatgggcgaggtggtgaaggacatcgaggccatgctgcagaacgaggtctccgggcccgacggggccaccagctccgccggctcctccgccaacgacttcgacggcgccggcggcggagcgaggtcgcacccgtacagcgacgtcgagatcacgagaggctcgtacggggacaacgcgtcggactacatgccgtacttcgaggtcaagcctaagtagaccttccagtttcagacttgtatagcttgtgagatacattgtatagatttgtattatatttcacgtttatattttttggtttctcgagcttaatttttaccatgctacttccgatctatcatgacgcaaactgtacattcctcgaaattttccaagataagttgttctgttcttatttag

SEQ ID NO: 2135 - DNA, 1434 bp, Zea mays
agaaacggagtcatttcagtgaagcgtgggtttttttatcatcaacattttgttcagtgttagtacttagttgaaattatgaacaaagacctaacacagtaatggcatccacgggtgacaaaatgactgatctattttagaatttggagtctaaaacctgctaccaaaataaccaagtcaaggttgggtaagtacaactactatgccttctatcttcccagtcaatagtgaaacgatcaatcatctacatgtttgacataacctttttggagattactctgccttttaggagacttcactttaatagcgccaacgccatctttggacttgcagtatccactcttctgacctctttgccgaccacctttctttttgtgctcatcgtcagcaacttcatcattggacttgcgacattgaccgtgttggatcgattgcttccttcgctgcttcgtgcagtcaggcaggcaaaggctgttaatgtgggcgacgccatgcaggaggaagccacatgtacatgttagcgtgttaggcagcctaccgaggcctgagacggtgattactggctccacgagtgtgccatcgtcatttcgtcgttcttccatttggttcgctttggctttggctaccatgacacaaatcactgctatttaaggtgtctactttaccagcgggacaacacgtacatagtactacttcaatcctgctattctagaagctactccctattatcaaaggttctgtgtccaggtgttgtgggtcaagtttagcattcatcaacgtgttgtcatatatgggatgtgagaatttgcatacaccctttatgccctgttggattcttggagggaatggatacaacagatgactttgttggtgaagcaaggattcagaaaggagtattccaccaacactatatatatatatatatatatatatatatatatatatatatatatataagtgatgagttaatgccagcttgaacaatcttcaaaaagtctaacaggtagattctattttatttttctaatctgtaaattcaaaatgtggctgaagcttttagacatacataacctgcttttatcattttaataattacagtcttactaccaaattaaaacaaaagatgcaatgcttttagtatttattgcaactatgtaataaatgaaacaaaagaaacatcgttgatctccaactttgaatgttgtctctgcatatacatatatgtgcatacacatcattgcatttctttgttcccactccccgtggaaataaatatcacaaatttgatttgatccttcttagttgtgtagattcagaaattcattgcaaactttttttttgaacacatcattattttgttgtaattgagaccaataatttattatttggtacatgtatatatccacttacttctatgtgtacatattaatctat

SEQ ID NO: 2136 - DNA, 3604 bp, Zea mays
taagtttgaacaaacatatattaataataagaacaacaatacgatgctgattgggatggtactaaaccctaaacccttaaaaaaaagcgcactcccatctctatcattcgaaacgctttcgaacgctgctcctggctctcagacagacatgtgtctgtccgtaaagccgcagcggggtgaagagaatgattgaccctgcgcccatttattcacagaaatgcacactagccgcggaggatttggcccaccgtcccatcaacagcgctgtcgccgagaggtgggcccggtaccaaagcgaccgcaccgatcaccatcactctcgagccccattgtgttttggcgtgcccgtgcccgtgcccgtgcaagcagcagccattgacacgttgttttctggcgcaacggggcagggcagagcagagcaagggggaaacagtgaacgccagtggcatcacccaaatcaaattcaaaatcagtgcagtccagtccagtccagtccagtccagtcctctcttccggctccacttctgctctacagctcaccgcccactgccactcactcgtctgatcgtagtcgccctacataacacccggcaatccctcgttcttgccacgccactccactccactgccctcctcctgcaccctgcgcttcaaatcgtttcggcggtagtgagcaacgccaagcatccagcaacagcagccgctacctccctttgtctagctgtctccctcacccggtccagtcctgcattgcattgcctcatgaggacccaaagaaacctccttcccctcctcctgctgctgtccgccgcgctgctcgccgtcgccgacgcgcaggagcgcaagaactacgtggttcatctcgagccgagggacgacgacggcggcggcgggtcggtggaggagtggcaccggtctttcttgccggaggccacgctggactcggcggcggatgacgggcccaggatcatccactcgtacagccacgtgctgacggggttcgccgccagcctcactgacgcggaggcgcagacgctgaggcgcaaggaggggtgcttgcggctgtacccggaggagttcctgccgctggctaccacccactcgccgggcttcctcggcctccacatgggcaagcacggcttctggggccgatccgggttcggccgcggcgtcgtgattgggctcctcgacaccggcatcctgcccacccacccgtccttcggcgacgcggggatgccaccgccgcccaagaagtggaagggcgcctgccagttcaggtccgtcgcccgcggcgggtgcagcaacaaggtcatcggcgcgcgcgcgttcgggagcgcggccatcaacgacacggcgccgcccgtcgacgacgcgggccacggcacgcacacggccagcaccgcggcgggcaacttcgtgcagaacgccggcgtgcggggcaacgcgcacggcagggcgtccgggatggcgccgcacgcgcacctggccatctacaaggtgtgcacgcggagccggtgctccatcttggacatcgtcgccggcctggacgccgccgtcagggacggcgtggacgtgctctccttctccatcggcgccaccgacggcgcgcagttcaactacgacctcatcgccatcgccacgttcaaggccatggagcacggcatcttcgtcagcgccgcggccggcaacgacggccccgccgcggggtccatcaccaacggcgcgccgtggatgctcacggtcgcggcgggcaccacggaccgcgcgatacgcacaaccgtgaggctcggcaacgggcaggagttccacggcgagtcgctgttccagccccggaacaacaccgcggggcgcccgctgccgctcgtcttcccggagtcccgcgactgcagcgcgctggtggaggccgaggtgaggggcaaggtggtgctgtgcgagagccgctccatcagcgagcacgtcgagcaggggcagacggtggccgcgtacggcggcgccggcatggtcctgatgaacaaggcggcggaggggtacaccaccttcgccgacgcgcacgtgctggccgcgtcgcacgtgagccacgccgcggggtcgaggatcgcggcgtacgccaggtcggcgcccaggcccacggcgtccatcgcgttccggggcacggtgatggggtcgtccccggcgccgtccgtggccttcttctcgtcgcgcgggcccaacagggcgagcccgggcatcctgaagccggacatcacggggcccggcatgaacatcctggcggcgtgggcgcccagcgagatgcacccggagttcgcggacgacgtgagcctgcccttcttcgtggagtccgggacgtccatgtcgacgccgcacctgagcgggatcgcggccgtcatcaagagcctgcacccgagctggtcccccgcggcggtgaagtcggcgatcatgacgtcgtcggacgcggcggaccacgcgggcgtgcccatcaaggacgagcagtaccggcgggcgagcttctacagcatgggcgccgggtacgtgaacccgtcccgcgccgtggacccggggctggtgtacgacctcggcgccggcgactacgtcgcctacctctgcggcctgggcatcggggacggcggcgtgaaggagataacggggcgccgcgtcgcctgcggcggcaagcggctgaaggccatcaccgaggcggagctcaactacccgtcgctggtggtgaagctgctgtcccgcccggtcaccgtccgccgcaccgtgaccaatgtcgggaaggccagctccgtgtacagggccgtggtggacatgcccagcagggccgtgtccgtggtggtgcggcccccgacgctgcggttcgacagggtgaacgagaagcggagcttcaccgtgacggtgcggtggagcgggccgccggccgtcggcggcgtcgagggcaacctgaagtgggtgtcgagggatcacgtagtccgcagcccgatcgtgataccgccggcgaaggccaccgcgtaggcgtagctcccagcccaaatgcccaattgatgagtgccccggcattggtcggcaaacggcatgtatccctccaacaaggtcagtagcggtatgtggtaatcttgagtgtgaccggtgtacgtatggcgaaggaagtaggcaggcgactgttgtataggcagggtaacccatcatctgtgacgcagcaagctcagctgcaatggcaatggcaatggcgcgttggttcctgtatgtaatcgcttcgcaaatcccccccaagtgtctctgtccgctctgttccatttgctaccccctaacctaagtagatggctagtactgctttgcaggacggaagggggtggtcctcgtgtcgtgaccatgccgcgatgccaacgcgtctgagttggccactggcggcgatgggccaagctccatagtagacaacgcattgccccgttgcacggccaacaaatcgagctctgcttgttttgttgccttggagctccaacgaaacgaagaagaggacggccgttgcgttgctgcctctgactcgccattgctccagtaccggccggccggccagccagccagtcaggaaacgtctgcagaggccaga

SEQ ID NO: 2137 - DNA, 558 bp, Zea mays
atgagagcgaccaagctagggcaggcgctggtggctgggcgccatggcgagcagcaggaagctgcacggcggcgcgaggagagaagcagacgcgcggctgtgcgcgcagagagggatcgagcagggcctcagctggggaaggagcggctaggcgcgccatgggagtccagggcgcggcgagctgggccggagacgcgcacagagcagggcacgcgcggttggagaagagagcggcgttggagagagagcgcggtggccagggagcttcacggccgcacggtagttttgagtgcagcgtcttctattgacccctgttcccaccagagaaagcaccggaccgggggtagctctttgggtggagcagaggaaggagccgagggagcacgcagaagacgccgagaggagggagatgaaggagctccggccatggagcagcggcgcacggcgagggagatccacgaggtggggaagaagacattagagatgggcgcgcagcgagccagggctgaagctcacgccggcgaggaagaagacgcagggtgccgtgggagctcgtag

SEQ ID NO: 2138 - DNA, 372 bp, Zea mays
atgcggcaaaattattggaacggcggagtcgtgaatgtggttgttgtcgaggcgattgatgtcgacacccatggtaagaatgatgatgacgcgagtctaactcacgtagaacagtacgtcagcgaagttcaacggcgaggtttgagcagggctgatgacgctgtggtggaaatcaaaggcggtgatcatcgcgaactagtctacggcaaggtcgagaagaaagccgacacgacaaactcgcaggtgcgggagcatgaccaaaatagggacatgggtgtggccatgatcattggcgccgggaacaaaggcaggggagaacgacctatcgggatcaccgggacgacaaacaaaaccaagccgacaaggtggtga

SEQ ID NO: 2139 - DNA, 264 bp, Zea mays
atggagccttggccggcgccccgtccttggctcgtccttgccggcgccctgttcggcggatcgtcgggcgccgtgtggagatcggtgccatactgccatggaacccaaggtgttcaaaaatacgctggtccacttcatgtacaccaacacgctggcacccatggagaaagaacagcagggcgtcgtcgcaatgatctaggatctgctcgcagcggcgcatcagtacaagctcaagatgctgaagttcttgagatgctgtgttag

SEQ ID NO: 2140 - DNA, 3236 bp, Zea mays
attttttaacccatttcttctctgccgcagctcacagacgtatataaatgtaggcgagggcgaggcagggagggttttggaatttggccgccgtttgcgttgcgtgggtaggggaagaagcaggcggccaggcgcagagccgcaaaagcagacgcggaagcagcccaggcccgagccgaagcggggaggcgacgccgctgcactaccactcacccggtcagcgatttgccgccttgcgggagccagttttggcgtcggcgtcggcgtggagttcccggagaggggttctggcgaggatgagcggcagcggcagcggcagcggcggagggggagccagggggcagtcggggcccgtgccggcgtccgcgaggaagctcgtgcaggggctcaaggagatcgtgaaccgtcccgacgcggagatctacgcggcgctgcgggagtgcggcatggaccccgacgaggcggtcagtcggctcctctgccaagatacttttcaagaggtaaagagcaagcgtgataagaaaaaggaggttaaagaaaccctagatccaagatctcgaggagcaagtaactcctgtcgatccagtagaggtggtatggaccgtgctggacgaagcagttcagtccagtctggatccagtggcactgattatgtgacttcaaggtcatccatattgggacctgctgtgccagttaagccaacagttcctagtttgtcaacaaacaaagatgtggtttttaatggatcagttggagcaccacaatcatcatctggttttcagcataattggtttggggtgccaggtcagatgtcaatggctgatatagtgaaaatgggaagacctcaagtgaggtcttctggaaagcctatggctgcagcagacacatcatatgctggtcaaaccccatctttatctagctctgtaaaccagaactcgaaacaatctgctagcacaaccctaccaactacttttgatcagggctttcctgctctcccagaccctattccacatactgtgaattctagtcatggttctgctgggaacaaccatacacatgagaatgattggtttcctcaggatgagcctcaatctggagttcagtccacaggcattgaggcatctggtgaccaatcgctatctgtggcatcactggaccaatctatgttggttgctggtactgcttactcacaagaaaattctcatgcagaagagaacaactcaactgcagttaaagcaacagtgtcttccgaaagacacttggaaattgtggaggaggacaatcattacaacgatgggttattgcagaactgtgcttaccaggctcaagtgcactcctatgttgataatgaagttggggtttctaatgttgatgcagaatcagccgtggcaaactttcagcatttaagcctacagaatgaagatatagttgtaaccaaatctgaagataaccatgcggttatactccctgatcatctacaagctacaaatgcagactgtgctcatctgagctttggtagttttgaatctggtgccttctctggcttgttttcatcaaaggtcacaaaagacagtttggaggacaacgaggtgcatattccagatgaatccccatcagttaatctcgatgccaggaatcaagattactacgacaacgatgctctaaatttgtcagcaaatgaggatgttgagacaagaattggtactaacatggataacattgatggaccttcagtttcacagtctgatgtaccgaggcagggggccatagatgtgcctggtcttcaatatgacatgccatcagttccaagtcatgcatattcaagcacaacgcagccaagtaaaatggaagacccacaaggaaacacacaagcacaacccctttcccatttttctggcttactgcaagcaaatactctacccaattacttgttggggtcaaatcttacccctattcgggagtttgacttctcgcagttacttcagacacagtcagctacaaagtataacccatctgcggcacctaataatctgccagcaatctccatgcaagagactttaaaaccaggaggctttcccaacactcagtctacgcaacatgttcccaatacgagcataccatcgggtcttcctctcccacaacaattgcctgtatactctcagccaactctgcctcttgggccttttaccagcctggttggctatccatatttgcctcagaactactacctaccatctgcggccttccagcaagcgtactcaagtaatgggcctttccatcaatctggtgctcctgctgtgcctggagctggtatgaagtattcgatgccacaatacaagagcagcccacctgcttcgagcctaccacagccatcatcactctctggttatggagggttcggaaatgcaaataatattcctggaaatttcagcctaaatcagggtgctccctctgcgcctacaactttgggatttgatgaagctttaggcacacaattcaaagaccccaatcactatgcagctctacagcagagtgataattcggcaatgtggcttcatggaggcgctggttcaagaacagtttctgcagttccgcctggtaacttctatggtcttcagggccagagccagcagggtggcttccgccaggcacatcagccctctcaatacggtggtcttgggtacccaagcttctaccagtcgcagtcgcaggccagtctgccacaggagcacccccagaacctcaccgagggaagcttgaacaattcccagggcgtaccatcccagccatcgcaccatctctggcagcacagctactaaaccttctgtgctctcttgggagatgcctctctacgctgccaggttatctgcaagccttggcacgctgcgccgtgaagcgaacagactagctgaactgccgtcttgagcggtgctgagcagaggacggtccatccaacagcgatggagtgcttgtttttttccctttctttcccagttgtgttctgaaactaatttaagctgtcgcggtttttatttgatagtgagtggtgttgcaaaggtgctatcttgtaacggtgaagtcctaactcatctaacagatctgcttcccatacccctgtaatatgccattttgttcttgatgcctagaagcttgaagcttctacgtgttgctgctactttcatacgcatgtatgtctatgaagctgaaatcctggtttgcggactgggtgtttggtt

SEQ ID NO: 2141 - DNA, 2440 bp, Zea mays
ggcttctcggataattgttcgcttaaccatacgagcaagagcaacagagcaaagcaagcgaaaggcggccacaggcgcagcgtagttgtccctgtccgtcgcttgcgccaacctgctgcccaccgttaatcagttttctttaaccccagctgctgcccgtttactaatcaaatcatcgtccccctccggcccctcctttcccttccgcgcctccctcgtcttcttctcgtctccactccccctctcccaagtcccacccgccgctcccgcccccgtgcgctcgccgacacggtcagtagttccactcggagaaaggaacgcttccccctgcctgtctcgccggatccgttgccccgctgcagtttcgcccgccgctttcactttcgctttcactcgatttagattccatttccgttcgttcgttcctgtttcccttgctcgttcgttcgattggagctagccgccgcctggatctggcctagccgagccccggctgctctgaatcccgattcggttcggctcccttgctctgcggtcgcttccgaggcgtgctcggatctcgtcggagtagagggcctcgcggctcgcttcgggggcgagatggatcatgtggtcgggggcaagttcaagctcggcaagaagatcgggagtggatcgttcggggagctcttcctcgccgtgaatgtgcagaccggggaggaggtcgccgtcaagctggaaaatgtcaagacaaagcacccgcagcttcattacgagtccaagctatacatgcttctccaaggaggaactggcattccgcacctcaagtggttcggcgtcgagggggactacaatgtgatggtgatcgaccttctcggccctagccttgaggacttgttcaactactgcagcagaaagttctctctgaagactgtgctcatgctcgctgaccaaatgattaaccgggttgagtacatgcatcaaaaggggtttcttcaccgtgatataaagcctgataatttcctcatggggcttggtaggaaagccaatcaggtatatataatagactatggactagcgaaaaaatatagggaccttcaaactcataagcacatcccgtacagagagaacaagaacctcactggaactgcacgatatgcaagtgtcaacacccaccttggtgttgagcaaagcaggcgagatgatttagaatccctcggttatgttcttatgtacttccttaggggcagcctaccatggcaggggctgaaggcaggaaccaagaagcagaaatatgacaagatcagcgagaaaaagatgctcactcctgtggaggtactctgcaaatcgtacccatcagagttcatctcctacttccactactgccgttcgttgcggtttgaagacaagcctgactattcttacctgaagagactattccgcgatctctttatccgggaaggataccagttcgactacgtgtttgactggaccattctaaagtatcctcaaataggctccaacccacggaccagggccggtgaaagaactagtggcgctgctggaccctcaatggataggattgagaagaccccaggagaagcgtccggtagaaggaaccctagtggtcctgtgaatcagagcgacagttacgcgcaacggccacgcgagaccgtatccatgtcgctaaaggagattatgcatagcactgaccggtctggggaaaggactgtggagagaccacgcacgtcctcacgcacaggcagcgcatcccgcagagccgttgcgtcaagcagcaggccagcaacctcgtccatggaaccaagcgagcagcagtatagccgggcgagcagactgttctctagcaacagtggcagccggccatccagcgcccagagagtcaaccctgcgccgggcgagtctagggccacctccctttcgcgggcagcggtcgcgagaggctcccgcgacgagccactccaccgcagcctggagctcctttcccttggcagcggcaagaggaaatagcgggaaggaagccgatctgatagcggaagggaaaagaatgcctgttggcgactctgtaaatgacggggcatgtcacctgttcttcgccagcagttcttcccctggggcatcccgtaatttcatggtgcccgccccggccttttaccatggctccgtagatagcaataattcgttgttgaatgtgcgtgctgtgttgcagtcgcgttagggccaagtcctagcctttgtggtgattagatttagggggtggtcaagattcacatatttatgtttcttaaccctctcctggacttggcgactcttttttttaccccctcccgagacaagtgcccgtgcgtttcttgttgaactctgaatttgcttattcaacagaagttgataatgataataaaagaagaggcatcctgtgtaaatcgatgcctcattttcttac

SEQ ID NO: 2142 - DNA, 3795 bp, Zea mays
atggcgtcgcgccgagccagcaacggccgctctcccctcgtgcggaaacagagtcagatcaccgcctttttctcctcccctaccccctctccgtccccctcgggcccgagccccggcgcatccaagccctctccatcgccgctgaaccctagtgcgaggacgaggtccccacttgccgcggtatccccctcctctcccaagctgccacagccgcagcagaaacagaaggaggtaaagaaggttaaggaggagcatgatgccgccttggtgcctgcgcccgcggccgcggaggtggtggggaggtgtttgcgggtgtactggccgctggacgacgcgtggtacaagggcaaggtggaggcctacgacgcggcctcccgcaggcaccgcgtgaagtatgacgacggcgacgaggaggaggtcgatctcaggaaggagaagttcgagtgggccgccgtcgttgaggagtcgaccttgctgccggcgaggaagctgcggcgtctccggcggatgtctgatatctcggtggcaaaatcaccggctgaggcagaggatggcgcaggggattccactgaggacgaggactggaagagggatactgttgtggaggatgcttctgaggaggtggagctggatgaggaagacgaggaggaagttgttgcagtgcgatcacgaaagagaaatccaaagaattccttgatgtcaggttcaacaccatcgacattgggttctggtttgacatcagaatcggagccaagaatttcgaagaggaggaaaaacgtggatgtggcctcattggattttgctaaaaggttcaccttcgaagcagttaataccaatagaaaagttgacccagaagtgccaatgagctgtggccagaaggggcaaactacggggaatgactacactgctcctactggggatgcagctgagcgctttgggcagcgggatgctgagaagtttaaattccttggagaagggcgcaaagacgcaaaaggcagacgtcctggaaacccgggctttgatccgagaacacttttattgccacctcagttcttgaagaatttgacaggagggcagaggcaatggtgggaattcaaatcacagcacatggataaggttctgtttttcaagatgggcaaattctacgaactatttgagatggatgcacatgttggagcaaaggatcttgatcttcagtacatgaagggtgaacagccccactgtggattcccagagaagaatttatcagtgaatttggagaagttagctgagaagggttatcgagttctggttgtcgagcaaactgaaacacctgaccagcttgaacttcggcgtaaggagatgggtataaaggacaaggttgtcagacgtgaaatatgtgcagtagtcacaaaaggaacactaatagaaggagagcacctactggcaaacccagatccttcatacctcctgtccgtgactgaaagttaccaacgaagtccaaataagagccaagacacatgtaccattggtgttagcatagttgatgtttctacaagcaaatttattgtaggacagttccaagatgatccagagcgccatggattgtgttcaattttgtctgaaatgaggcctgtggaaattataaagcctagtaaaatgctgagtccagaaactgagaaggcattaaacaacaacacaaggaagcctttaataaatgagctggttccgtccacagaattctgggacgcagaaaagactattgatgagataaaacagtactacagctcagccaataaacagaaaaaagccgatgatatacaagactgtgtggactgtctgcctaacttattacgcgagttaattggagcaggtgataaaacatatgcactttcagctctaggaggttccttattttatttaaggcaaacccttctggatgagaaaatacttccatgtgctgagtttgagccacttgcatgctcggggttcatcaacaatatccgaaaacatatgatacttgatacagcagcattggagaatctagaacttttggaaaatacaagaactggtggcctctcagggaccctgtatgcacaactgaatcattgtgttactggatttggaaagagattgctcaaacggtggatcgcaaagccattgtatgatcgcagagaaatacttcggcgtcaaagtgctgttgctactttcaagggagttggccaagattgtgctgcacagttccgtaaggatttgtctaggctccctgacatggaacgcctgcttgcacgtctttttctcaagctgatgttccatgcatgttcttctattagtacattgatatgctcagagggatctcaacttattgatttgctgtcaccaggcaaaggcctatcaaatatttcatctattttagaccgattcagagatgcatttgattggtcagaagcagaccgcaatggtcggatcattccttctgaaggttgtgatcctgaatatgatgccacttgcaatgcaatagaagagatcaaatccagtctaaaagagtacttgaaggagcaacgaaagcttttgagacctgcatcggttaattatgttaatgttggaaaagatatgtacctaattgaagtgcctgagagtttgggaggttcagttcccagaaactatgagttgcagtctacaaaaaagggtttctatcggtactggacgccagaactgaaagagctaatattagaactttcaaaggctgagtcagagaaagaatcaaaattgaaagccattcttcagaatctgattcagctatttgttgagcatcacactgagtggaggcagctggtttctgttgttgctgagcttgatgtattgacaagtcttgctattgcaagtggttattttgagggaccaagttgctgtccaactataaaagaatcaaatggcacagacgatactcctactttccatgctagaaatcttggacatcccattctacgaagtgattccttaggcaagggttcatttgtaccgaatgacgttaagataggtggtccagggaatgccagttttattgttcttactggtccaaatatgggtggtaaatcaactctcttgcgccaagtttgtcttaccattatactggctcagattggagcagatgttcctgcagaaaaacttgagctttctcttgttgaccgtatcttcgttcgaatgggagcaagggatcatattatggctggccaaagtacattcttggtggagctcgaggagactgcctcagtgctttcatcagctaccaagaattctcttgtggtgttagatgagcttggacggggtacatcaacttctgatggacaagctatcgcggcttcagttctggaatatctagttcatcaggtgcagtgtctaggcttgttttctacacactatcataggttagcaatggaacacaacgataccaaggtatcgctgtgccatatggcgtgcgaggtggtcgagggagtaggaggtctggaagaagtgactttcctttatagattaacacctggtgcttgccctaaaagttatggtgtaaatgttgctcgattggcaggaattcctactaaattgcttcaaagagcgaatgaaaagtcgagtgaatttgaggccaattacgggaagcgacacaagatgaccaacgataagcacgtcagtgcacagagcgatgataagttttctgccataagggatctgtttcgaattgtgaagacatggcctcgtcctgaagatcaggaagcgagtataagcatgctccgtaaattgcagaagcgtgccaaggtatag

SEQ ID NO: 2143 - DNA, 1050 bp, Zea mays
atggcgcgccagcagccggagcgagtgccgccgcagcggcgtcctgtcggttgcggaggtggttggaagcgcgacggggtttgcgggagcccgcccctgagcggcgggctattcgcggcggcgacgagcgccagcagccggagcgagtgccgccgcagcggcgtcctgtcggttgtggagcccgcccctgagcggcgggctgttcgcggggtaccccgtggtgggcccgaggacgcgctgctgacggtgtgcccctgggacccgcgcgtgcggggcggcaccctcttccaccagaccaccttcagcctccccgtgcgccgcgccgtgctgttcgttgctgaggtgcaccggctgcgggacctggagcccaggacgctatgtggcgtggagctctacgacggcatcctcatgcgctacgtgaaggcgtccacagcctacctgggcaagcccgcgccgcgcggggagccgtcgggagacatggtggacttcgacatcacatactaccgcagccgtgaccccgggcgggcgcgcctgttcgaggacgtgctggaggaggtcgagcagatgggcatcatcaagtacggcggcctgccgcactggggcaagaaccgcaacctcgccttcgtcggtgccgtgcgcaagtaccccggcctgccgcgcgcaagtaccccggcctgccgcgcttcatgcgcgtcaaggacgcctacgaccccgatggcctcttctccagcggcggcggcgagcgctgcggccagctgcgcgcactggtcctgctcgtggagcacgacgtcggtgagcggggccagcgccgcgggcggtgcgcgcacggaggagtccgggtcccggacacggcgcagcgcggcggccaggagccctggcacgagcggcgcgatggcgtcccgcgggtgctcccccggcgacgagcgccagcagccggagcgagtgccgccgcagcggcgtcctgtcggttgcggaggtggttggaagcactgcggggtttgcgggagggcgtgcggacggatgcgggggcggtttacactgctaacttaa

SEQ ID NO: 2144 - DNA, 2494 bp, Zea mays
ctagtccctacccggctctctccctcccccctctctctaaaaaaagtagcgcccggagaaccgagaggctggagaaataaaggcggaaagagggagggaaatctcactttgttggggattctttcctccgtttccgactcctttgttctcttaagtgttcttggttagtggaatggaagctcagcagccccatttatgcccccgagagcctcgtcgttcccctcgtgtgtaggtgtagcctttcactcggttggtggaagggcgaggcacagaagaacatcgataaagggtgtgtctattttttagctcttcgtgttcttgtaggaggaattcccgttcacatgatccgtgcctgtacctgacgggccttgtcgcgctctgctgcttcgctttcggggagaggaggactcgactcaaatcacttggtagcggagacgtcgccctttctagttcagtcgagagatatttctggcatggccggcgcaagcaaccatggatccctcaccgacgaatggttgccgccccctacaccaagcccaagaagtctcgtgtcaagctttctgaatgaagaattcagccccgggccattctctggtcttttcagtaaacatggcgccaatagaccccatgatcaatccgaaaagggcagaggagctctgaattcgagcgaggagttccctactcatgctgtcaaagacccatttcaaaagggtttctccctggagccaaatttgttcagtgctaatcatatatcaaactccaatggtggtttggcagagcgcagggctgcaagagcaggtttcagtgtcccgaaaattgatacttctcgagttggttcatcagcagttattcgatctcctgtgtcaattccacctggtctaagtccaactacactactggagtctcctgtttttctttacaataaaatggcacagccttctccaaccactggcacgttgccatttttgacggctacgaatgataagtcgacaataccaccagctaccaagataactgaagattctgcagtttataatgatgtgttttctttccaaccccacttaggttctaaagaaacaggtttctctactgcagaaaaggactatggcgcctatcagcaaaagcattcattgtggaatattcatcagcaggaatccagtcttcagtcaagttttaccgcagtcaaggacaacactagtgcaacaattggtgaaacgaagacatctagctccatgttcagtgatagtcactattcagctgaccaacagcaaggtgaagagacaaacatgaaggagcaaggcaaaggtgtcgaggctagatcagctgcttttcttcctgcaccagtgcataatgatgcatctctcctggattctcaagatgcagttgatgtctcgtcaacgctgtctaatgaagaggacgagagggcaacacatggcactgtttctatagagtgtgagggtgatgaagatgagactgaatctaaaagaaggaagttggaattagatgctttaggagctattgctattgctactacctccaccaccagtaccattgacatgggccctgcatcctcaagagctgtccgggagcctagggttgttgttcagaccacaagtgaggtagacattcttgatgacggttatcggtggcgtaagtatggacagaaggttgttaagggcaatccaaatccaaggagctactacaagtgtacacaccctggctgttcagtgcgcaagcatgtggaaagagcatcacatgatctgaaatcagtcatcacaacatatgagggaaagcacaaccatgaagttccagcagccagaagtagtgggcaaggcagttctggttctggcagcggtccatctgcaccacaagctggtggttctcaccgtaggcaagaacctgcacaagccagcttcgctcactttggtacatctcctttcagctccttcggtctcgcaccgagcggacagttgggaccaacaactggtaatttccgcttcggcatggttccgccaggcgcgacgatcccaatgccctctctaggatcacttgcccctacaaaaatgattggaaatccatcagctatgcaggggtacccagggcttatgatgccaggagagccaaaggtagagcctttctcgcgaccacacttcccaacgtcaattgcacctccgccagcttaccaacagatactgagcaggcctccttttggtcatcagatgtaaataataggaaggggatagatttgcttcggcttgtatacatgatagctacgctgcaacatggctttgttctagttttgttgatggatcgtccgatttttacttctttttaaattttcagctcacggctcacgcatttctttgaagcaaagatggctgaggatgataccctgtcgtgatgtgtaatcagggaaaggatacttttcgtccttttgatactatcgaaatttgaaaatgatcaatccgattttttagttgtggatacaaatctg

SEQ ID NO: 2145 - DNA, 3320 bp, Zea mays
cgtgggggcgccccacctgcctgcctgcctgcctccgctcctcgcagtgcctagacatctgctgcttctgctcctggcactagttcctgccttcttttgctccgctcggttggttattgctgctctgctgctgcgtcctcctgcagtctccacctcaacttctccgccttcctccttttcctcctccccctcctcgcgcagctctcgtgcttcgcctgttcgttcggggacggtcgtgcgtggcgccagcggcgtcggagttcgatttccggtgagcgcttttcgcaggaaaggttgggtcttgtcggttgggattactcgaccgtcgctacgggaaaccgtgccccatctctgcagcggattgatttctgtccgtgctgcgaggttggtgtggtggtttgtctgtgcttccactgtcggaccgaagattccgtcatcgtttcgtgcagtaaccggagcggtgtttagtggggagaagatttggctggaaggcttggtgcttgcaaataaacaccacacaagaatcgaatgcgccgcaccagtgccgattgacgagattcgagtctggatttcgagcgtgatatggtttcatcaggcacctttggactctaaataccggttccaaggacaaggttttccattcgaagaactgtcgctgagggaagaagaaggaaaagaagaagaggtcaatggcatcgctgtcagaaagtgagctgacaaaccggggaaccatgtgggagctagatcagaaccttgatcaacccatggatgaggaggcgggcaggctgaagaatatgtacagagaaaagaagttctcatcagctttgttactacggctggcatttcagagccttggggtggtctttggtgacttgggcacgtcacctttgtatgtgttctataatatatttcctcgcggaataggtgagggcgaggatgaggatgttattggagctctttccttgattatttacaccctcactctcataccgcttctcaagtatgtttttgttgtcttgagggcaaatgacaatggtcaaggtggtacatttgctctttattccctattatgccgtcacgcaaagatcaacaccatacctaatcaacacaggaccgacgaggaattgacgacgtatagtcggcaaacctatgaagagaattcagttgcagcgaaaataaagagatggatagagtcacatgcatataagagaaacattcttcttattcttgttttaattggtacttgtacagcaattggagatggaatccttacgcccgctatatctgttctttctgcatcaggtggcattaaggtccagaaccagaacatgagtactgatgtcgttgtgctcgtcgctgtggtcatcttaatcggattgtttagcatgcagcactacggaacagacaaagtgggatggctcttcgcgccaatagtcctcctctggttcatcctgattggaagcgtcggggctataaacatacacaagtatgatagctctgtgctaaaagcatacaacccgatgtatatataccgttttttccgacggagaaagaattctgacgtctggacgtctctgggaggaatcatgcttagcatcacgggaactgaagcattgtttgctgatctctgtcactttcctgtgctggcaattcagatcgctttcaccttgattgtgtttccatgccttctactggcgtacacagggcaggccgcctacataatttccaacaaaacacatgtggctgacgccttctaccgatcaattccagctgccatatactggccggcctttatcatagcaactgctgcagcgattgttgccagtcaagccaccatatccgcaacctactcgatcataaagcaggctcttgcgctgggttgcttcccccgcgtgaagatcgtccacacctcgaagaaattccttggacagatctacatccctgacatcaactggatccttctggttctctgcattgctgtgactgctggattcaagaaccaaagccagataggaaacgcatacggtactgcggtggttatagtcatgctagtcacgacattcctcatggtgccaataatgctgctggtatggaagagccactggatcctcgtggtgaccttcatcgtgctgtcgctgatggtggaggttccctacttcgtggcctgcatactgaagatcgaccagggcggctgggtgccgctggtggtggcgacggccttcttcctcatcatgtacgtgtggcatttctgcacggtgaagcggtacgagttcgagatgcacagcaaggtgtccatggcgtggatcctgggcctgggcccgagcctgggcctggtgagggtccccgggatcgggttcgtgtacacggagctggcgagcggcgtgccgcacatcttctcccacttcatcaccaacctgcccgcgatccactcggtggtggtgttcgtgtgcgtcaagtacctccccgtgtacacggtgccgacggaggagcggttcctggtgcggaggatcgggcccagggacttccacatgttccggtgcgtggcgaggtacgggtacaaggacctgcacaagagggacgaggacttcgagaggatgctgttcgactgcgtcctcttcttcgtccggctggagagcatgatggagggctactccgactcggacgagttcagcgtgccggagcaggcgccgcctggctctggctccggctccggccgcggcggcccggcggcggcgttcctgcagggcggcgagcggacgtgctcgaccatgtgctccaacggcgagctgagcttctcgtcgcaggactcgatcgtgcccgccgcgcagtcgccggcgccgagggggctacggctgctgcagtgctcggcgtcggcgtcggcgtcggcggggcaggcgggcagctgcggcacggtgggcgacgagctcgagttcctgaaccggtgcaaggacgccggcgtggtgcacatcctcgggaacaccatcgtacgcgcgcggcgggactcgggcgtcgtgaagaagctcgccgtcgactacatgtacgccttcatgaggaggatgtgcagggagaacagcgtcatcttcaacgtgcctcatgagagcctgctcaatgtcgggcagatatactacatctgaatgtctatctgatgggagatagtgaggggcttgtacttcttcttctgttctcatataaatccctagtcttttttgggtaggatatgtacatgttagcttgggactaaagttttttttaagaatagagaatatattgaaatattccggcttctgcaccaatagatgtatgtggctgttcaattatta

SEQ ID NO: 2146 - DNA, 91 bp, Zea mays
attgacagaagagagcgagcacctggcgcggcgaccggcatggaacgcatgccgtccccgccgcgtgctcgcttctctttctgtcagcctc

SEQ ID NO: 2147 - DNA, 339 bp, Zea mays
atgcgaccacgtcgcgacccgacccggagcgccctcgccctgagctcgcccgccccaagctcgccatctccgaccgcgcccgcccccggccgcgctcgcctcggctcgccggcccctggccgcgcccgccctcggctcgcccgccccgagctcgcccccaccccaaccgcgctcaaccccgcccgccccggccatggcggcccctgccccgtcgcgcccgcgcccgtcccctgccccggcgtggtggccggtcgtggcctcgctggccatggcgcccgcgcgacgtgccccgcccccgcccgtgctcgcccgccccggcgtgtcctgctcgcgtcgtga

SEQ ID NO: 2148 - DNA, 1049 bp, Zea mays
gttctcacatggaaaccagctgcgcgcaggagtgcggcaaggcttggccgatgccctctgttgccgccatggcatctcccttctccaagctccagcgcgcacacggcagcagatcgtggtgcccctccctgcaagctcgagtttccccatggcgcctgtccccgggcatgggcgagctcctctctgccctatgattttttccatggctgtgagctccccctggctgccattttccccgggctccctctgctcgcccccttccatggcgtccgcctcccctgctcttccctgcccggccagtgaacgcccagatcctcgcctccctgctccacacgccccagccatggtgttctccacttccctgtccatggcgtccaagttccctgcgcccagttcttcaatccaaaaacagcagcaacatctacctccccttccctgcgcttgccgtggctgagctcgccccctgccaggagcacgccatggccggatccccctgccatggacgtcgcgcaggaagccagcgcccctccctgcgtagttccattcctccatggccgcgagcttttcccttgctgcgactacctcccaaggacagcgcgcagtggcctccccatggcagtggtctgcaacaagaagtcgcaggctacatgttcgctgttttgcgcagcagccccgacatctttgcgcgctgccggctcgctgttttgtggagccccgtggacagcacgccgtcgacggccgccgtgcgttcgctgttttgcgcagccccgtccgcgacgccgtaagtcctcgctagacgttgccgcggagccgcgcgtgatgcatgttttggtgaagcccctaaaccgtggacgcatgtgcaacccgaatccgagtttgacaggttgatagacttatgatttactattgatgtgtttcgattgatggcatgcatacaaatatggtgtatattaatgttgaatatgtgtggctgcgataattattttgtacgccataggaattggtcgcggatgtattaattgattgttaaaatgcttcttcgtaaaata

SEQ ID NO: 2149 - DNA, 2987 bp, Zea mays
cctgccaacccccgcgcagtcgccgggtgcaccaacccccggtcctcgcgacctgagccgccctctgcgaccttgcggccatcacgagcactcgtgctgttggtaggaaaagggccaaaggcgaccaacccccaagccgcgctggcgcagcccgtcgctatttaagcgcggcctgcgcctacatttcgctccaagaagagcagcaccatccagtgcatcacgagctcttctgcaccagattagcaggccatcgcctacttttggcttccaaatcatttatttacggcgtacgtgccttctgttcaaaccccagccccgctgcaatggagtgcgacaacggccgcgtcgctgctaccaacggcgactccctgtgcatggcgctgccccgcgccgccgacccgcttaactgggggaaggcggcggaggagatgatgggcagccacctcgacgaggtgaagcggatggtggccgagtaccgccagcccctggtgaagatcgagggcgccagcctccgcatcgcgcaggtggccgctgtcgccgccggcgcgggcgaggcccgggtcgagctcgacgagtccgcccgcggccgggtcaaggcgagcagcgactgggtcagggacagcatgatgaacggcaccgacagctacggcgtcaccaccggcttcggcgccacctcccaccgccgcaccaaggagggcggcgctctccagagggagctcatcaggttcctcaacgccggcgcctttggcatcggcaccgacgccggccacgtcctgccggccgaggccacgcgcgcggccatgctcgtccgcatcaacaccctcctccagggctactccggtatccgcttcgagatcctcgaggccatcgtcaagctgctcaatgccaacgtcacgccgtgcctgccgctgcgcggcacggtcaccgcgtccggcgacctcgtgccgctctcctacattgctggcctcgtcaccgggcgcgagaacgccgttgcggtggctcccgatggcaccaaggtgaacgccgcggaggcgttcaggatcgccgacatccaaagcggcttcttcgagctgcagcccaaggaaggtctcgccatggtgaacggcactgccgtgggctccggccttgcctccacggtgctctttgaggcgaacgtacttgccgtccttgccgaggtcctgtccgccgtgttctgcgaggtcatgaacggcaagccggagtacaccgaccacctgacccacaagctgaagcaccacccaggacagatcgaggcggctgccatcatggagcacatcttggaaggcagttcctacatgaagcttgctaagaagctcggtgagctcgacccgttgatgaagcccaagcaggacaggtacgcgctccgtacgtcgccgcagtggctcggcccgcagattgaggttatccgtgcctccaccaagtccattgagcgcgagatcaactccgtcaacgacaacccgctcatcgacgtcgcccgaagcaaggcccttcacggtggcaacttccagggcacgcccatcggggtgtccatggacaacacccgtctcgccgtcgcagccatcggcaagctcatgtttgcgcagttctctgagctcgtcaacgactactacaacaacggcttgccctccaacctgtccggcgggcgcaaccccagcttggactacggcttcaagggcgccgagatcgccatggcgtcctactgctctgagctgcagttcctggggaacccggtcaccaaccacgtccagagcgcggagcagcacaaccaggacgtgaactcgctcggactcatctcctccaggaagactgctgaggccatcgagatcctcaagctcatgtcctccacgttcctgatcgccctgtgccaggcggtggacctgcgccacatcgaggagaacgtcaagagcgccgtcaagagctgcgtgatgacggtggccaagaagactctgagcaccaactccaccggtggcctccacgtcgcccgcttctgcgagaaggacctgctccaggagatcgagcgcgaggcggtgttcgcgtatgctgacgacccctgcagcgctaactacccgctgatgaagaagcttcgcaacgtgctcgtggagcgcgccctcgccaatggcaccgccgagttcgacgccgagacatccgtgttcgctaaggtcgcccagttcgaggaggagctgcgcacggcgctgcccagtgcggtggaggctgcacgggcggctgtcgaaaacggcacggcagcgataccgaacagaatcgccgagtgccgctcctacccgctctaccgcttcgtgcgcgaggagctcggagcagtgtacctcaccggcgagaagacgcgctctcccggcgaggagcttaacaaggtgctcgttgccatcaaccagggcaagcacatcgacccgctgctcgagtgcctcaaggagtggaacggcgagcccctgcccatctgctgaacagagaaaatacaaggagcagaagactgtattttttagctaatacgcactttttattcctaatttatttatgttcgtaagttcgttgatatgctacgcaatcttgttattcagctgcaacgccaacctgctttgctttgagcaaggtctggtgagtgattgaaaaaaatgttgttgcaagctgtaccttgtatgtttttcaacaggtgaatctcacgtttgatgcattggatcagacaatcagagagtgtaaataagagccaattattttttacaaaggcaattttagcttacttctcaaagcttcgtccaatcctaaaaacaacaaaactcttaaaagagatactcacaagtcaacaagtgattaaatattttcgatgatgacagacaaacacactgaaacactcaaatcgactaaaaatgacttcatgggaaaactcacaaaaatccgaaaattgagctctctacttcaatcgaaaataaagaaagagccaaaatcaaagacaccacaac

SEQ ID NO: 2150 - DNA, 716 bp, Zea mays
acttacacaaagtcctagtcgacaacggcagtcaggcggacatcatcttcctccatgccttcgaccgcatgggtataagccacagcttgctgaagccttcggacaaccccttgtatggtttcggcggcaagggcacctttccagttggcaagatagagttgcccctctccttcggtgtagcacccaatgcccgaagtgagcaagtaaccttcgacattgtcgacatggtatatccatacaacgccatcatgggccggggctccatcaataagttcgaagctgccatccacgggctgtacctatgtatgaagataccaggtccgctaggcgccattacaatctacggcaaccagcagacggcgcgcaacatagagcgggacttcgtgcctggccagaggaacgtacactgtctcacgacccagcgcgaggcccccgcgcccgccagcccaaccgataagcagcacgacaaggcacagttgcagagccaggacgggaccaagactgtccccctcgatcaggccacgcccaagcagacagtcactatcagcgaagacctcacctcacttgaagaagagagacttctctgctgcctggccaagaataaagatgtcttcgcctggtccgccctcgatctggtcggagtcagccgatccataatcgagcacagcttgggaattgacccttcggtgcgacccaaaaagcagaggcttcgcaaa

SEQ ID NO: 2151 - DNA, 2519 bp, Zea mays
atggcccgaaacgtttacacactgcggccttgcttctgttctctcgcgtcgttctcccgtagtcccgtgccctcgcgtgcgctctatctgtttctggtggcgacgacttggcggtccccgctgccgccgtgcccaggcctctacttcgggaccttcaccggcgacgagcacccatcgggttgcttcgcaaaacttccaacatccaggatacaattaattacgattccttcaactttatctcgatttataggaggttgcacagagcccatccaacagggtgtctcagacatactgatggatggggtgcccaatatccttgagaaatcatcacatgaatgcatgtactcttggtacttcaccagggaagaactagagaaattttctccatcaaggaaagatggtattactgaaaacaaggaatcagaaattcggcatttatattgttcatttatccgggatgttggcatcaggctgaagctacctcagatgacactagcaacagcagtcatgctttgccatcgcttctatttacaccagtcccttgccaaaaatggatggcagacagttgcaacagtatgtgtatttctggcgtcgaaagttgaagatactccttgtcccctggaccatgtagttagagtggcctatgaaacaatgtataggcgggacactgctgcggctcaaaggatccgtcagaaggatgtttttgagaagcagaaagcgctcattttgatcggagagagattgcttcttacaactattcgatttgatttcaacattcagcatccttatagaccacttcttgatgccatgcaaaatcttggcatcaatcaaaaagaagtgaaacaagtagcatggaactttgtgaatgactggcttaaaacaacattgtgtctacagtataaaccccagtacatagctgctggttccctttatctggctgcaaagcttcacaatatcaagcttcccttgcatggagcgcatgtttggtggcaccaatttgatgttgcaccaaagcctctggaagccgtcattcatcaaatgatggagcttgcggctttgaaaaagttgatgcctgctcgacccaatccggttaagctgaaggaaactttatgtgaagctaaactgagcttatctaatagcccagactctgtgttgaatcaatcaaacttgttaataagcagctcaagtcctgatattggcgagcccagtgacaaagtgcaggtggattcctgccaatacttgataagcagtcacatgggtgattgtagggtctcaggtcctgacagcagttcgttgaatacttgtgctaatagaaatgtctcttgtaaagcacatgatgaagagagcttggatcaggccttaataatcaaacatgacagtgggatgatgccttctagtaatcagacatcattatatgctactgtaggcactgagggcagtgctgaactgaagcaggatgtaagccattgtaatgacttcaatatcagagtcaatgacgaaagcttgaaccaggtgttaagaaatcagcatggtgatgctatcccattacctgacgtggtatcgctggatgccaaggtggacaaggaaaggagttggtgtgtggaaccattaattgcaaactctgattgctgtactgacagtgttaatgtggatagcttgtgcactgatcagagattggctgatgctccttcaggccccacagctgatgcaccatccatgctggccgaggaggaatcttatccttttagtgcaaagcttgaaaatattgatgttgccaggatcaaaggtttattgatgaagaggaagagccggagagagatccaagaccgagccattgcttcagatggtctaagtgaagaagactggatcgagagggagcttgaatctgggattgttacaaaccaagaagccaattgtgctgccatctcagacgagctaagtgacgaagcctggattgagagagaactcgagtcagggattgtggtcggaccaagaaatgagcaagcgatcacttttgatggtttgagtgaagatgattggatcgagagagagctggagtctgggatcatcgttgagccagcacctgctaccaagaagcggaagctggagtcaagctgttagctctgcattcgaaggccagattccaagcaggtgaataataacagatggttgcgagtaggaccacatcgaagccaagagatacatgtcgcacagatgggaggatcaatattatcctttttttatttctttataaccaaacaccttggagtactttgacacaaggggtgtgttcacagtgggatctccccagtttcttgaatgcagaaccgtatccgttgtatttgttccttcttgtcgtgagtgtaaatctagcgtgtccgaagttcggttttagattgtaggtgtaactgtagcagggattatctggtgttaagcccaacgagaaaatgattcagtgtaactgttactgtaaggaaagaagttattcagtgtagatttatggttaacacaagaagagg

SEQ ID NO: 2152 - DNA, 4137 bp, Zea mays
atgcccgcgccgccatcaacagaggccgggcggagccgcaccatgacacgcgtgatcatcctcctcgatagcgacaaagaagacgacggcaccggccgccaagccgggcgcgagcttggtggcgccgcgatcgcctccgcgggcgaggcctcgaagctcgtcaaaccagaggtcgtcgacgatgtgggctccaacccggtgcgtcctggggcgctgcctacctcgctacgggtacaaggccatcgcgcgccgtcctcgccgtcgccggtccccgcggcggttcggaagcagcccgagattatcgccatctccgacgaagacaatgacggttcccgattccggcgcgtgaggcgcgtcaaggacgaggcttccgattgggttctttcagcgaaggcgaagcgcgccatggtgtcgggtgtgccccccggaagctccgacgtgaagaggaagcggaagagaggatcgtccggcgctggcgactttcacgcgttggaccggaatttgagcgcttcaggggctggtcgtcgcacgtcgtggatggccgaagacgccgggagctccaggaatgtgagtagtagcgagttaagcagaggaggcgtgggtgaccggtcgggttcgaccaagaaggccaggggtgcaccgggaaagacgaggcgtggagggggtacgagaagagagaggagcactagtgcggcaccggccaacttggttggagggagtgcaacggttgggtcgcggatccggttaaggtcgcgtcagcaggggagagtgcagtgtgctacatactctgctcgagtgtcgtccgaggacacgggggaggacgaaaagcatatgcaggagcagacaagagtggaagatgtggagttcatggaggtggatgatgattatgacgacgtcaacgtggctggcaatgtcatagatcaagagagtgagcaggacgaggctctggaaggaaggagcagtcaggatagccatggctatagcgaggacaaggagggcaaagactctgctgctttgagtgataatgaggaggatgtggggggaaaggaattgttggaagaggaggaggaaggtgccgatcaagaagaaagtcatatcatctacgatggtgaaggagaacaagaagaggacgcatctgaggaggaaacacaggaattggatgaaacaggggaggcgcagccattcaatcctagcaacaccatggcaggtagcactatgaggtcaggaggcgatggcaagcaagtctttaggaggagggtttttgagggcatatatttgcctgagaatccacacaggactgttggcaagggcatccaagggcggacgcgatcacagcgaaaatgcaaggacaagaaactgctgaaacgcggaactttcagtaaaccttacaacattgatattccagactcgacttctgattccgaagaggaaatcgaaccaccagcgccacagcaagggctactgtcgtcaagtgaggaagacaacatgacttttggcaaaaggaagcgcagaagagcagcgataaacaagagatgggacaagaggctgagtgccagtagtgacgaggaggattacggagcatctgccatggatgccaaagagaggcctttccggaggctgaagaaggggctatccaatcttcaggctgccaaggaaggttgcagaaattacgaaggctcaaatcctgggcatgccaggtacagtggtccaaatggcgggaatctagagaacatgtccagtgcacaggatgatatctccttcaaaagaaatgtacatatgattcgaataaagaagcgcggtcgagcagcgaaagccgtctatgatgagctccttgattccttgttttctggctgggaaaatcatataggtaatcctgttcacgcagaggctggaaacagtttgcctctcgtgttctcattcggagatgaggatgcagaagagaacacagaaaatgacaagtatcaagaacaagaagacctgtggatggaatgcggcattgcttttcaatccatgaacattggttccaacggctgtgaagaggatgggaaagaaattcctccagtgaaagtgacttcttgcaatattgggcagcatgaattcattattgacgaacaaataggagttcggtgcaagcactgtcatgttgtcgatctcgaaatcagagatgtactgcctactttggggaaatgttctgcagaaaggggatcagcaatcaaccctgagtttgacaggatgcttaaggaaatgctcaatgtttttgaacagaatgatgtgctggtatcaaatggacatgaactaccatgcaactttggtgatcacaaagctggttcagtctggaatctcattcctggagtcaaggaaactatgttcccacaccagcaggatgcatttgagttcatgtggacgaagctagcaggaggtactacaattgaacagctaaagcacaccataaaatctgatgctggaggtggttgtgtgatttctcatgcacctgggacgggaaagacgcgactggcaatcacatttgttcaatcctaccttgaggttttcccgcactgtagcccggttatcattgctcccagggggatgctagcgacatgggagaaggagttcaggaaatggaaggtaaagctccctttccatgtactgaattccactgagatcaactggagtgaggacaagaccctccaagaacaggctgcgaagaatggaacttttcaccgtaggctactgacagataaaatggatcaaaattataggcgactggtgaagctagggtcctggatgaacggtaccagcataatcggtctgagctactcgctttttaggaagctagctaatcacgaaggcatggacggggataaggtgaggaagctgctgctggagaaacccaacttgcttgtccttgacgaagggcacacgccgaggaacaagaagagtctcatctggaaggttcttaaaagggtccacaccgaaaagcggataattctatcggggactctattccagaacaattttgaggaactctacaacaccttgcgccttgtcaggccaaaggatgcagatgcattgcatctagagacggacgagagcaaagatttctggtcttcgttgagactgaatgacatcacaaaggcaaacattaatgaagtgaggaaaaaactggaccctattgtgcacatccatagtggcagatttcttcagaagtctctcccaggactgagagaatccgttgtgattctgaaccctcttctctaccagaaagaagtcatcgcaagtatggagaagactgtggcaatgggtcttgatgcagaatacaaaatctcgcttgcatcaatacatccttccctgcttgccagcgcaaaactgtctatgaaagaggaatctatcttggacaagcctaagctagagagtctacgctccaatccatctggaggggttaagacgaggtttgttttggagattgttcgcctgtgtgaagcgcttaatgaacgggtgctagtgttcagccaataccttgaaccattgtccttgatcatggagcagctgaaagaaaggttcagttgggcagaaggcgaagagatcctgctaatgagcggaaaagttctagttaaaaaacgccaaaccatgatggaggtcttcaataacatgaaaagcaaggccaaggtgatgcttgcatcaacgaaggcatgctgcgaaggcattacgcttgttggggcgtcacgtgtagttctacttgatgtcgtgtggaacccctccgttggaaggcaagcgattggccgggcttacagaattggtcagagaaagattgtgtacacgtacaatctgattgcagaaggaacgacagagaagagaaagtatgacagacaagccaagaaggaacacatgtctaaattgctcttttcaaatgaactggagcgtggaggatgcaacttgcctccagaactgacgttcaatgatagggttttggaagaattgactgcacgtgaagacctaaaaaatttgtttgtaaagatttatgttgacaatcaaactgatggatcacgtgatactggttataatgacgttgtcttcttttttgtggatggatgcaggagagatgaagaacaatacatgtttgcagtcctaataatatga

SEQ ID NO: 2153 - DNA, 2281 bp, Zea mays
ccaacactgacccaatccgaatatacagcccgaaaagcaactatttttttccgtgttcttctctcctcttccgctccccaccgaaagcataaacagcacaccggcaacgggaaaggaagggataccgacgcgagcacgcgccgagcaacgtctcgaaaaggccatgcaggacggcggcgaggtgctgttcctggacggcgtcggggaggtcgccgtcaccatcggccgcaacggcctctctgcacggcccctccacccggaactgatctcttcatgttggtcgtccattacactgcagcctaaattagacagcaaaatcaacttttcagatgtttatgccatagagatgcttgataagggtcgtatctgtgggccttggaatacaaagactgctattcaaggcaagaaaaatattgagatgcaccggtttgtcgtacatgggattaccagaagaaggaaacacccttctccgtgggtaccttgtgaatatatttttggtcacaaagacttgaagatctgcaaagattggtttcagcatctcatttcgtgcataaacaatgaaagtggtagaccaaagaacttaatggtatttgttcatccattgtgtggaaaaggtagaggggtcagtaactgggaaacagtgtatccgttatttgctagagcaaagataaaaacaaaggtgatagtgacagagagagcagggcatgcatatgacacactatcatcattatcagatatagaactgaaggcatttgatggtgttgttgcagtgggtggcgacggtctatttaatgaaattctgaatgggatacttagttctaggcacaaggtttcatatcccccaactcctgaggggtttggatatgttggaagcagtgataactgtgaagaacagacaagaaattgggttaactttagtaaacccacaccagattctgggaatgccgtgtttctagggaatccaagtaaatgtgatgaccaagaacctcttctttcaacttcacatcctaccgagctagagataccatcaaattctactaaagaaccatgtattggagatcaggataacccagtttccttcccaaatgactggtttaggcttggcataattccttctggctcaactgatgctattgttctcagcacaactggggagagagatcctgtcacctctgctctgcttattattcttggcagaaaggtgtcacttgatatagctcaagtcgttagatggaaaactagcccaacagctgaggttttgcctactgtacgctatgctgcttcatttgcaggttatggcttttatggagaagttatcagggagagcgaaaagtaccggtggatgggtcctgcacgttatgacttttctggaacaatggtctttctgaagcacaggtcatatggggcaaaggttgcttttctcgatactccatacactcattcgcttacagcatcagcacaggatgatataactggagcacaaccactacaatctcgttggaagaaacctcgcaaaataatctgcagaacaaattgctttgtatgcaaagaggcttcaacatctggacaaaatccagaagatgttgcagacaactccagaacaatatgcgagaaccagaagtgggtctggtccgaaggacatttcctcagcgtcggtgcagctgtcatttcatgtcgtaacgaaagagcccctgatggcctggtagctgacgcacacctttcggatggttttcttcatctcttgctcataagagactgccctcttcccctttacttgtggcatctaacacaatttaccaagaagggttcagatcccctgtccttcaagttcgttgagcatcacaagacacaagcgtttacctttatctcatcacatgacgaaagtgtttggaacttggatggagagatgtttcaggcatgtgaggtatctgtccaagcgtgccgggggcttgtcaacttctttgcttcggggccagagctgtagtaatgatactcgtaagttcctctttgcatgaacgaaggatgccaggagttcatattttttatttagagagtcccttatttcgacatgttgacatgttgacatgttgtgatgttgtacactcttatttgtattttagtggagacctagaacactttgttgatagatatactgttaatatttgttgatagctatgtggcatggaaactacaacccatttgtgctatagaatagaggaacaaaaggttttgattgaattaatgaagtaaaagtttactttctgttttgcgagaaaaaata

SEQ ID NO: 2154 - DNA, 366 bp, Zea mays
atgtctgctgcttcccagacattttcaacgagcaccaacctgatgtttggtcgcactagcccgcgtgatctggacgacggcggcgaggatgacttcttctactccgtaggagggggcaccaatgggaacgacgacgaggccgtcaagctcactgtcgctgatagctctgacgactttgacgagctgtcaggaggcgggccaagggacatcgtccggctatacacgctggtgcggcggttcccaccatcggaggcggacgactccttcatcttcacgacggtgcaggtcactgaaggactcaaagcttctgggcaagcgagggagagaacggagcgacgagtgacttccaagcaagcgcgggagtga

SEQ ID NO: 2155 - DNA, 1246 bp, Zea mays
gcagtgcaacttgagctcatgcattgacaccaaaatctatcggaacaagcaaaaaaaaaaaagagcagaagcacacgggggctatgggaaaatgacaagctaaggaaaaaaagaatggcacatctcatcatgaccatcaccagtcactggcacaaaaccctagctatatttactagtaagtactatgcaaaacatattcgagcagtattcaagtgtatagttgtgcaaggattgaaacagctgtttacttgtatatatcttctttcttctcatccctggcccctggcgtcatggtcagatattgcagacgactcccttagtcccttcaaagattcaggaacaggtctgcatctgcatgcgaagatagaaagaagaaagcatgaactgcggggttagacctccgaagaagaacttggctgcctgcgcgcgcaaaagaaggcaaaaatagtggatccggaagaagggaggaggggagaactatctcttccatccccagaagcagaaggccaaaaccatggtcggctgcctcagagcagcagactagattaggcttattggaatagaacggatcagataacgtaccatatgtagctaagagcctaagaaaacaagctagaaccggccggccgggcacgcctcgatcgacatcaatcaaacaaacaggcccatcaaatgaacacacgcaagaaaaggcagcaaaacgaaggcgtttccggcacaggtgatgatcaaatctaacgtagctcttacttatgtcatgcgggctttacaaagggaggcctacgcagctccattggcagtatgcccacctccaaacaaacaaaaaaagcaaactttctgcaagatcgtcaagaagggaggtggacagaatgccaaggaactctcagtaagcgccaccctttgataagcgcacatggccgccactactagttcctttgcttgctccgagcgatccactcacagaccacagctgctgcggctcttgctgcactgtaatgtatgtgctgctttacggggcgcgctatttatagagggagtggagctagggttgcggcttttgtgggattccatggaggggggagagggatgagggatgggcatgcagatcagatggatgggaattgtgcttttcttggtctccgtgtgtgagatctgaaggattcgatatgagacgatggcttcaagcagatctacctgtttctctctccccatgcctatagatctactagtggaggtgctacttctg

SEQ ID NO: 2156 - DNA, 1633 bp, Zea mays
acaacgaaccaaacaaacactactttttgcatgtgtagatgcagctgcaccaccggacaaggcaaccaaacgcccccttacactctcggtggccagtggcctggtctgttcggctccgagcctccgatttatcgattcgattccatcatccctctcccggcgccctgccgtcctgcgggagggaggtgcaagcggaaccagcccggcaatggcaggcgcggctgcgcggcggccgggggcgaagcccaggggcggcggcggcgcggggaagaggagcgcgtggttggcggcggacggcagcaagcgctggggggaggccttcttcctgctctacacgcccttctggctcacgctctgcctcggtgtcgtcgtcccattcaagctctacgagaggttcacggagctggagtacctgatccttggcttggtgtccaccgtcccggcgttcgtcatccccctattcctcgtagggaaggcagatagtgttagaaatttcaaagatcgatattgggtcaaggctaatatttggattataatttttagctatgttggtaactacttctggacacattacttcttcacagttcttggcgcgtcatatacttttccatcatggaggatgaataatgtacctcatacgacatttctcctgacccatgcttgtttcctgttctatcatatggcatcaaatatgacacttcgtagattgcgccattctacagctcatttaccacagtctatttgctggttatttgaagctgcatggattttagcactgtcatacttcatagcgtacctggagaccctagccattgcaaatttcccgtactatgaattcgttgaccgggatataatgtacaaagtaggttccttgttctacgcaatatacttcatcgtcagcttcccaatgttttcaaggattgacgagaaagacgagaagtggagcctgtccagggtagccgtcgactctctgggcgcagcaatgctggtgacgataatactggacctatggcgcatatttctggggccaatagttcccgtcccagagtcgaggcagtgtggccaaccagggctcgcatggttccaagcgcagaacggaagcacctgattcagtgaagctgcaagttctgcgtttccacttgaatacttcatcatcacctagcattcaccgaggcggagatcttagagcaataaccctcgagagaaatcatggcctcactccttttgataaatagctgtgccttctgtggccggatgcaattgtgcaaatgccactttcagtagttatatttgtatgttttctccgtttggtgaattacagagagatatgtctgtaacgtgaacaagatcatgctgttctaattcctgaaactctatgtggtgctttgtgatcggattatttttaggtgtcgtttgcttcgttggggtgtaggtgtaaccgatttgattacagcggcatccgattacgttgttgcattgtttgagccacaacttttaatgtgctaccatgtatgtaatcatatacgaactaaaatgcagtgttatctagtatgcctcccaccaaagtgtaatgcgataccagaacttacctgatctgaaccaaacaatataaataatagcttactttcttttc

SEQ ID NO: 2157 - DNA, 1996 bp, Zea mays
tcgtaccgccgccgcgcggccgtagagcccgtgcggagagccgcatggggcaaggcggcagggggcagactccaactcgaacttgcccaccaccagtccactgtccaccaccctggcggcctggcccttcaacactcgccaaggccaggccagccaactagtcaaggccgccagggggcgtctggcttctccttccttgctgcggtcctgctcctgcccagagcagccctttcgtccctccctgcgctttccctccacaccttcgcggacacacacacaaaaaattgtcagctgcccccgccccgtataaaaaacgcaccaccagtggcggccaagccatccactgccccccgcgcatcgccatggctctcgccgtccgcacgcctcggttccagcctcgaccggcctccatttctgcgcccacaacacccgcatcgacctccctcgccgccgggaacgcgaggccccgcccctgcgccggcgccgccgttcgcgcctcgcccttcaccgaggccacctcctcctcgcgctaccgccgcgacgcctggtcatacgccgccgatggctcctccaactccgcatccccgtcctccgctgccgctgctgccgcgggccgtcgggatgacgagatcgcgctgcagctgccggaactgcggaggctcctggacgtgctgagggcgtccagggggaggggcgccgaggagggcggcggacccgggagggtggcactggtgggcacagggcccggggaccccgagctgctcacgctcaaggcggtccgggccatcgaggcggcggacctggtgctctacgacaggctggtgtctaacgacgtgttggacttggtcggggagggcgccaggctgctctatgtcggcaagaccgcgggataccacagccgcacccaggaggagattcacgagctgctgctgagctttgcggaggccggtgccaatgttgtgcgcttgaaaggtggcgatcctctggtttttggaaggggtggagaagagatggatttcttacagcaacagggaattaaagttgaagttatcccaggaattacttctgcttcgggtattgcagcagagctaggcattccgttaacccatagaggtgttgctaccagtgtcagatttttaactggccactccagaaatggtgggacagatccactatatgtagctggaaatgcggctgatccagacactactttggttgtgtatatgggtttgtcaacacttccatcacttgctccaaagttaatgaagcacggcctgccaccagatacccctgctgttgcagtagagcgcgggactacaccccaacaacgaacggtgttcgcctcgttgaaggatcttgtggatgaagtcaagtcagccgatctagtttctccaactctaataattattgggaaagtggtatccttgtcacccttctgggttgagtcatctgaacatgatgcactgaaagttcagagctcgtatgcaaatgaggccagatgacaacagattttcttggtttttagtgactggacaatacttgagaaatgcaagatcccagatatgggagcacaggttcgacctggtgtacacagaaacatctcaggaagcatggatcctgaatggcggatggtagcttaagcttataacagacttggggcagaagcgcacttggactgatcatgcttgattctttggcctaatctacatgagattcacaatttttcgatttagttgagttcgacaatagttgtgtgcttctttgttactagtagccatgtacgtgcggcgcacgcgtgtttacgattctatgccctagcatagtaaggctattccaacgctgccacgttatgattttatgataatgggagtttcgtagcaccatgataatgagaaatagtgctacgaagctcttattatatgacaagtgccataaatcgtagcacttatgattttatgataatggggagcttcgtagagctctttctaacgtgcca

SEQ ID NO: 2158 - DNA, 447 bp, Zea mays
atggagaaggggttcggctgccctccatggctgcctggatctcaggcgcggcaggggttcgctccaggcgctgaacatgggaggagtggaagggggcgtcggtctggggaggatggcggccaggtggggctgctcgatggaatccacggcaaggcgggggtggccggacttgagaagggcaggaagccagatgggagagggagcgtacgtgcagaaagcaaacaaggagcccaagccaaggggacgagctcacctgctcgagctcggaccctgagaaatgccctgcgcgctgtattagagatggagatcttgggtttggttccatggcgtcggtcgacattggaggaaggaaggaggaacagaggtgcttctctgctctgcgcaccgtggcggccatgggccagagaagggcggcccggcatccatcgctggagcagaggcacgtaa

SEQ ID NO: 2159 - DNA, 2293 bp, Zea mays
gaacacctggactcctccgtcaatccccgctccactgcctctgcttctccgccgcgtcagggtgtaaaactactcgaaccgatcaccgacgcgacgaaccccgaacccgaaccctccaagccggcaggccggagcagagcgcgctccaagctgaatccccccatctcctatcgccgtcgaaagccgcaggtccattataactttttatgaccttgtctgggatggctgttgctttcaaagcaagtacaagttctgtcacacagcaacattggtcaagtccaacaaaggaccagtgtcaatatggtttcactcatttaagcaggcaaaagtgcagaaaaagagcactgtgtgtgacagctatatcagggaagctagacctagatttcactgatccttcttggaaccaaaagtaccaggaagactggaacaggcgttttagtttgccacatattaatgatatatatgatttggaaccaagaagaactacattctctttgaagaaaaacagaattcccctgggtgatggtgatggctcatcaactgatatgtggaacggttatgtaaataagaatgatagagcccttttgaaggtgataaagtatgcatctcctacttctgctggagctgagtgcattgatcctgattgtagctgggtggaacactgggttcatcgtgcaggtcctcgtaaggagatatattacgaacctgaagaagtaaaggctgccattgttacctgtggagggctctgtcctggtctaaatgatgtcattaggcagatagtatttactttggagacttatggggtgaagaatattgttggaatcccatttggttatcgtggattttttgagaaaggcttaaaagaaatgccgctctcgcgtgacgtggtggaaaacataaatctttctggaggaagtttcctaggagtctctcgtggaggagctaaaactagtgagattgtagatagcatacaagccagaagaattgacatgctatttgtaattggtggaaatggtagccatgcaggagctaatgctattcatgaggagtgtcgaaagagaaaactgaaagtttcagttgtagcagttccaaagacaattgataatgatatactttttatggataagacgtttggttttgatacagctgtagaagaagctcagcgtgctatcaattctgcctatatagaggcacgtagtgcataccacggaattgggttagtaaaattaatgggaagaagtagtggattcatagccatgcatgcttctctttccagtggacagattgatgtttgcctgatacctgaggtatccttcacacttgatggagaacatggtgtcttgcgacaccttgagcatttacttaatacaaagggattttgtgtggtttgtgttgctgaaggtgcagggcaggatttactgcaaaaatcaaatgcaactgacgcttcaggaaatgtgatacttagtgactttggtgtccacatgcagcagaagatcaagaagcatttcaaggacatcggtgttcccgctgatctaaaatacattgatccaacatatatggttcgggcctgccgggcaaatgcatctgatgctattctctgcaccgtacttgggcaaaatgctgtccatggagcatttgctgggttcagtggcatcacgtcaggtgtttgcaacacacattatgtctaccttcccatcacagaggtcattacaacaccaaagcacgtcaaccccaacagcagaatgtggcaccgctgcctcacatccactggccagccagacttccattgactacttcattaacacctgagagcaaggcgccaggagaatatttaatcccacaagggactgctaacaggaaacttgaataaatctggctaacccaaaattttgtgaggctggaggagctcataacgaaattgccagagccaccccctggtcatccagacgttgtaagcatgcataccctttctattggtttgcaatcccaagtgaaattaaaagttagaagttgtttgtgctgcaaacaattcaccataatcccaccagtacaaaactggctccagccttgtgagatgttttattgatgatgtactatgcataataggcaattggatattcttactgggaagtgcagtgatcagagatgagcttaggtgctgttccaatttggttgcagcgttttgatgtttgtggtgttcgtctcgggaggtcaagtattgtgaacttgtaattctcttcttgaaggtatgttacagcaaatagtgctcatgcctatagattagaaaaaaaaa

SEQ ID NO: 2160 - DNA, 2051 bp, Zea mays
ttttaaaagcccattccgtaccgatgatatttcacttgtcaccgcccctatcatcgctaaaaacctttctttttctcccgtcacatcacctttcactgcatactgtctcctccctctcacccattcacttgcagtcctgcagtgtgccacagtccctcccctcttccagtctcgccgccaattagtactcaccccctcccttgcatccgctcccctcccccctcctctcttccccccccgacctcggcgccgaggcatgctgttgccgtgagtgagcaagggatctttccggcgatcttggaggcggcgagcctggtgccgcatgctggctgtccggccggccggaggctagctagctctcgcctctcgaccgagaagtgaagtgaagtgaagcgagatggacctggtgccgcacccggacagcccgcactccgacaacagcggcggcggcggcggctcggcgtccggggcgctgtcgccgggggcgtcatccgcgggcgcggcgtcggcgctggcgtcgccgagccggtacgagtcgcagaagcggcgggactggaacacgttcgggcagtacctgcggaaccaccggccgccgctgtccctggcgcgctgcagcggcgcgcacgtgctggagttcctgcgctacctcgaccagttcggcaagaccaaggtgcacaccccggcctgccccttcttcggccacccggcgccgccggcgccctgcccgtgcccgctccgccaggcgtggggcagcctggacgcgctcgtgggcaggctgcgcgccgcctacgaggagaacggcgggcggcccgagaacaaccccttcggcgcgcgcgccgtcaggctctaccttcgcgaggtccgcgaccatcagtcccgcgcccggggcgtcagctacgagaagaagaagcgcaagaaggccccggcgcaccccgtccctgccgccgtcatctcctcctcccacgacggcaacgggcaccactacgagcaccagatgccgccgccgccgccgcccggcgccgcggcttgactggccagccggccggccggccggagctcccggtcccggcgcggccccatgtatgctactaccacatgcactactattagccgatcatcttcttggtcggtgcctctctatagctagctgaagctcctgtgatcgactactatatatctattgcctctatctagttcttggctcctttctactatcgatctgtggctatagtttagctgccactactgctagtacaactgctgctgctgctacaaattactcccgttgctctttcaaatatgcttttgctgctggtattgctactggaactactactgtctcttgattaggtcagttctcgatctgatcgtttcccagcttaattggtgacactctactatttgctgctactggtgatgcctccagctgcagctgtgaactcttgatgtgcttcctagcagcttttgctcctttgatcaaattggcttgagattttaattcgcttgttagcttgctgctgatcttccagctgcgtgctctttgactttgggtttagattctttgcatccagtgtgaggtgagatatctgcgggaagctagtcatcttgttcttgggggccgggtctgtctgtgtgatgcggggagtcatgtcagtttctgtcgtcctcgcggggaatcaacgtactgttgctgcgggtcagggatggatgagtgggttggttcgaagggccgtgtgggcgatggcgatggcgatggcgtgtcgtgttgcgtctgtgctagcctactgcatgctggctgcgattgctgccttctgcctgctgctacactcttttggggatctttttcatttctttttatggtagttcttatggtagttcatgtctctctgacgattccataagtgtctaggcttgtctggtcatcttaaaggagatgcgcccgcgcggccgattggaatgtggacagaaatggtgtggagcagatttatgccgccggccagtactatttgtgttcgatcatgaacgatgattcctgcttgttcagttgctat

SEQ ID NO: 2161 - DNA, 2222 bp, Zea mays
gttgaccctcctcccctctgctccgtccacctttcaaagccgaggcgccccggccgcctcttccacctccacggctccacctccaccccagtccacagcacccctcccctccggcctcccttcccgcaccgcggacgacaagtcaaataccgcgcgtgcgtaccacttggagccatccggcaccacgccacgagtccacagtccgcgcgccccccacgggccgtcgtcgccccggcttctcctctccttcccggcttcccccaacccctcgcgaaagctcgccgctgctgcgtccgcgccccgtggcggcacggcgcggcacctcgtggggaaaccgacggaggccttcgccgagcctttgggggccggcgctttttcctggtgccgtccttctgtactgcctgcgggtgggttgttccgatcataaccgacaaggcgcggcgtgctctcttccctcgcgttgtagactctcgcgggatctgtctcggcggcggcggcgggggtgggggtgggttactgggctcgcttcatcctcccggatcacggcggcggtttgttcagaacatgttagaagccagggaagatcggtgaaatgcttgcattgatataataagtccaggctgaagttattgagctgacagcactaagatataatagtttgagaatctcaatgggttgcttttctacattttgcaagaaaagaagggcaacgcggcaaccaagttcccaccataatgaagacgtacctggctgttcaaatataacaaaatacacttacaaggagctagtaagggcgacaaataactttaacccattgaacaaaattggtgagggtggttttggttccgtttacaagggacagctcaggaatggtacagttattgctgtcaaggtcctttcgtcggagtcaagacaaggagtaagggagtttctgaatgaactcgtggcaatttccgacatctcacatgataatcttgtgaaactttatgggtattgtgcggaaggagaccaaagaatccttgtttacaatcatcttgaaaataatagccttgcacaaacacttctaggctccagccacagcaatatccagtttgattggaaaacacgagtaaatatttgccttggcattgcacggggattagcatacctccatcatggtgtcagtccccacattgttcatcgagacattaaagcaagcaatatacttcttgatagggaccttaccccaaaaatctctgattttggtctagcaaagcttcttccaccaaacgcaacacatgttagcacaagagttgcaggaacactgggttatttggctcctgagtatgctattcgaggacaggtgacacgcaaatcagatgtgtacagctttggcgtgctgcttctggaaattgtttgcgggagatcaaacagcgatacaagattagcatacggagatcagatactcctcgaaaagttcccagagatcaccaacggggctctcctcttgcagacatggatgcactacgagcaggggagtctggagaggatcatagacaggtccttgggcggcggcgacctggacgtggcgcaggcctgcaggttcctgaaggtcgggctgctgtgcacgcaggacgtgacgaggcaccggcccgacatgccgagggtcgtcgccatgctgacgggcgagtgggacgtcgagccggagacggtcagcaagcccgccataatcagcgacttcatggacctcaaggtcaggagcacgaggaaagcgagcgacaacgtggccacgccgcctacgtcctcctcgacgttcctgtcctccctcatggcgcactcctcgcccttgctgtcgaacgagtccacgcaggcctccatggcgttcaccggggtgtcggatcgcgagtgatccttgatcccttcgtcaaagactggtcaggctggctggtagtgacctgagttggttggaggtgtggaagacatgtgtagtgtaggcaggcaggcacagatggatttaattgcttcgtttgtaggcgcaacatcattgttgagtcaaaaggttcaagtacatgtgaggaaactgctttgtgtgcaattttggattgaagacgcgattcttttttccacggtgtaagtacaagcaagcccagaagaagaggttaccgcgtccggcccaagaacaagaatgtatctggcccagattgggtttctaatacaatttcccttctctactgaaactgaaa

SEQ ID NO: 2162 - DNA, 782 bp, Zea mays
gccgagccgaacagccaccttgaggcccatctaaagcccagaccgacgactccccgctccagtccatattcagaattacagagttgccatcggcagcaaagtagaccggaaaaccccatctcccccgccgccccaccacgcacgatggccgccgtaaggtcgctgctccgctcgtcggcctcccttcttcgcgccgcccccgccctcgcgagatcctcggctaccacgcgtccgtctcttcggcgcgcattggctgctcctcctcgccttctccggtcgcccgtcgagtcgagcttctgcgtggagtcgcttctgcctctgcacaccgccaccgccggtgcacgcatgacgtccatgctcgccgctcctggccaaggcctcggctggctcacccaagctgaaactgacggagtataacgccccctgtgggtgctcccctttaggaaccaggacatcaattgtgcttcgagttcttctgtgcctggaggaaacaggaagagttgattggaaaaagaaaaaatgggatgtgtttttctttttgttcatgtgaactgagatacgacttaataaactagatcttcgaatgatgctctgacccccccccccccctttttttaatgttttttcattgactaaaacggttatgtaatgataactatgtgacacttgttttgtttggtgtgattcttcagcgtagcctggtgatcgagactcatgcaggcattcgcttttgatctcaatccaatttatcctggaaacatgggagtgtgattactaataca

SEQ ID NO: 2163 - DNA, 2233 bp, Zea mays
gctgggtgcgcctaggagaggacccagttgactgggtgggtggttcggtagttggcgcaatgggagcgcggccgcgcggtgaaaagaagcgggccgcgaggggaggaggaacaaaacgactggctgtccgaacggggacgtctggttcctctcattccccttccacctcgctctctctctctcctcccactgctcgccctctctctcttacgcgcgcgtgacaacctccctccctccactgcgcgcggcgcgggagcagcagcggcagcacccaccgactgatcgccggtgggcggggcgggggcgatctgatgcgggcgcggcggtgatggcagcgccatccggcggtgggggcggcggtgcgggggagggctcctcctcggccgccgcagctgcgacgatcggggtccacggggtggaccaagttgcagaggcgatgtggcagatgaatttggaagaagccatggaactggggccatacccagagcgtgttggtgagccagactgtagctattacatgaggactggcatgtgcaggtttgggatgacctgtaaatttaatcacccagcagaccgaaagctggctgttgctgctgcaagaatgaagggagaatatcctcaaagaattgggcagcctgaatgtcaatactatctgaagactggcacgtgcaagtttggagcaacttgcaagtttcatcatccccgagaaaaggctgcaatggcaactcgagttcagttgaatgaactgggctacccactccgcccgaatgaaaaagagtgtgcttattatttaagaacagggcagtgcaagtttggaagcacatgtaagtttcaccattcacaaccatccaccatgatggttgctgtacgtggctctgtttattcacctggacagtctgcaacttctcctggccagcatgcttaccaaggggctgtaacaagctggcccttgtcgagatctgcttctttcattgcaagtccaaggtggccaggtcattcaagttatgcacaagtgattgttcctcccgggcttgttcaggtcccagggtggagtccttatactgcgcaaattggttcttcatcctcggaggaccaacaacggacacctggagctgctcaatactatactggctcacgccaaagtggtactagtataggcgatcaaggaatgttttcatcctaccaagcaggttctgttcctgttggactttatgcagtacagagggagaatttatttccagagagacctgaccaacctgaatgtcagttctatatgaagaccggagactgtaagtttggtgctgtatgcaagttccatcatcccagggagcgaataattcctactcccaattgtgcactgagtccattaggcctacctttgcgcccgggagagccaatatgcagtttctacaatcgctacggcatgtgcaagttcggtccaaattgcaaattcgatcacccaatgggaaatgccatgtacggccaggctccatcgccagctagcgaggccccagctcctcggcgcatgctggcacatgtaccgccgtcgcacccagaagcatcgcctgatggtggttccggaaggtctaggaggattgcccactctgattcccagcaaataccctctggtgaaaggagcgctgagagagaggcgtcctaggccatcctcggtgtcttcgttccccattcttgactggagtaaccatctgcaaccaacaacattcgaggatccgaagctgtacaggtcttttgccccacctctgagctttacataccggagcttgcttcaacgtgtattgcattcaggcaggaaaaagttcttgcctgttcgggatgctcatttgctcccccactgaaacgggaacaaacctaccttatttaaaacatatgtatggatggaacctactcacctctggacattcaaacccattcgagtcatgtgcactggtcccggtgctgtagttatagagctgtctttgcatggacaaagctgttgcgaaactgactggggatgcgcaagcataacctcttttgttaattattgtctcgttttttttttctcggcatttatctctttttcataagggcagccccgcactctgaaagtgtgcgttttgaagattgggaaaataataggttgccatcgtatgctctgtattacccaccatgctttaaactcagttatttgagagtcgtttttatcttggtggtcctgacagggactgtttatttt

SEQ ID NO: 2164 - DNA, 2753 bp, Zea mays
cgagaaaaattcgggggaaattccagttgctcgctccactccactcccctcccccggtcccgttccgtcggcggccggacaaaaccgccagactctctcgtcccccggcccggccctcccagacccagttccatccttttgcttgcttgcggttgcgggcaaccgctgtgatagagcgagcgaccgacctgtagtacgggagagggttggaaggagcgaaaggagagagaggttggtggttgtttggtggaggagaatagttggttgtcttcagggagggagagagggaaagatggagcgcaaggcggtggtggtgtgcgcggtggtcggcttcctcggcgtcctcgcggcggcgctcggcttcgcggcggaggccacccgcgtcaaggtttcggacgttcaaacaagcggcagtcctggtgaatgcatatacccaagaaccccagccttggcactgggtttaatatctgccgcctctcttatgctcgcccagtccatcataaacgcagtcgctggttgcatctgttgcaagaagcatcctgttccctcagacactaactggagcatagccctgatttcgttcatcgtatcttggtgcactttcataatctcgttccttctcctactgactggggccgccctgaacgaccagagaggcgaggagaacatgtacttcggtagcttctgctacgtggtgaagccgggggtcttctccgggggagcggtgctggccctcgccagcgtggcgctagccatagtctactacgtcgcgctgtcatcatccaagggccctccgccggcgttcgcagccccgcagaaccagggcatcgcgatgggccagcccgtgatcatcccgcagcagagcagcgagccggtgttcgtccacgaggacacgtacaatcggcggcaacaggtcccgtgacctgaccacacagaggtctatggttggttcggttggttgtgcttggtctgtataggttgcaggttagaacagtagccgtcgccattgctgttatagctagatcctgttctttttgtttttgttctacttgtaccctcgtgtttgtcgagcatggaatgtttggttctgaatgaactgggtaatgttgaagagagcctgcttgtttcgtgttctgtaaacgtgggggctcgccggcatgaagtgcttccctttcgtcgacctccgcagcattcgctcactagatatcctcgtgtctgttacaaaatattgtatattgtatatgtgaccaatccaaagggtgcgacagattctccctaagggacataccccttgagagacaccccttcacatgtatataatcaggactctcctgcaataataaaggacaactgtcatttgcactgttcctctgttcacttgttttccactgagttacaacacgttatcagcacgaactctctccactgaacgaggaaaagtcttgcgtgtgcaccagcgacggcggttaccggatcgtcttcggcaacagtgaacatgacgatgtgcaggcaggctgatgatgtgcaagcacggatgcagtggttcatggcgttggccacgtgaacaaccaaaaagtaaatctctattatattcaggtttgagatttaccttttgatctagcaaattaaatatgcatgtttgctctaccaacgttgtgccgctacccatctcggtatgcattccagtgattgggatgtgtcgcttccgttcgcacgtccacgcatggcagcgacggcgagtctgcggcaacagcgaaatgcactccgcgggccacgcatgcagcaaacgctatgccgctggcggggctgagaagcccaccaccgtaatggtgcagttgcaccggaccatgcaatggtgcggttgcaggcttgcagcagcgctcgcatgcgtgttcggacccgagcggcgtaggaggttgggcattggctggggctgttgcgcccgtactgggccgtcacatggtcggagcccatgctggaggaggacgccggggccgcgcaccggagtgtgttgtggccggcaaagccagcctcggagccgtgcccggccgaagcgccagcgtcgggacgccgagccaccaggggccgctcccgcgcacccgcacaggggctgcgcgcagccaccgccggctgtgcgcccgttggggagcgcctgcagtgtggccgtcgtagggcggcgtgccccgatgacggggccacgacaccggtggccacgcccgcgtccgcagggctgctagggccagggtcgccgtgcccaggccgcaccatggccgcgcccgcgcgtgcaatgctgctggggccggagtcgccgtgcccaggccgcaccatggccggatcccgtgcctggccgcatgccgcgccatcggcagtggccgccggggcttggccggagcaaacaccatggcggcggctgcaagaaggtaggagcggttagggtttccaatacccttaataccgtgtctggccgcctggccatgcttgggccgcaccaggcctcatgggctggccgcgcctggccgcgtgggtcgcgccagaccgcctagatgcttggaccgcttgggccgtgcctggcttggctgagccgcccggccacatgtatgactggctaaatttactcattattttctgcaaatttaattacaagactctatgatgtatcacagtttcaatcagtatttagtatctaaatttgaatatttagactgctgatgatatatataattgtgatagtcatctgtttttattataaaaaa

SEQ ID NO: 2165 - DNA, 3663 bp, Zea mays
gaggcgcgcagcacagggcgaaaaagagagagacgatgccgtattgacattgcaacaagcaacgagaagggcggctttgtcaggcgcggaggccagagagcagcagacagagagaaagagagagagagagagagagttgggtgcagtgcagcagtgcagagagcagagacggagcggagcgaccgagagagagagagaggggaagtttaataatatatcccatcactcacacgccacggcatcattcgccgcctccttcctcctcccgctcgtcgccgttcctcctccgagcaccagcagcgcgccccctccgctctcccttagctcaccagccgcctcttcgtcggagcagcaacagcagctgtgcatgggagtgggagcacggctctgagaggaaaaagggaagaagaaaggtgaccaaagggaaacaaagggaaccaaaggactaggaggatgaagttcatgaagctgggctccaagcccgacgccttccagtccgacggcgccgacgtccgatatgtggtctctgaccttgcaacagatgttgtggtgcatgttggtgaagtaaaattttacttgcacaagtttcccctcctttccaagagcggcaagcttcaaagattagttctgaaggccgctgaggacgagactgatgaggttcgcatagatgaccttcctgggggagcaaaatcattcgaaatatgtgccaagttctgctatggaatggtggtcaccctcagtccacacaacgttgtagctgcaagatgtgcgtcacagtatcttgaaatgaccgaagatatggaaaaggggaacttgatatttaaaatcgaggtcttcataaattctagcatacttcgtagctggaaggactctatcattgttctccagagcacaaaggctctatcaccatggtctgaagagctgaaggttgtgggtagatgtatcgatgccatcgcttcgaagacgtctgcggatcctgccaatgtaacctggtcatacagtcatagtagcaagaaaggaggagcttgtgctgaaatagtcgagccagcaggaaagccatcaatagctccaaaagattggtgggttgaggacttgtgtgaactggatgttgacctgtacaagagagtcatggttgctatcaaatccaaggggagaatgtcacctgaactgataggagaggcacttaaagcctatgcagttagatggctgccagactcctacgatgcattagttgccgaggattacatgaggaggaatcaatgtctggttgagacaataatatggttgctgccttctgacaagagctcgggatgttcttgcagatttctcctgaaactgttgaaagtggccatactagtcggaggcggggagcacgtgaaggaagagcttatcaggaggatcagcttccagttgcacaaagctactgttaaggatctcttattacctgccacttcgcctaatgatggtacctatgatgttcggctggtgcataatcttgtccagagatttgttgcaagaacagcgctgtctcataatggcggtttcattgagaagtccgacgaaaagatgattgagctcaacttcgagcaagaatccattttgtcggtaggagagcttgttgatggctacctgtctgaagtagcttcggatcaagacctttcgttgtctatgtttgttgaactggcgactgccgtgccagaggtggctaggcctgttcatgacaacctgtactatgcagtcgatgcatatctcaaggaacacccagacataaacaagtccgagaagaagaagatttgcagtctggtggatgtcaagaagctcagcgcagatgcatccgtgcacgccacacaaaacgaccgcctgcctctccggttggtggttcaggtcctcttcttccagcagctgagggccggcccaagcaaagaactcgccctgattgacaatggagaacacgcttgcacacggcctacgcaggatcaatgtgaccgtggtgaaaggcggataccgaagcatccaaactcactgaataagcaggtgacaagcctgagcgcgagagagagccagcagcaccggatcagcgagcacaggggcggcaggaacagctttaaagaccagcttgggggcctcctgctgcagtcgcgatccaggaggatctttgacaagctgtggagcagcaaagggcagggcgagcatggcgggaaaggctcggagacgtctggtagctcgcagagcccaccgttgtcagcaaagcctgcagaagtgaagccctcccctcttccccctcttaggggcaggaggtactctgtttcttagttttttttgggggtgggggctctcctagtttagggctctgggataggttgttgtacagaaggtatcatctgctgccaatccctttttgttttgtacgcagatcaatctgctgttctatgtgatgatccatgccgtagcttttactgtagcgtaatttcaactgggagcaaatatttaccagggcctgagttgttaaaaatgtttcaatggcaaaaggtgaaaagaaaaatcaacaaaaactcgtaccttgaagaacatgaatttcatgcgctacatcacgcaggactgccataaggaaccaatcttacaaaaaaaacgagagtatttcagtgcaaaagcaagtcaatttggaacaatgccgtcaaaaccaaactacagtataaaaaagaagacgcaaccacaccataagtatgaaaactgactaacatagcaaggttcaaatcaaataataataatgggtaaacgccgagacatgataatctggaacaattccatatcagacaataacttggaagacagccccttccactgggcaaaggcgcaaagctgataatttgttactatctccttgcaagttcaacatcaggcctgcacatttcgcagccaacacaacagtttatctgactgctagttcatcaggtttagactagtaaccacccctcagagcaaggacaagatggaggacagatccaccctcgatgttgtagtcctttgcggtcttgtcatcagcaagctgcttaccagcatagatgagcctgcaaaggcgaccaaagtagcttcatcagcaccagacgccaggaaagcataactggtttcaagtagaatgagcattccgaagaacaaatagtaacagttgcagatataacaaaaaaaatcagcatggtacctttgctgcacgggaggaatgccttctttctcttcaacacgctccttgatcctgtcaatcgagtcagtgggttcaatgtcgatctcgatctctttcccagtgagagttttgaccttgatcatggttccacccctaagcctgaggaccaaatgaagagttgactccttttggatgttgtagtcagccagcgtgcgtccatcctccagctgcttgccagcgaatatcagtcgctgttgatctgggggaatcccttccttgtcctggattttggctttgacgttgtcgacggtgtcgctgctctccacctcgagggtgatggtcttccccgtcagggtcttcacgaagatctgcatcttctcctcgcctcttcctccctcgcacagtcgtactagacggtgacgaactcgaaccttgtgacaacgaagccgaagaacgcccaagaaaatttcctttttctttaattt

SEQ ID NO: 2166 - DNA, 1478 bp, Zea mays
tagtcccgacccgtcccaccctatcagttgcgggcgcgcgtccctgtttcgctcgtgccgttgcgctgcgccaagcctccccacctctctcgtctcttctccacccgccgccctcgtgggagtgaaaccctagctagggttctgcccgccgccgccttcgatcaagacgcctgcagccttagcgcgagcccgccatggacacaggacgcaagcgcatcgcgccggggggcgccaacggcgcgggcggcccgaagcgcgcgagagaatcggagacaactcaaatgggtgtaggaagcaaaaccaagccgtgcaccaaatttttcagcactgcgggttgtccctttggttcaaattgccattttctccataacttcccgggtggctacctggcggtttcaaagatgaccaacttgggtgggccacctgttccggctcccccaggaaggatgcctatgggacctggtggtcctgatgggccaccttcacctgctctgaagactcgcttgtgtaacaagtacaacactgcagaaggatgtaaatgggggagcaaatgccactttgctcatggagagagggagcttggaaagcccctgcagatggacaactcgatgggagctcctccaatgggtccagggccaaacggtcacttcatgccacctccaatgcctatcccagacatggttcctcactccacattcggtgcttcggccacagccaagatcagtgtcgatgcatcccttgctggcgccatcattgggaagagtggtatcaacacaaagcatatatcccgagtgactggggccaagttagccatccgggacaatgaggctgatcccaaccataaaaacatcgagctcgagggaacgtttgaccagatcaagcacgctagcgcaatggtcacagagttgattgtccgcatcagtggtaaggtgcctccacaagcaaagaacaacccaggcagggggcctggttctcatgctgggggtcctgcaagcaacttcaagaccaagttgtgcgagaacttcaacaaaggctcctgcacctttggagacaggtgccactttgcccatggcgaaagtgagttgcgcaaacctgctgctgcttgatagatgtgtttagtgtggcttgcggtgattactctgcctgtgtggctgaataacaccacagtcgcctatggtgagatgtactgggccacgtgctgcctgagagagatcatttccatcgcttgcgtagagacaatggccgttttttaggatttgtaggattgccgtattgttctgttcgatttatatctaaccctgccagaatcctatttttgtaccgtttcttagctactaattggtgccagatcattgtggttctgttgactcgagaatagttgctatcgatggtatgggtttgtgaattattgatagcatttttgaaatccagatagctaagctgaaatccagacatcattagtgttcagttgatggtat

SEQ ID NO: 2167 - DNA, 385 bp, Zea mays
ctgaggtgaggaggaggtaggagaagagaagcgagcggagaagcaaagaagagtggcaagcagagagcatgtccagctgactcatgtgtgaagagggtgagaatcacagtgcggttctcctctggcacgaaggctggccagagcagcttatattgccaccacccttccttgccaaaggagaattgccctgccattcacaaccctgcaattcaacttcatttctttctttcttttttaagttcttggagtcacacagaggcaaggttatcaattttatataagtgtcgcgttcgggagagcgcttgcatccggtcgttttggtggagcgggaacattataactatttatgataaattttcatgcgaaaactagaggagctaatcca

SEQ ID NO: 2168 - DNA, 207 bp, Zea mays
agcaaggtgaagaaactgaggtgaggaggaggtaggagaagagaagcgagcggagaagcaaagaagagtggcaagcagagagcatgtccagctgactcatgtgtgaagagggtgagaatcacagtgcggttctcctctggcacgaaggctggccagagcagcttatattgccaccacccttccttgccaaaggagaattgccctgcc

SEQ ID NO: 2169 - DNA, 1754 bp, Zea mays
cggcttcatcgccaccaggcaccagcccaccaccaccagttttcctccccttcccgctcatcagacccagatgccgcctcctcatcactaatcaccactgccccgcgctcccctcccactcgctttgtgctgcctctcgccgtcgctcgcggttcccgatgggctgcttccttggctgcttcgggggggccaaggagcgccgccgccgccgcaagcggtcgccttcacagtcccccaacggccgcgcccgggctgtgccgcgggttacgccgaagaaggttgatgtggatggggaggccgcggcctccgccgccgcgccgctcctagcgacgctcctcgagttgagggactccacggacggcatgtgcctagccgtcgtgaagaagaaggtgacgttcgaccccaacgtcaccaccttcgaggcggccccgatcccggaggacgacggcgagggaaccgatccggaggatggtggggctagcagggagaaggggtggatgctggtgccggagtgtgccaagtccgaggccttccccttgaaccacaggtacagcaactgcgccggcagcgacaccgacagcgactacgaggacgccgaggaggacgagttcgaaggcgacgaggacgacgaggaggaagacgaagacgggattgatgagtgcgcgatcgacggcgacgaggacgaagacgagcacggcctcctcggcatcggacgcagcgaggaggatgcgtgcgagtcgctcttcctgcttccgtttggcaagacatccaaggattccttcggccaggtagtggcgcccgccgtgcccccggcggcggaggcccccgcggtgctcggctccgtagagaatctcaacctcgcccggtggaaggaacccaagccccgggctgccgctgcactcaagtcctcggacaaggagaacgtcactgtggggcaagagaaccggatggacgacctcctcgccgagccaccagcggccaagaggaaggaggagaggccggcggtctcgggctacacccccagcacgccgagcaagcaggaggcctccgtggacgccagcctctccacgtggctcggttcctcggggacgcccgagagcaactccgtccggtcctactcgccgatcagccgggaggaccgcccgatccttggggacctcaccgtggaggacatcaagatatcgtcggccagctcaacgccgaggaggtcgaggtccccgagcccgagcccggatgacatgccgatcctggggacggtgggcgcttactggaactgcagcgccaaggaggccgatccggtgacaaggggagggtttatgaggaccagaaccagatttgggcaggtgaactttgtctcagcaatctgactgcaattccagctcttccaggtataatcttctgagttctgatgttaaatcatgtgcagggttttgcaggatgaaatggtggattgctactgaacagtggacacacctctcctcccgctaggagggtagaatgcaagagtgaaaaccagtttgcatttctttcatatgttgtaaaacattacatggtcaccagatcagtattctagtatgatattttttgtggcacttgtcaatatgatgcagtatttcatattattcttttgtcaatatgatcaatttgtatttgtgcgtgttatataccctctcttttttggaatattttgtaccagcatctgcagtaccagaatcgctcaaaatttcaacacttcgaccgaccttcattcttgc

SEQ ID NO: 2170 - DNA, 3251 bp, Zea mays
atggcgccgccgcccgcgtcgcctgctgactcggcccctgatccaaggccgaccgccagcgcgcccgtgcccatcaccgtgccgagcccgcgtgaccacgcgcaccaccaccacctggtagatcgtcgggacacgccgcggggccgcgcgtgggaaccggagcggaaccggcgcggagaggcgatggacggtgctgcagcggtcaagctggtacccggtgaggccgggtacgtcttagaagacgtgccgcacgtgtcggactacctccccgatctcccgacctactcaaatccattacaagataacccggcatactctgttgtgaagcagtactttgtaaacccagatgacaccgtctgccagaagattgttgttcacaaggatgggcccagaggtaaccatttccgtcgtgctggacctcgccaaaaggtatattttgaaccggatgaggtccacgcatgcattgtcacttgtggaggattgtgccctggacttaatactgtgattagggaaattgtatgtggcttatctgacatgtatggtgtcaccaagatacttgggattcagggtgggtacagaggcttctatgctcgcaataccatcaccttgactccaaagagtgtaaatgacattcacaaaaggggtggaactattcttggatcatctcgaggaggtcatgacaccgtgaagatagttgacagcatccaagatcgtgacataaatcaggtctatgtaattggtggagatggtactcaaaggggtgctggagtgattttcgaagaagttagaagacgcggtctcaaagtttctgttgctggcattccaaagactattgacaatgacatccctgtaattgacaagtcatttggtttcgacacagcagtcgaggaggctcaacgtgcaataaatgctgctcatgtggaggctgtaagtgctgagaatggtataggtcttgtcaagctaatgggtcggcacagtggttttattgcacattatgctactctggctagcagggacgtggattgttgcttgatcccagaatcaccgttctatttggaaggcgaaggcggactttttagatacatagaaaaacgtttgaaggacaatggtcatatggttatcgttgttgctgagggtgctggacagaaacttattgctgaaaccatgcagtcaattgggaaagatgcttcaggcaacgagctgcttcttgatgttggcctttggttatctcagaagataaatgaacatttcaagaaaaacaagatgaccattaatctgaagtacatagatccaacgtacatgatacgtgccatcccaagcaatgcttctgataacgtctattgcacactgctggctcacagcgtggtccatggagccatggctggatatactggttttaccattggccaagtgaatggtcggcactgctacatcccattctatagcacgctgggttgcgcgcgtggcgtggcccgtgacgactcaaaaaggcccatgtggaaacagaaagttccgtcagcggtgaccggtgagcagtcgcgttttagcgggacgtttgtcccacctcggaagcggaagacggggaggcagggggaggcgggcataagaaacggcggtgggctacctgctgaagacatctttgcgcttggggcaatgacgcagcttatgaggtcataccgaggcgcgtcaattgctggttgaaaactatttccaaaccccctctttggcccactgggccactgagaatttctggaagggctccttttcctcggagaagcaatcttgagtcctggcctgggtcttcgctgccagcacgcttgtggccaagaaacgttgggggcagtttggacctcggagcagcagcatccatggcgggagaggaggccgggaggaggggcgttccctctctgctgaacccgccgtccgcttccagcgaggggcagcaggagcacatcgcctctgatgtcacacagctcatcggatggacacctctggtcgagctcaagcgaatcgccgccaaggaaggggtatgcgcgcgcatcgtcggcaaggtggaggcgtaccagcctctgtgctccgtcaaggatcgcagcgctctgagaatgatcgaagacgcagaggagagggggctgatctcgcccggcaccacgacgctcgtggagccgacgagcggcaacctggggctgggcctggtcctcgtcgccctccgcaagggctacaggttcgtcgcggtcatgccaggccagtactcgctcgacaagcagatcctgctgacatacatgggcgcagagctgtacgtaacagatccatccctggggttcccgggcataaccgccaaggtcgaggagctcaagaaggagctgcccaacgtgcacgtcctcgaccagttctccaacagagcgaatcctgaagcgcatgttagatggactgggcctgagatctggaaggacaccgccggtaaggtggacatattcgtggccggttcaggctcgggaggcacggtgtctggcgtcggcaagtacctcaagacgcagaaccccagcgtcaaggtcatctgcgttgagcctgccgagagcccagttgtttcaggcggggaaccaggcagccacaagatccagggaatagggccgggattcataccggaagtgctggacacctcggtcatcgacgaggccgtcacggtgaccaccgaggaggcgatggcgggcgcccggaggctggccagggaggagggcctgctcgtcggcatctcttccggggccaacctggcggcctgcttgaaggtcgcggcgcgagaagagagcaaggggaagatgattgtcaccgtgtttccgagcgggggcgagaggtacatgacctccgacctgttcgccgccgccagagaggagtgtattgccatgacgttttgatctttttttaccccctccccccagaaaaaaggggaaaacaaatacgcgtgtatctttatcttcacatggtattggtttaccatgcatgtacatttaaaaatatttttccccgaaacggaatagaacagctgcgtgcttgtttacacatcaagtcgatctctcctgaaccgatggtgaaaacagtggcggagcccggatccggaaaagttctaactactacaacaaaaaaaccggtagtatattatcaccgaggtctaatctaatttaggaaccccattttcttaaggtatctccatttttctaagagaaattagctaattttttccttagaaaaaataagaa

SEQ ID NO: 2171 - DNA, 534 bp, Zea mays
atgctagcgacgcagggagtggtggccggcatggaggggagcaaggacgagatggaggtcgaagatggcagcttgacgatgacggcgcagcccgtcgagccctgtccgatggagatcaacagggcacagccctggcgcctgcatcgggtcacgacatggggaagggctagagctggactgagtgtggttgggaaggagatggggaaaaaaacaggggcgtcggcgctaggggctggacgccgagcagagggacaacggcgcgcggtgctgggcgagcccaccacggcgcagcggatcggaggcagaggatgcagccatgcgcagggaggagcagaggatgggcgagctcggaccttcctggtggccggcgagctgaagaagatgaagctagggcggtacatggagtccagggcgagcacgtctggggtgctcggcatggaggcaaaggaagggcggtcggcattggggaggcagaagatggcggcaggtgggaatcacctgagggagggggcggcgtggaaggatctagggtga

SEQ ID NO: 2172 - DNA, 3245 bp, Zea mays
tactacagtttcgtgttactctgctgctgtcagtactctctagaaatatcgtccgtcctgtgtattatgcatgctagtgggaaagttggcgaatctgcaattctcgaatatcaattacagtagagcccagaggggaagatattgggagaagcgagacattgaattttatattaatcaaatagacgagtattcagcttggggatcccccaacccccacccgggtaggactcacagtcacagtgaggaaggtgataaataatggcagaacgagtcgtcctcgtcgctccagtacttggctagtcgcacagagcactccatcagctgctgagacctgagagagaggtgtccgacccgggattcccttgccatgccattcccatgtgattgatgctccgacctcccatctgcgtgcgtacgagtattattagcagcatcagtgcgtagcaattaagagcgagcgagatcagcgctacccgttgcaggtcgccacctccctcccttcttccacctcggctccgcttcttgggtcttgcttgctcggcctgaccaaccaagaacgaggagaagggatggggatggggtggcggagggcgctgtgcacgtccgtccagcgggacgacgaccccgaccgcgacgccagtaccaagaagcgccggccgcagtacgacgcgccgagcccgcgcggcaccgccgccggtttcttctccgccgtcaagagcgcggccgccggtggcggtgcggctagcggcagtggcagcaacccgtccacgccggccctccgctgccgcaccaggccgctgcagcagccggctgactccgcccccgtgacgccgccctccgcgccggctcccgccaggaaccaccgggtgccgctgatgcaggcgctgtcggcgccggtctcgcctagatccccctccagattcgcgctgctcaaggcgtcgctcctcccgtccaagtcccggtgcggcgtgtgctcgcgtggcgtcaagagcggcggcagctcggcggtgttcacggccgagtgctcccacgccttccacttcccctgcatcgcagcccacgcgcgctcctcctccgccaacggcgttctgtcctgccccgtctgcgcctcgccgtggcgccaggcgcccttcctcgcctccctccgcctccactgctccttccacgacgacaagcaccgaggaggaggcgacggccgcaagacgccgccgcccgccaagctatacgacgacgacgagccgctgctggcgcccaaggccgcggccaacggtggcggcttcaacccgatcccggaggccgacgaggacgacgaggaggagcagggcgccgccgagttcaggggcttcttcccatgccccaggagtaggaccacctcgggcctggccatcaccgtggcgcccgaggccgcgctcgtgtcgtcgggccgccgccacggcaagtacgtggtggccgtcaaggtcaaggcgcccgggctgcgctcgtcggcggcggccccgcggcgcgcgccaatcgacctggtcaccgtgctggacgtcagccagggcatgatgggcgagaagctgcagatgctgaagcgagggatgcgcctcgtcgtggcctccctcggccccgccgaccgcctctccatcgtcgcgttctccggcgccgccaagcgcctgctgccgctgcgcaggatgaccaggacggggcagcggtccgcgcggcagatcgtcgaccgtcttgtcgtctgcgcggctgccgcaaccacggccacggcaacgcaggggcagcagagtgcgtgcatgggcgacgcgctgcgcaaggccaccaaggtgcttgaggaccggcgggaccgcaacccggtggccaccgtcatgctgctctccgacacccagcagcagcagcagcagtcggcagcgccggaaaactcgtcaaggaagcagtttgggcggccagcggtggccccagcaacgcgcttcacccatgtggagatccccatcggccccggtgacccgcctcctcttgtgtccgagtgcgaggaggagcctcccgtggagcacgcgttcgccaagtgccttggcgggctggtgagcgtggtaatgcaagaggtgcatctggagctggcgttcccgacaggggagatcacggcggtgtactcgtgcgggcccgggcagcaggccgtggcaatctccggtggtgcgggggtgagcgtgcggctgggcgagatgtacgcggaggaggagcgcgagctgctggtagaggtgcgggcaccgctgggcagccacccgcactcgttgtcggtgcggtgcacgtaccgcgacccggcgtcgcaagagacggtgcgcggcgcggtgcagcctctgctgctgcccgcgctccatggcgagcgggcgctgtcgtcgtctcggcggctgcacgacctgttcgtggcgacacgcgccgtggcggagtcgcggcggctggcggagctgcaggacctggggacggcgatccacctgctgtcgtcggcgcgggcgctggtgctgcagtcgccagtgacgccgcagcagcatgagctggtgggcagcctggacacggagctgagcgacatgcggtggcgtcgtggcaacagccagcatcagcatgaggaggtagtgacgccgacgtcgaggagcggcaggaggaggggagacggggacacgacggtgaccgtggggaccccgcgcgggtcagccggggcaggggaggcgctgacgccgacgtcggcgtggcgcgcggcggagcagctggccaaggtggccatcatgcgcaagtctatgaaccgggtcagcgacctgcatggcttcgagaacgcgcgcttctgaagctctcgacttcgagaacgcgcgcttctgaagctagccgtcgtcgacctcgtgtctgtctgtaattgagtcgtgttctattttggccttcttctttttttcccgttttctttcgccagtgaaacgagatgagtacccaaagaggaggaagaagatagcccccgccccgtgccgcgaacggcggctagccggagctgttgttgttgttatatgtggattatgaattatgaggacgattaatgaacccggataggatgaattggtttgcgcatttacatgttgcagcatcacttggctgaatcaatgacaagggacagtgcatgattcattcatcacttgttttggtcctctgattcttccgattccgatcgctagctgtaaaaagctctagctgagctgatcggggcctgggcagggcagctg

SEQ ID NO: 2173 - DNA, 802 bp, Zea mays
gtacaaaccacatctcatatcctaaccgggctcactaatccttaccaatcctttcacccaaatcatacataagatagatgttcaatatgtctagggacccattggtcgtcggcaatgttgtgggagatattgtggatcccttcatcacaacggcgtcactgagagtgttctacaacaataaggagatgacaaatggttctgatcttaagccatctcaagtgatgaatgaaccaagggtccacgtcggtgggcgtgacatgaggactctttacacacttgtcatggtggacccagatgcaccaagccccagtaaccctacaaaaagagagaaccttcactggttggtgacagacattccagagacaactgatgccagtttcgggaacgaaatagttccgtacgagagcccacgtccaatcgccggaatccatcgcttcgcattcgtcctgttcaggcagtcagtgaggcagaccacctatgcgccgggatggagatcaaacttcaacactagagacttcgcagccatctacggccttggctcccctgtcgctgcagtgtacttcaactgccagagagagaacggatgtggtggaagaaggtacataaggtgatatatcaaccaagctatgtgtgcttctctctctcaagggagagaagcataacaacaaattggagtgaaaaaaatatatatcatgtgtgtggtgaacattgcaagtacgatgttcacaatcataagagccattattggatcacatattattctaatgtaatgtggctggggcgttctattggaaaaatagcc

SEQ ID NO: 2174 - DNA, 1311 bp, Zea mays
gtacgtctcctggactacagcacggtgagctcctctcaacacgcgcacgcttatctcctggccgcgccgctctgcgcctgggatatttctgtcgcccagcactccgttcctgctcccgcgccgccgctcctgcccttttccatggacgtctcccagctcgccagcgcctagtgctcctccatggccgctgctccttccctggtcgcggccgccgtcgagtcgtcggattcgttcctcccctgctcaccccatggccgacgtctcctctaccagtgctccttccagcgctcggcctccagctcctacgcgcgctccgtcttcccctgccgcgaccccgtggaactcccagctcgtgctcacaatccccatcacctatgcgtccactctagcatctccctcatgcgtcctctgcgcgagcgaatctgccttggtccgaccagcgatacctccgccggctccctgatgctcacgcgcgtcagctgcttctccgcctattgcacttgattcctgtaggtctcgccctccgagttcctttcggtcaccagacatgcatcgctgctgacctccctcatctgatcgggccctacatcagtagcgtgtcttctcgtcaagctcgtggccacggctccctgatgcctcgtcatccctgttctccctcacatctgagctcgcctctgcgtgttcgtatggcgccacagcggtctcataccagcaaccactgctgatgtccgtggttaggacagcaggtgcgctagttgagcgcttgatgcgaaggaccagtgctgagtcgaccacaagatgctgttaatcgtgggcttcttcgcaaggcgatgcggacgaacgaacttaaggatggatgacccgaacaagtgccagaccaaaagctgatcgccaagtggacgtcgtctaacaaacactaacctagtgttattccaggcaagccccggtgcatttgccacctccttgttgttttaaaacttttatcacttatatgctgcattaggtgataggagttgagtgatgaaacagttgatgcattaccattccttggaatttgattatcctccttgatacctgttttacaaaaagaactaatgaggcttagccctgcctaaagaactaaaacttgattctttttaaaagaatgttgtgtaacactggtatgggtttgttttatgaaaaaggacttgtaatggtgagtgcatcatctgcagtgatgaattcatcattcaagtaaggtacctctgtcaggtacatggtttgggtgttaaataataagatgagaccagacgttgagcaggaaaggtcgcc

SEQ ID NO: 2175 - DNA, 1477 bp, Zea mays
ccgtgacaccctgctccatttgaactaccgcgtcaccgaactcatcaccaccgacgtgtcaccaaactcatcgccgccgacgccggatacagctccgacagctccatccatggaggcagcagatctgtgctgtcctactcctactgcgaggtcgccaacgagaccctcactcccgacgcccagcagctggagccaactcaagcagcccatcggcatgtacaacacgacatgcaaggaagtcattgacgccaagcaacagaccaaggggatgtagtcgatgaagctggaggaggccaagcacaccggggaggctgctcgggcactggccgagacggacaaggccaagtgttgcgcgaccatggaggcagccgcggcgctgcagaagctggccgaccttgaggcgcagcggtgccgcaacgccgagttggcggtgcacgcagagggaggaggaggttctcgtcaccacgccaaccaagtgttcgagaatggacctcaaccgcggcgccaaggtgttggaggagctgcagcagatggagatgcgtctcaccggcgtcatcgaaggccaatgtggcctcctcaagcgcaacatcgacggccgctgcatcgccctcggcaagcacctcgaacagtggtacgaccacgacgaaccggtcttcgatgcatggcctatcttcgacgaggaacctgtcgacagtgccaccgctctcttgttcgacggtgctgaccactgcttcggcgaggagctcgacaccgaccaggcacggagttccactattgcgacaacaaccacgtcagagttgacgtcgacatcctccccacctccgagttcgacatcgagcagccgttcttccgcacctcctgcgtcgaggatgcgtatgcgcagccccaccaccaatttctcactaacgggctcatgccccagcactcgatggctccaccatggtgctatcgagcggcgacgtcgactaccacgccatcggctgcgtcgattactccaccaactccggggtgtgatccgtcggctgctaactgtgcagcagctacctcaaacataaaggagaaggtgcttgccaacacgcccaccaactgttcgatgttggtcctcaaccgtggcgcctaactccgtccccaaccctcctcaagctttgccggttggattcgcccgctccaccccgtctgctccggctccggtccctggcgccgccgcgagttcagccctcctgaaccgggcaccgttgcctcaccacgatgtttggtatctgcatgctgtgtaccaaaatggtaggagcgagcgttgaagcagcactggttgtactggactgcaagcactgggtgaaatggtggggcctcggtaacgagtttgatgaccagaggttgaagttggagttgtacacatatatcatggtcatggcgctctgctgggacttgtttggcgccggaacagagaccacatcggtcacaactgaatgggccccgt

SEQ ID NO: 2176 - DNA, 1040 bp, Zea mays
acactccacagacgcccagactacaccgctcttctcccgattcccgaactccacgccacagatctctcgcttttctctcttcttttctctccgtactcttacccccgcaggtcgcagctatggcggaggacgcccccaacgcagccgccgagggcggccagcccgctcctcccgagggatctgccgatgccgccccgtcggctactgcgggcgccaaggccgcggaggcgctgctcccgtcgctcagcatctggccgccgtcgcagcgcacgcgcgacgccgtggtgcgccgcctcgtgcagacgctcgcggcgcccagcgtcctctcccagcgctacggcgccgtcccggagtccgaggccgagcgcgccgccgcggccgtcgaggccgaggctttcgcggccgcctccaagtccgccgccgccgagtccccggcctctatcgaggaggggattgaggtgctccaggcgtactccaaggaggtcagccgccgcctcctcgagcttgccaagacccggtccgccgctgcgacggtgcccgccgaggggagcgcgcaggaggccgaggactcgtcggcgacttctccagccgccgaggaggctgccgtaaaagaggagtaaggcttcggcccgtgctttgatccaccgacagttgttgttattttggcatttcgtcggaatgttattcatcgtcccccctgatgtttgttccacgaacatatagtattaagttatatatcaaccgcgcgtcctttgcattgcatatgtgaaggttgctcgtgtacgttttcactagataatttcttctggttttctggtttgcgaagtgtttaatactcagagagttcattcatcgttagggcttaccacatcatggtctaggcagtagtatcttgagctgcgttacttgttgggcttcggaggttatacttttcttgatgaatgaataacccatgtatgttgaactttatacgtgcatcgattctgcatctgcgcagttccagaggatattttgaaatacgttaaatcatttgtagtaaa

SEQ ID NO: 2177 - DNA, 1355 bp, Zea mays
atggcaaaagcggctgaggtcggcaactccatcggcaggcgcgagatattggcgcggctcaatcagcagcttcccccaatcgggaagcctttcctccgctccgcttcctacctcaaggaggccctcctcctcgcgctcaccgacagccaccaaggctccactcacctatcctcccctctcgacgtcaccctcaagctcggtgcatacaagtccttctccgacctctcgcatgtgctccagttcgccaatttcacggccactcaggcgctcctcgacgagatcgcctcaacaacttcatcttgtatccacattattgatttcaaccttggtgttggcggccagtgggcttccttcttgcaggagcttgcacaccgccgtggaaccgggaacgcccccctgccaatgttgaagctcacagccttcgtatcaagtgcttcccaccatccccttgagctgcatcttactcgggagaacctcacgcaatttgctgtggaccttggcattccatttgagttcactgacatcaatcttgatgtgtttgatcccgcagaactcattgctcctagccccaatgagcacttcatgaactgcttccagccttgtatgttccttctcgactcacttgatgctgctggcaccaacgtggatgttgccagtaagattgagaggtttctgatccaaccgagagtagaggatgcagtacttggccggcagaaagctgaaaaagcaatggcttggcgggcagtgtttacatcggccgggtttgctccggtaccgctcagcaacctcgcagaagcacaagctgactacctgttgaagcgcgtgcaggtccgaggattccatgtggagaagtgtggaatgggtttagcactctactggcagagcgccttgcctccacatcaagaaattggaatgctttcactttcacctaccatgactgaggtatatttgttactgggagctagggcttattggttgctccaccgaggtcatgcaatggccctactgggagctcggcgagatggacgacacactcacctacagaggggagctagggtgtgtcgtgcatgcctgcgagctgtagagaagagggggcagtctggaaccgaaccctcagcaaggtattacatcgactcgctccccccacgccaacgtcctccagattttgcagctcctactggagaatggcattagagtaaatgaactaacaaggacaaaggctgctctcatcctcccatcagtgtttgatgatccagacgaggtagataaagagaaagaagttgagtatgaagaaatcgaggaggaggttgagtatgaagagatagaggaggattaagaaattgatggtgtgtgtg

SEQ ID NO: 2178 - DNA, 933 bp, Zea mays
atgtaccaggatgagcagcacactgaggagcagcacattgaggaggagcagcacaatgaggctgagcagcacaatgaggaggtggagcacaatgaggaggtggagcacgtgacatgggaccaggccgcacagcatcaccagccatgggaccagtgggaccaccagagagagcagcaacaggcgtgggaccagtggggccaacagggtgaaccggctgacaacccgatggatgatggctcgggaggctcttcagcgacacgcacacgtcgctcaagaaaaagccactcagtaaagcctcgtcacgcgatagagcgagaggctgataggactttaatcatgccacatggagatcggaattgggaggacctgtcctttgacggcaagggacaccacactcaggttaaccttacgttgggttctctttgtcgccttcactaccctggtatagtgaaggtgtcaaacggtgataccgaggatgaggtgctcgtcagtacctgggacgagtacaagtttaaaaaggaacgaaaccacaccgacagacagggacttgtgcgtaatgacttttggcttcgatatcggttgcctgacggagaggattacatggggcacgctgaacgtgtcttccaaaacaatgcaaagaagctggtgaaggatgccatatactatgcgagaattcaggctacaaacctgtattttcaaaagcatccagaagaagcaggccccttgaataaaaaggaagggtcctcaaagatatatttgactgaggatcaatatcgtgaggtgatggttccatggatggcgcccgtgcctgatgcgtactatgcttggtgtcgatattgggcttccgaaggcttccagaaagcgtcagcgcatcacagacaatgtcgaggaaccaatcctaaccacaagtttggcggtgacgacatgatatga

SEQ ID NO: 2179 - DNA, 1204 bp, Zea mays
atcgtaggcttctgtacgttcctagccatctcagctcgatcttcaagaaagaagaagcaaatagagcacacagtcgagtgtaaaccatccaaccaatcatggcttcgagttccaggagcaccgtgttttcacttctcctcctggtggcgctgctgctcagctgcagcggcatgagcagcgcggcgcggttgctggaagaggcgccgcccaaggaggagcacccacatcctgccgtgccggagctgccagaacctgagctgccgccgcaccctaccgacgtcgtgccgcctgagctgcccaaacccgagttgccaccgcacccggccgttgtccccgagctgccgaagcctgaggtgcctcatccggtgccggagcagccgaagcccgagctgacaccgcacccggcggccgtgccagagctcccgaaaccggaggtgccgcacccgacagccgtccctgagctcccgaaaccagaggtgccgcacccagtgccggagctgcccaagcccgaggtgccaccgcacccgacagccgtccctgagctcccgaaacctgaggtgccgtacccagtgccggagctgcccaagcccgagctgacaccgcacccggcggccgtgcccgagctgccgaagtctgaggtgccgcacccagtgccggagctgcccaagcccgaggtgccaccgcagccgacagccgtcccggagctcccgaaacctgaggtgccgcacccagtgccggagctgcccaagcccgaactgcctcctcacccggccgtcccagagcttccaaagcctgaggtgcctcaccaagtcgcgccagagctgccaaagcctgaactccctcctcacccgaccgtgccaaagctgccgcacccagaggttccggaggtgccaaaccacgagctgccgcctctaccgaaagctgagctgccaccgaagccggagggccactacccggagccggaggcgaaaccatgagcggacgtacagtccgagactcggttatctgcacattttccctcatgcacacgtacgtgtctgttgtatagtagctatatatgatttgtgatgttgtgttcttccgtacgagtcatagagcttacatgtgatataagctagtagtacctatcaatttggatccatatgttatatgtatatctgaatgaataaagaattctagttgttatatttaaactgttgggagt

SEQ ID NO: 2180 - DNA, 5600 bp, Zea mays
ttatctcaccgctatttttgactttgttctttctgtcgttatcacatcacaaccttaccggtcacgagtcacgaaccgaagccccaaacgagatgcgctgccccccgaaggaaaaccaccaaccgtttgccctacccgtgcggcccggcgccgctgcgctctcccgaaagagaggtgccgaagcgcagtagattccccttcctctccatcgacccctctcctcaccatccttgcttcccacctgtccgtctccttcctcgctccgcgcctcgccgcctcctctccccgcctccgcggagagggagagagcacgtcctgcccacgagtgcccccgccccgtgaggaaaccctcgcccgccccttccgttcgcccgtcctgccactggtctccctgaacccccccgccgccgccgccgccgccgccgttcggtttccgtgtggcgtcacttctgagggattttctgggtctgacaaggatcagcgctggagtggcctcgccgctgccctccgttacatggaggagttcctgctcaccctgaacccgttccggttcaagccgctctggccgacgacgactgcccccaaatccttctgaggccctaggaaatcctactcccgcccggcttcatagaatccccgggccgcccccccttccccgactcccttttgtcctcagatagtcatccgggttttccgagaggcacccctcctcccctgcgaatcgagagcccctagggccgtaagcccgtaaccataagtcctcctccactttccgaggccccgccgcccgcgccccggacctgctgtgagcgtccttccttggtggcgttaagcgttgcggacggggatggcgagggaggaggacggcccgcagttcgtgcggtggagggaggagttcgtgtctcaggagcgcggcagccgcgtcgtgcactactacctcgaagacgcggccggcgtgtcacatctcgccgtcatcggcaccgagaggagcctgcgccatatgctctacgtggtctcggaggacttcaacgccgcgtgggggtgcggcggcagcgctgacggtggcggcgcgccgccagtgtttgcgcgcaagtggcggtcacgccgggaggtggtggattggctcgggtccttcctcccggtgaaggcacttgactcaaaattctcaaaatatggatcttttgcggataatgacattgggtcagatggatacggggaaacaaatggttttttgcaccaaaatctgggtaaagactgcagctcagacattacatggtctggttcgttctggacatgtagcaagcagcttcggcactatcaagctttttgtcgcaatggaaccacaatatctacccacacttttgtgctggtcttgtcagaggaacaaaaccgctatcttgcatacttggaagacatgtatgaagataagaagggacagaagaagatcaaagtgcgatggtttcatcaaaaccaggaaattgcttgtgctatacctcctccgcctcatccttgcgaagttttcatcactcctttcacacaagtaatcagtgtggaatgtgttgatgatattgcaactgttttaactcgtgatcattatgaaaaatgctcccatgcaatgtcaattatgactgggatccgtttctgctctcgccagtatagtaaaaataagttcaagtattttgatttaagaacgttgcgtggatattttagtcaagcagttgttaggtccatgaaatttccagctgagtcagaaaaggacagtgaatattgtacacctgggaaagctaaatttccaaagcaattagagaggctttattcaaaatgtttgggcactaaaatttgtcgaagcccccaggcagactccataccatcttatcaaatattaagtaacgagcagcctcctgggaagcatctctcaatcaagtttatagtgccccagaatcaactaaagccgacatataatactggtgacagattagagatcttatctcaagacagtggcattattggttgctggttcaggtgcactgttctgaagtcatgcactaatcataacagattgaaggttcagtatgatgatctccaaaatgctgatgatagtgggagattggaggagatggtacctgcctctgcattggctcttcctgataaactgggactgagacaccaagaccggctaagaatcaggccacgtcctcaagaaaatagttttgttgatggggctgctcttttacctggaactgctgttgatgtctggcaatttagtggttggtgggaaggagttgttgtcagtttggacaacattgtggcagatagccttcaagtatattttccaggagagaactttttccgtgcgtgccagctaaggaacattagaatctctaaagattgggtcaagaaccgatgggttgatattgaaacaaagtcagatgtgttgtcacagataccttcagatagtatccaagcaaagcaaactgataatcatgcactgtctgttggtgtgacgggctccagcagttctgcaatgcctgagcaagagattgcagctacccaagcaaactccaatggagatgcagcggtgcctaagcaagagcttacagttgcccaagcaaactccaatggagatcaacctgtgcctaagcaagagcttgcagctacccaagcaaactccaatggagataaatctgtgcctgaccaagagcttgcagctatccaagcaaactccagtggagataaacctgtgcctaagcaagagcttgcagctacccgagcaaactccaatggagataaacctgtgcctgaccaagagcttgcagctatccaagcaaactccagtggagataaaccagtgcctgaacaagagcttccagctacccaagcaaactccaatggagataaaccagtgcctgagcaagagcttccagctacccaagcaaactccgatggagataaaccagtgcctgagcaagagcttccagctacccaagcaaactccagtggagataaaccagtacctaagatagagcttgcagctacccaagcaaattctaatggagataaacctgtgcctgagtttacagctacccaagcaacctccaatggaaataacagacaaatagaagcaagcaagcaatccgaagttagtatgacagatgaagcctctcctttggcggaggatgacaagcgaacaattctagggaagcgtcccagggatgttagtatgactgatgaagggtcagctttggtggaggatggcaagcgaacaattatagggaagcatcccagggatgaaggtaatgctgaacagagatgcaacggggaagtaggtgtagtcgttagcaagacatgatgtttgggacgcccaaactcattagactcgtgtacatagctatagatatggtgattgaaacctccaatggcgcggggttttttgctacgctgctcgtatcaagagcgtattgccgcttctttggcatacctctcctagtcttcttattttgctggtagtttgtgtttatgttaagggacacatggattgcaagctgaatggtacccttcccagttcccggacacgttgtgctgcaatccgagtatatgattttttttatctgccggtgttttctgctttgggtatagttcaatccgcctcagtcagttaaactcattcatccttttccagaacgaaatcatcgcccttgctcggcttgtattgcaatttatgtgggtgtatctactatctacacttgcgcggtatggtgtgtctacattttggtgcagtcgatcatgatgatccgttatgatcgctatgatgatcccttgaactgcagctgcgcatgttgatctgaaagtgttgcagaatgagagcattttttcactcccaaagccatgcgccatctatttgtggcatttggcatactggatctgaacttgcccgtgctagaaatcaggaaagccatgcagtgatctcatcattttgattttctggtatgttgggcgggcctgaggtggaggccccatgacccatctgcatgaggcgtacgtgtcacgtatcggactttggcctcccctgttttccttcacatacatgcatgcaaactactatgtatcttgccatgaatgatggacatggccatctcagtatctcactacacatatgggtatcaggtttgtacatggtactagtagtatatggtacagcgtacatgtctacagtctgactagctgcttgcttgtcacgctatatgcaccgaagaagaccagagaagtcgcatgacctacacacagctcggacggagggaccatagctcgccgtcgacgaagctcagctcggcagccgggaggacggatcggatctacagcctgagccactgctcgccgttgatgaagctcgggccgaggaacggccgcgcctcgtcgtaggtgagcgagcgggaccaaggcacccggttcctcgtgctcgcccctgggcccttgcagctgtactccccgaacagcaccgtcctgtcaaaaaaaaaccctgaaatgtcactctctgacgggtaacaaacaggcgagtcacatgtggtaactaactgcctgcgttgcatttccctgtaaagaccgtttggtgagcctgtcctgctaggcaaccgcctacctacttcctacaatctgaatcatctgatgatcgtcgtcatcgtcagcacaaagggttaacacagtaaaagccagttcagtaactgcaattgcatctacagctacagctacagatacagtagcaggtaagaagcaaagcgttgctcactttgttctagactggtcgccccagtcgctccatccctggggcacgacgatgccgccgaggtcgcagtaggagtagaccacccgggcgtagcggccccacgccctgcccaggtacagcatgccggagccggtgagcctgcaccccacgaacgagaacccggagtcctcctccgccgagctccgctgcgacgccgcgatcgcgccgtagctggtcgccaccgcgtgcagcgtgcacccctgcgcgcgcgcgcggtcaccgttagttgcaacgttcgtcagaagccagaaccaacgaggggcacagcggcgcggcggcagtcgccgtcgaatcggcgacgatccatccatcgccctcgttgccacggaacggaagtttgcttcgggtcgagtagtacgtgttacagttgtgtgcaagggcggcacgaaagggatgtgaccactggatatgatagggtttcgagcatgcatgcatggatttgtgtaggagtgttttgaagcgtcgtgcaggggctaactggctaagtgcataacggcctggttccactgagcgagctggctggctaggtaacctaggtgctagcatgtgtgcgctagacacagagaaagtgagagatgaaaagctgttatgagcatttcttgctgcaagacggctatgaaatggcaggcacggacacggttggcgggtgcctgaattgtgatttttctgatagcaacccggcagcacccatcaaagggatgggagttgggatggaagcagctgcaaggcatggagatgggaagctaatgacctcaccataaaaccagcagtgtggtcaaaa

SEQ ID NO: 2181 - DNA, 1578 bp, Zea mays
actgaccacctccctccccggccggccatctctcccgagctaaactgtggcaggcagctagctgttacgagctagctccgcgcgcgctaggcggcgtcacgtacgtgctgtgatcaactgtctagttctccactcgacgcggacaccctgacccgcgcgcgcgccgtggccatggtcgccgccgccgggcgcaggcggcgccgctgcgcggccgccatcctcctggtcctgcccgtcgtcgccgtcctcgcgtcgtcgtccgcggcggcggacgggtcgttcataacgtgggacgacctcagcacgccgtccgccgccgccgtgcagggcggcgtgaaggcggccagcgggggaggcgcccgcgagctggacacgatcgtggtggcgcaggacgggacggggcactcgcgcaccgtgcagggcgccgtcgacatggtgcccgccggaaacagccgccgcgtcaagatcctcgtcaggcccggcgtgtacagggagaaggtgacggtgccgatcacgaagccgttcgtgtcgctcataggcatgggcagcggccgcacggtgatcacgtggaacgccagggcgtcggacatggaccgctccggccaccaggtcggcaccttctactccgcctccgtcgccgtcgaggccgactacttctgcgccagccacatcaccttcgagaactccgcgccggcggcgccgccgggggccgtggggcagcaggcggtggcactgcggctgtccggcgacaagaccatgctgtacaggtgtaggatcctggggacgcaggacacgctgttcgacaacatcggccgccacttcctctacaactgcgacatccagggctccatcgacttcattttcgggaacgcgaggtccctgtaccaggggtgcacgctgcacgcggtggcgaccagctacggcgcgatcgcggcgtcgcagcggagctcggcggaggaggactccgggttctcgttcgtggggtgcaggctcaccggctccggcatgctgtacctgggcagggcgtggggccgctacgcccgggtggtctactcctactgcgacctcggcggcatcgtcgtgccccagggatggagcgactggggcgaccagtctagaacaaagacggtgctgttcggggagtacagctgcaagggcccaggggcgagcacgaggaaccgggtgccttggtcccgctcgctcacctacgacgaggcgcggccgttcctcggcccgagcttcatcaacggcgagcagtggctcaggctgtagatccgatccgtcctcccggctgccgagctgagcttcgtcgacggcgagctatggtccctccgtccgagctgtgtgtaggtcatgcgacttctctggtcttcttcggtgcatatagcgtgacaagcaagcagctagtcagactgtagacatgtacgctgtaccatatactactagtaccatgtacaaacctgatacccatatgtgtagtgagatactgagatggccatgtccatcattcatggcaagatacatagtagtttgcatgcatgtatgtgaaggaaaacaggggaggccaaagtccgatac

SEQ ID NO: 2182 - DNA, 1233 bp, Zea mays
atctttaaccctcccagcttcgtcagttactcaggtctcaggtcactgtctttctcactgaaaccaccaagccctctacatctttaaccctccccgtcgtcacgctgacctaaccatgatttgcctcaaagccatctcatcccctctccacctcccgaccttccgccgcctcacccccacctcctccctccgcgccgccgccgccatgtcctcctcctcgtccgcggtcgccgccccgatcgagcacttcgtgctcttcaaggcccgcccggaggcggtggcctcgggcgccgcggcggcgatggtctcctcgctgcaggcgctggccacgctcgtcccgggcctggcctacatccacgcaggaccggtgctccgcctccgatccccggccgcggaggcgctgggccccacgcacctcctccacacccgctacgccaccaaggaggacctggcgtcctacgcggcgcacccggcgcacgtggccgccgtgcaggggcacgtcctccccaacgcgctcgacatcaccgccgtcgactgggtcaacgccgcgccgctcccgtcccccgtggcccccggcagcgccgtgcgcctcacgctggcgaaggtgaaggaaggggtggaggtcgcgcagctcgtggagaaggtggccgcggcgacccaggccgccggggacgccaaggtgagcttcggggagaacttttccccggcgcgggccaaggggtaccagttcgggatggtggcggtgttcgacagcgtggaggagctggacgccgtggaaggggacggcaaggtggaggaggccaaggccttggtcaggccgctgctggacgaggtgatggtcctggacttcgtcgtcggagatgctccaacgcccgcgagcctctgattacaggctgcagggtctcactttcgggattctgagtgtgttgttgatgtcggaataatggatagatggactccctggtcctggtcctgcagcttttcaacttgtgatttgtgaaattgggaatgacagtgcaatgaataagaattgcttccctcgattaaggatctgttcggcacatctccgtctctttaatcttaggttagcctagtcaagacgcatggcacattcgtcaatctttcacttgactagcacaagtgcactcatccaactataaacgatgttctgccatgccatttcatttgattgtatttgtatatatggttacgtgaaaattaaacaaccattgt

SEQ ID NO: 2183 - DNA, 2936 bp, Zea mays
cttccattgtataatcctcttccctcctccacccacttcacctggcacactagtggccactgcactggtagtagtagcccagtactggcaccgctctagcccagatcaaagctcgggagaagagggagaggaggtagtgcaacataaatcccgagtcccaccaaatcgcaagtcctagcagcttccggtctgcaactgcaacgccgcgggcttgagtgcgagagtgcgcgtgggggatgaggcgggtggcaccggcgatgaccgccgccagcagcgctgctggcggcgaggagacggcggtggtggagaagacgctgctcaacggggacgtctaccgcggcggctcgccgcacgggaagggcaggtacgtgtgggccgacggctgcatgtacgaggggaactggcggcggggcaaggcgtccgggaagggccgcttctcgtggccgtcgggcgccacgttcgaggggcagttccgcaggggccgcatcgacgggcagggcgtgttcgtcggcccagacggcgccacctaccgcggcgcgtgggtggcggaccgtcgccacggcctgggcaacaagacctacgccaacggggactgctacgagggccagtggcgccgcaacctccaggacggccacggccggtacgtctgggccaacggcaaccagtacatcggggagtggcgcgccggggtgctctccggccgcggcgcgcttatctgtgccaatggcagccgctacgacggcgtctgggagaacggcgtgcccaaagggtcaggggtcttcacgtggcccaccggcggctcctggcctgggagctcggtagacctgccggccatgagcgccactttcttcgcgcctcctggtgctgttgctgtgagtaggaggtcttctgtggagggcgtgggggacaaggcgaccccgcggatctgcatatgggagtcggagggcgaggctggagacattacctgcgacatcgtcgacgcgctcgaggcgtctatgcctatgctcttcaaggaagccgcggctatcgcgggtggagcaacttacatgcgatcagccagcggagtcccacgctgggcgtcggcggtggcaaccacgccgcagagtaaacgacccgggcggaccatatccaagcgacacaagaattacgagcttatgctgcagctgcaattaggcatcatgcattccgtggggaagtcttcggctgtgccgatgcgagaactggaacagggagattttgatccaagggaaaatgctttgtcctggacagagttcccaccagagggttcgaaggccacactgccgcattcaactgggtacttctgctggaaggactactgccccatggtgttcaggcatttgaggaagttgtttgctgtggatacaggggattacatgctttcgatctgtggcaatgatcctctgagggagctgtcttcgcctgggaaaagcgggagcttcttttaccttacccaagacgaccaattcatgattaagacagtgaagaaatcagaagtcaagctgctacttaagatgttaaatagctactgcaaacatgtcgatcgatacaagaactcattaatcacgaggttctatggtgtacactgtgtgaagcgccataatggacagaaggtccgattcattgtcatgggtaatctgttctgttctgaataccagattcatcgccgttttgatttgaaaggttcatcatatggacgaacagcagacaagtttgaagatgagattgatgagacaactacactcaaggacttggacctcaattttgtcttccggttgcagaaatcttggtacaccgatctccatgaacaattgagacgagactgcgatttcttggaatcagaagggattatggattacagtttcttgataggaattcacttttgtgatgacatctctgcctcaaagatgggatcctctacttttactgcttctccaaagcgtttaatcaagagtgaatcatttcaaggtggtggcacaacagagctttgcttctcagatgatgcttttgatatggtacctgattgcagccggaaatctttgattagactgggcgcacacatgccaggccgggcagagcaagcatccagaaggagcgggttcgtattcccaaaccagaccggcgaagtgcacgacgtgattctctttttcgggataattgacatccttcaggattacagcgtcaaaaagcggctcgagcatagttacaagtcattgcagacagaccccaactcgatctctgccgtggaacccaagctctactcgaggaggtttcaagagttcatcggcagaattttcgtggaagatggctaacacgcattgggtacagattaaccggtggagcagcagctcatcggcggctaggtaactaaccgtgaagcctcgggtcagcggtgaaggggatctgagttcgaagcaaacttgccccgaattctctccgaaaaccattcgagtggctggatttttgaagcgcagccatgggatcggatggttttgtctgtaaattatgtgattggttcttccggctacattatagcagcagtttgtttgtcctccttaatttagttggaggtttttttatcttcaccccccccccccccccccccccttccccttctgtatatcggtccgatgtgaagaatcgggcagtgagttttgtttccagaaaggattatttaagggctttatagggtgcatgggattgatggacatataatccatggattatatgatacttacaaggcattatatgtcccttgatcccatccaatctgcatgtaaccaaagtcataaggctgcggcaggcagtgaataataagatcgtgtacagatacaccttgatcctgggaatgggtggattagaattcaattcagcgtcgtcatgacccgtgggtcccagatcacggcttctccctcttc

SEQ ID NO: 2184 - DNA, 2586 bp, Zea mays
gtcaaaccaaacacatcctcggtgactgacgcgtggccctcacctccgctttcccctcctcccaaataaaacccgaccgcagccgccggtcgtccaggaacgccgccgccgccatggccactgccggagccttccacgccggcggcttcctcctcctcccggtccgacgaagtctccgcgggcccagcccctcaccatggtcccacttccgcacccacttcatctcctccaagccgccgccctccacccctctcccgccgcccgtgccgccagctcgcctgtcccccgtgggttctgccttcgggcctcctagcagaaagaccggcgcggttggagccggggctggcgcgggtgtcgtcgggtggtaccttggcctcttggacgcgcggcccgtgctgaccaagagcgtcaccgccgctgtcatcttcaccgccgcggacgtctcctcccagatgctcacacttggtcctgaggattcacttgattttcttaggaccatgcgtatggctagttatgggtttctgatctcaggacctagcctccatctttggttcaattttatctcaaaattgttccccaaaaaagatgtagtgaacacattgaagaagatgtttatagggcaagcagtctatggaccaattattaactcagttttcttctcatacaatgcaggattacaaggcgagactgttgctgagattattgcaagattgaagagggatctagttcccaccatcaaaagcgggcttttatactggccaacttgtgatttcattactttcaagtttgttccagttcatttacagccgctagtgagcaattcattctcatttctgtggaccatctacataacatatatggccagcttaaagaaagcagatgtggaggtggccccgagtacctaggtgttgtcgagtgactcaacatggctgttatctgtcgattcttcgtacaaggcagacttcatgtatgcctcctggatcgcggatgttatcgaccggcgattttaggctttagagagatggattgcttacgatgcatccttcacttttggttagggcatagtgtccacagggattctacttgcttatgtttttggctgaagaccattttgtttggatgatcgaattatactaggttcattgggtgggtcttctacgacgtctttcttacggtcttttgatcctatggctaagaagtacatttacttcaactaaattttctgtatctagttatggagatgcaagtgaacctgttctttgccacaaacaataacagacacaatctatctcatccttttcttctcatttggttcattttttgtttccccataaatgctccatttgcttcttttgagctcgctcctacagttgcagtgaaatcgtaatatacatacatacatgcatgcagcaatgcacttgcttttgtttgagccttggggtacacccatgccatgccaacccaacctaaccccttcacgccatcttgagacttaaacattggtatcgccaaggagactgcaagacctgagcatcatgcctactgctctcattctggaaccttaggtttgttacatcggacttgggcgcgaacccctgccctggctctgactctgcagatgtcgatgacgacattgttgcttcggagtctgagttggatggcttctcctcctcccccctccttccagccccagttgccagtgtcagctccaggctgaagtcttcggccagcttggcctccgtcttgcctgagctaccacaccactgtcggtgctcgagtttttctgtcggtttggtttgcctttcagcagcttcgtttccgtagctgtttgtcttggcaatctgcatctgcatcatcagctgcttctgaacctggtacacgcggtgcagctcgtgaacctggagaagtgaccattgaacagttttttttcagcattacgaagtctatggatactactctacttcgtgagccggcagttccggcgagacatggtttacctgctgtctgaatgtctgttcttgcctcagcatggccatcttgatgtgttccttctccatcttgatctctgcccgcgccaccacacaagtatcagttcgatggcctggactgtgtgtctgcaacaagtagaaacggatgtgagatgctagcacatttgcctgcgatggtaacagtttctagcggtcaactgaataagttactgaatttttctattcatctttgatttgaagagctcttccctgtcggataggggatggcgcatttaatttattgtagtaataagttgaatgatgagtatccaaagatatcataataaatgtggtgctacattgttgtagttatatgcaatctaaacatcaaatgagaatttgtcctatgtgcttgtacacctgcaattgagttatatgcttgtccataggtttggcagtctgcactttcacgttgtcctccactgacatatatgtgctgtttggttaggagtacgtgaatggataccaccgtgatcttaatggaaaaaaaaagtaacagatacagatctgtagcaacgtaaaataatataactgtctttgcgctgtaattggatcccgg

SEQ ID NO: 2185 - DNA, 450 bp, Zea mays
atgcaacaaccggaggagggaggcacaggcaccaccgggacggtggcagtcggtggtgcagatcacggccgttctcctggactgacgttgcttgccagttgccaacaacccaacacgcgcacagcggaggctgttgcgcgcgcgggggcagcgccgcagtcggaaatgggcagtgggcacgagccggcgaggcggggagcaggcctagcgcccggctgcctgagtgcctgctgcgggctgcttctgcgctctgcaagccgccacccatgggggggctccctggcggcggatggggaggttacttcagaactggaagggtggtttgttttgccgtgtggttattgtggttgggaccggccgcgcatgacatggacagcagcggtgacgatctgtcgggttggcggtagggccgtggcaaggaaaccacgaccccgtgtgaagaaatggtga

SEQ ID NO: 2186 - DNA, 2274 bp, Zea mays
tgcaaacaaaaagacaagacatgtcctttccttaatccctactcgcttccagactgccccctcctcgagccctcgcccgcgttcgcccccggctgggatcaccgcgcgtttgccggcgccatggccgtcgcagtcgccgtcgccagccaaaatccactagcagcgcgtaacctcctgccgatctaggttggtgcgcgctaccgcttccctccccttctgctccccgtcgacgccatctcctcagccccagattgcatctccctcttcttcctctggttctttcggcccgggcagaatgcctcttttttttcttcttcttcttactcgcaggctgcgggcttatgctcgaaggcgcgatctttacgctcggagtggcttcgtttcaggagacgggggatttcttctcgcccttttcctcgccttgcggctgcggaataccggggccggcctggatttgctcgagagtgagaggaaggcgtaacagtgtgaaggaggcgcgggggacaatatggctgcggaaatggtgaaagcggcgacgagcgacaagctcaaggagatggattgggcaaagaacatcgaaatctgcgagctcgtggcgcaggatcctgggaaagcgaaggatgtgatcaagtctgtaaagaagtgtatagggagcaggagcaagaccactcaactctttgctgttatgctattggagatgcttctgaataattgcggagagcctgtccataggcaggtcattgataatggccttcttccaatacttgtgaagatagtgaagaaaaagacggatttaccagttcgagaaaaaatatttcttctgttagatgcaacacaaacatcccttggtggagctaaagcaaggttccctcagtactatgaggcatactatgagttggtgtctgctggtgtgcaattttcaaatcggccaaatgttcttgtcacacgagcagaagtgccagtcccagaaacgagaacagaaccaaataatgaaagtttatcgacccgtttgactgaagctcaacaggaagtgcacactcagcctgttcctgatgcaagtatagtccagaaagcctctagtgtcatggaagtattgagggatgtgcttaattctatggatcctaggcaccctgagggagcaacggatgaatttgtgttggatcttgtcgagcaatgtacgtttcagaagcaacgaataatgcaccttgttatgacatcaagggatgaaacactggtatcacaagctatagagctaaatgaagagctacataaggttctcgtccggcatgacgcgttgctttcagttcatccgacaacagcagtagcttctaatataaaggaagaagaggaggaagaggatgctgaaagtctctatcggagactgcggaaggggaaggcgctgtcgcaggactacacagatgacctggtgccgtcgttccgatccatgcccgaggacaagctgcggcggccgctgaccatccaatcgcctcaccccgacaagagactgggtgcgctgaacatccgctcgccggaccgcgaggaaccgagacttgatcctgctccgctgatcccgccgccgcccgcaaagcacgccgagagggagaggttcttccgagagaagagcatcgacggtgtggccagccttccgggccacatgaggggcctgtcgcagcacagccgggacggcagcagctcgtgtagcggcagcactgattacggcgactgaaaggggaggggtgagcagcagcagcagtacatatagggttccccttcttggggctggtctcacacttggtcaggccaggcaggcgatacattggtgttgtgccggagtttggatcgtcggcgtctccttcatgctgacctgtgtacacttgtcttggtagcattttgttcatttttcatattttccctttggctgatatgacattactgggaggccgttgtgttggtgtggcgttgtgggttctttccctttgaggtctctatagatgattgtgatctactgcatgggggtatgcttgggtctgaagcattgctgtgactttacccttttggctttctgctcctgtgtgtggtgtatcacttggaggtctgtcagaggcgtgcgtgctgcagctattcagtagattcagactgctgctgccggccacagggcaccaaagtggtcggtcgttgtctttgggaaaagctactgtgcaacgcatgccagaaacccactttgagctgtctatagatcgaaaaaaatcaagaaagagttcaaaggcagcagag

SEQ ID NO: 2187 - DNA, 1560 bp, Zea mays
cgaagctggggggttcgcgtcgcggtggagcgaggccgaccaaggagccgatccatttgaaccggaggctaccgctgcctcaagggcctcctcgctcgctcgccagtcgccacccgctcacggagacagagaggccgatggcgagctcgctggcccgcctgggagcggcgctgccacgcgcgcgcccacgcgctgcgacccgcaccctgccaccgccgcggtgggacgccgcggcgctcggcgcctcccgccgcgccgcaccgaacgtttgcaggtgcctagttcattccgacgttaaagtagcccctacatcggacttcaaggacagtagcaaatctgaaacttggaggatcaagatgctctacgacggtgattgccctctctgtatgcgtgaggtaaacatgctaagagaaagaaacaaatcctatggagcaataaagtttgttgacataagctcgaaagattactctccagatgacaatcagggccttgattatgaaacttccatggggaggatacatgcggttctttcagatggaactgttgtcacagacgttgaggcatttagaaaactgtacgaggaagtaggacttggatgggtttatgctgttactaagtatgagcctgtagctagcatggcaaatgcagtatatggtttgtgggcaaaataccgtatgcaaattacaggtcgacctccgctagaagagatcatggcatcccgaagagctgcaggcgaatgtaaagatgacaaagtatgcaagatgtgagcataaagatgttatactgtgctacatacctcgcctctagccatgctttatataggctaaggctcgtatatatggctttaacagtacaaataatcgcagttgtattagaaaaaaaaaggtgaatagcttatgtaatggtttatcaaagtacatatgattgtacatttgtatgtacactgtactggttcacgcatgtaaaaacgatccaccacagatcgagctgactcacattgtctgttctaccaagtcgtatggactactacgcggccccaagctcacagtcacatcctagtccattgttgtggatatataagctcatgcactgcccgctgccggctgagaagcacagctaacgtccgcagaggccgcgttgcttgacgtcgagggggcctcggtgcttggatgggcgtcggcgcgcttgttcttggaggctaacctgctgttcctgagcctgttgaagggccgccagtgccatctgtcgtgcgacttcatgtgacccatccccaccagcttttgttgctcttttctcaagccccttcgagcgtaccaagcaccacctcgccagcctaccgcggacctggaattccacaaagataacactataggttaataatgtctgtaatttgttactcacgtaacaatgtcaccagatggatggagctccaatggcaatgcctgagcaaagtaaaaggttcagaactcaaagccaagcctggtcctaaaccagtaactacatagatcgacgaatcaagtaccaatttcatgcatgatgtgtcgatgtgggccccagtca

SEQ ID NO: 2188 - DNA, 2489 bp, Zea mays
gtctgctccagcctccaggcattcggttccggctcctgcttccctctcccttctccggttctccccctccgccgcggagatggaggccaccgcgctcgcgtcccactcgtccccgttcgccgtccaccgctcgacagggaagccagccttcgcctacccccaccgtggagggccctcgatggtctcctctgtccacctccgcacgtcccggacccccgcccgctctgcggcatggagaaggcggaggagggggaccgggctggttgtgcgcgcggagatgttcggccagctcaccaccggcctcgagtccgcctggaacaagctgcgcggcgttggcgtgctaacaaaggaaaatattgccgaaccaatgcgggacattagacgagcacttctggaagcagatgttagtttgcctgttgtgagacggtttgtttcatctgttagtgataaggctttaggtgcaaatgctatcagaggagtccgaccagaccagcaattagtgaagattgtgcatgacgaactggtacaactgatgggtggagaggtatcggatattgtatttgcaaaaagtggcccgacagttatcttgcttgcaggtctacagggtgttgggaagactactgtctgtgcaaagcttgcgttctatttgaagaaactggggaagagttgtatgctggttgctgcagacatttacaggcctgcagccattgatcaactcactatactgggtaaacaggtgggtgtaccagtttactcagaaggaacagaagccaaacctacacaaataactaagaatgctatggaagaggcaaaaagcaagaatattgatgctattgtggtggatactgctggaaggctgcagattgatagatcaatgatggatgaattgaaagaagtgaagaaggctgttaatcctacagaagttctgcttgtcgttgatgccatgactggccaagaagcagcagcactagtcaccaccttcaatattgagattggtataactggtgcaatactgactaaattggatggtgactccaggggcggagccgcactaagcgttaaagaggtctctgggaggcccataaaatttgttgggcgtggggagcgattagaggaccttgagcttttctaccctgatcgcatggcacagcgagttctgggaatgggagacgtgctttcatttgtcgaaaagacacaagaagtgatgaggcaagaagaagctatagaattacagaagaagatcatgagtgcaaaattcgacttcaacgatttcttaaaacaatctcaaaacgttgcgaaaatgggttccatgagccgcattattggaatgatgccaggcatgaacaagataactcccgcacaaatccgagaagctgagaaaagacttgcattcgtggagtcaatgatcaatgccatgactgctgaggaaagggagaagccagagttactggctgaatcacgtgagaggaggataagagtggctgaggagtctggaaagactgaacaagaggtgagtcaattggttgcccagcttttccaaatgcgtgctcagatgcagaagttgatgggtatggtgcaaggacaagaagcaatagctggcatgggagatctcatggactcgcttaaatctgaagagaaggcacctcctggcaccgcgcggcggaagagaaggaataacacgtctaagcagagggacctggacgcagtgctgagctagtgagtagtggcctagtgtgctgtattatgaaaatgcataggtgggcactgaacctgtgtaattgcggttaattcggcacacattttttttgtacataacgtttagtcccatgagggaagatatgttggtcgctcttgaaattggagtaggttgtcatgaggacatatctagtgcacatagaagattggtgtacatgatgtacatattaaattaccaccactcattttagatttaacgtctctagttgatcattcaatttacaaataacacatttcactactacacaccaccacgttggatgatgtttttagcaaaatataccaaacaactagagacgttaaatctaaaataagtggtgatgatttaatatgtgcatcatgtgcatcaatctttcatgtgcattagatatgttctctgttgtcatacagggcccagaagaactcaggtcttgtaccggaggcctggagcccagtatctttcagttgcaacacttgatgtaaaaaaataagaaaaaacattttacctttcttagtttaagtttactcctcaagcaccaaaaccaaacatcttgctccttgaactctcaaaaacactcaaattatctccttgacctgaattcaagtggttataaaggtggttttgtcttttgtttagttaaaaaattcataagtacttgatagggttttagccatagaatatgtttctaaccttttaaaaattccaaaaaaaaatcatagagatacattcggacaacaacaatcaaagtaaaata

SEQ ID NO: 2189 - DNA, 1942 bp, Zea mays
gcccgcacgcaaaatccaaacccaaaccctcggcgaggacgccaccgtggcgaccgcggtggatgcagcgggtctggtgcccgccgacctggagcggcgggtgatggcggcggtgaaggcgtcggaggcgcgcggggacccgccgcttctgcaggtggtggagctatcccgcatcgtcgccgtggagggcgcggggaccctctccagcgccgaccttgccaggatcctcgtctccaacctatgcttcgcgcacaactcgccctcgctctggaagctcctgggccaggccgtcgtgtcccgcctcctctgcccgctccacgttctcgcactcctcacccctagggtgctgccgcagcggcgagcgcagcctgaggcgtaccgcctgtacctggaactcctcaagtgtcatgtcacgtcgtccttactgtcgatggaggctgggcctaatcgtgacaagatagggaagtccattgctgaagctttgcaactatcaaaggtttatggattttctggaacagagtttggacatgttgtcattatgtttgtgttggctgttgtcagtaaactgattgatagtatatttgaggattgtggctttccatctgcgatggtagaggggcaagagagtgtcaatgccatcgatgggccacagcctatggacttagacgttaaaatgggatctactgagaaccaaaatgagcatcgcgaacagttacgtcggaagaacactctcatcgctttggacgtgttgcatatgatgactgctgatagaaagattcaatcatttctgcgcttgatattcctgaacatgcctgaaaggttcagttctctacgccagaggttgagttctattgaagcacagaaggtgtccttggagactctactgccttctggacacaaaattaatgaattgttaataaatttctggagagtttgcaaaacagactatcaaccgaataacaaacacattcttggtgttcttggtaatatgggatctggtggatcccttctgggccaacttactggagctgggaggcctgcctgctggataatatttgatatatatgtggagaatgcaattgatgggaggcatctaagtgttatatcagctatccgaattataaaagaaatgaccaagacaatgcaagtgcttaacgaagcaagctggcaggaaacatttaaagctctttggatttctgcccttcgtcttgtacaacgggctagagaacctcttgaaggaccaattcctcatctagatgcaaggttatgcatgttgttagctcttataccattatcagttgctgcgattcttcaagaagaaagcgatatgcttggagctgaaggaaacaaaattcttccacaaagacaagggcttatatcgtctctccaggatctgatccagtattcaggacttcttgtgccaccttcatcagtggtgaatgcagctaatgctgcagcctcaaaagcggcaatatttaaggccaactatgaggctggggttggcaactctagcatgatggaccagactgactcttcaatgaaagctgctgggaacatgctccatcttattattgaagcctgtatctcgagaaagttgatcgatacatctgcttatttatggcctggttatgttgtaccatctgggactttaaaagatacagctttgccccaagaatccccttggttaaactttatgaaagggtctcgactttcaggaccccttattgatgctctggtcgcatctcctgcttcaagagttagagagatgacattccactcctgggacaccactcatccacagatccactctgtccccatctccactcatgcatatttggcaggaagtggtgccactgtggctgcagtagtctgtgcggctgtggccgggcaatggaggtggagtgactgtggttgtggacacggagtggattggattggataa

SEQ ID NO: 2190 - DNA, 1788 bp, Zea mays
tttgacaaaacaactcactaataatttcgtgcatagcaaagagagaagtgtgtgagagagctattcttcgagctgagaaactcgtgaaccgtgtgtcaatccatacgatcgtatctaaagatgccagttgcgtctgtctccctccattcttgcccatctctacctgacacggcgacagatcgtcagttcgtcaccgcccaatcagtctcccagcatttaccggctcctccgcacctgctgctccagttccagctctcccaacaccaacatgctcggcctccggcgcctccccgctgtctccggccgcctcgcgccggaggtcacctccgtctctgcggcctcctcccacagcgccgtcttctttcgcaccctccaaatcctcgtccagcaggggcccgtccgcctccaaaagctctctgctccggacaccgggatcgtggagctgaggctggagcggccggaggccaagaatgccatagggaaggagatgctccaggggctgcggagcgcgatccaggaggtggaggccgacacggctgcaaacgtcgtcttggtgacgagctcggtgcccaaggttttctgcgcgggcgctgatctcaaggaaaggaggttgatgggtcctagtgaagttcgggacttcgttaattccttaaggtctacattttcatcctttgaggtttgttgcaaaataacaatatattcttctgtttctgtacagttgctctcagatttttggaaatttaggaaatccatggtgatgaaaagtgaaactctagataaagctatccagaccaatgttcatttcgtatgcattctcaattgcattttaactgacaagtgttgcataaactctccaatagatgtaaatttttgtatcatgtttaagcaggcactgtctattcctacaattgctgttgtcgaaggggttgcttttggtggcgggttagaattggctctgtcatgtgatcttcgcatatgtggcaaggatgcaaaattcagtttgccagagactggccttgctattatcccaggtgctggaggaacacagcgccttcctaggattgttggaaggtcaagagcaaaagaactaatattcactggtcgtagattcgatgcggtggaggctgtaactatgggtcagtttaacgtcctgagatctgcttcctgctgttacgacttcttcctcaagggcaacttttatcgattctttgaagggtcatgtatgctcacattgcaggagtagtaaactactgtgttcctgccggcgacgcttatcaaaaggctcttgaacttgcgcgggagataaaccagaaaggcccgttagcagtaaaaatggctaagaaggccatcgatcaaggggcagaggtagacttgccctcagcattggccgttgaagaagaatgctaccagcaagtcctgcacactgaggatcgtcttgagggtctagccgcattcgccgagaaaagaaagcctatatataaagggaagtagggccgtgtatggtcttagattcataataatagaaagtcgcattaacatgccatccaataatagtggcatgattgcatgacattgatatgtgcaaattcatgtctctctgtaactttcaggaaataagataagatgtatcagcgctgctacctatgtgttctgaacgaggtgaatttggctgcggctttagacttaagatagacagattagacagctgggctgattggagtccatttcccttacgaatgtgagatttgagttggacctcaataatcattactgataaaagtaagccca

SEQ ID NO: 2191 - DNA, 1502 bp, Zea mays
cagtgaaggtatatgcttaaaagagcacctaatgcaaatgaccgtctttgatcgtccatgatcctcatcactgtctccctccagcccagctacaggcctacagctagcgtgccctgccccctgccaacctcgccaccgtcacatagcgggagaggaaacagggaatcaccaaacaaaccgcgtttgctccgcgcctccactccaccccgcgacgctaattaactcctccagctgtaaacctgcaacacttgggttggaggctagagcttgcaaacaccaccagcgaagacgtcgtggcgcgcatgtgggcggtctctgcacccggcgtcccaccgccaccgctactgtcgtagtcctagatccgaccgcctcacgagctacattccctcgaggccggccttcctggtgtctcagcagcggcggcgcatggcgatggctgcggggcgtgggctcttggccctcttctcggtcgtcgtagtggctgggctcacctctgcggcgaatggtcctttcctgtccgatagcgtcttccagccgagcgccggatctacagggaggagcttactgcaggccaagaacagttgccccgtgaactttgagttccaaaactacacaatcatcacaagcaagtgcaaagggccaaagtttccagccggcccatgctgtgccgcactcaaggagttcgcgtgcccttactatacgtacctcaatgacgagagcaacgactgtgcatcgacaatgttcagctacatcaacctgtatggtaagtatccaccgggcctgttctccagcgagtgcaaagaaggcaagcaggggctctcttgcgcagatgtcctcgagagagacagtgccactgcaagcagtggtcatcacgctcaaatcagcttgcttgcgttgattactgtcttgagtgtggtagtagcgttgttccactgaactatatatgcattctccccaaatatggtgtgttacaactaatgaggtttgaattgcaccttttggtgctcatggtgggtgggattctaggttcttcctttttgtgtgtaaagtctcacataatgttattcatggcctattgcatacttttttaattcaatttaatatcgcagcgggtctgattaaggctatgactagtagatcgtccgtatgactgtacaaaatattgtttacattatagactattgttttacattgtgtactttgaaatgagagataattgtttacattatagactattgttttacattgtgtactttgaaatgagagataaagacgaggatgagtaaactgttggagtggagatagcttaagaggtgggtaaagcatttactcatatgtcccatgacaattcatccttctctatcaactagtacaatatttgtgtgtgcgatgtcatatcaatcatattggacggtatagtggtacaatggttgtatgacgtgatggtctagtggtaagacaatgtgatgtacccttttcacaaaaaataaatttaaaattaa

SEQ ID NO: 2192 - DNA, 1700 bp, Zea mays
cggtgtgtgatgcagaggcgatgccgagcgggtggagctctagccacgcccacgctcccgcctccccggcaaacacactcacgcccgccgaggccacatcctagcacgttgtagacgccgccaccgccaccgcctgacgccatgcaggagttccagtccatccctggcctggccgggcggctgttcggcggggccgcggcacccggcgacctccggcgcgcgcaggcggcgcagcatggccccggcggggcgcgatgcggcggtgcctcgcccgcggcgcccgaggcggtgaagtgcccgcggtgcgagtctaccaacaccaagttctgctactacaacaactacaacctgtcgcagccgcgccacttctgcaagagctgccgccggtactggaccaagggcggcgtcctgcgcaacgtccccgtgggcggcggctgccgcaaggcgaagcgcgcctcgccgtcggcgtcggcgtcggcgtcctcgcccgcctcgtcgtcggcgccgtccacgcccgcgtcggccgacgcggccaagaacccgcgccgcgcctcggcctcgccccgctccaacagcggcagcgcgagccccacggccgccgccgcgacgaccccgaccccgaccgatccgagcacctccgccacgccgtcgtcgaacggcgtcgccttcacgggcagccaccactcgtcgaaccccttctccacgatcgacgtggcggccgcgccaccggcgccgatattcgccgaccaggcggcggcgctggcgtccctcttcgcgcctccccctccgccgccgctcccggtgttcagcttcgcggcggcgcagccgaaggaggaggaagcgcccaccaattcggagctgcagcaacacctcgccgcacaggcggcgccgtcgtcgtcggtctccgaggacatcatggcgccgttcgcatccctggacgccgctgggatattcgagctcggcgacgccgcgtcagccgcggcgtactggagcgccgggagctgctgggcggacgtccaggacccgagcttgtacctaccctagcgtacgtgcttgtttagttacctatcgcgatcgctagattaaagccgcggttagatcttaacgacgggcgacggccacgagctccgtctctctagctattactccatgtcctccctgcctctctctctctctcttgtttattggtgatttggcttcacaggctgcgtgtctagaaagctaacatctgtgtttcgtgtctgcatgcaccctgcgagtgtggcggatcattgcgctgctgcgatagaattaatcgcattattattgcttgtttactcttcgtaatagtaacttgtatgaatacatgcatgtttggggggaagcaacgtaaccacgagtgtccgtgtgttatgttgtgatgcacggtcaaagccgatggtcaggtctatcgccaacgccaggggatgatggaacaatggtgcgtgtcattttggttagcggttggtttgttaatttcggctggtggcccgcccgtacatgcctctcgctctccggggggtttgtgctgatggcgacgccagttgctagctggctcttacgtacattgcttctctgtacgcctgttcgttggcccagcatggcctcctcctgcctcctgacataacacacttccgtgcctgctcacgcgagcttggtctgccccccccccccacccccct

SEQ ID NO: 2193 - DNA, 2966 bp, Zea mays
catcaatccaaatccaaccactaacccaccatccacgtccactagtcttcccgctaggccactagcccactaaacatgcaaatgcggacggtacggtactacatgtatgcaagcccggctgtctgtctaatctagcacttgtcagaaatggcgagcaacaccctacgcttcttgcaggccattgcaccgatagtgttgctggcgcgtctagcacaggcgtcagctcagcctcagcggcagccatcgcaacttcttcccccgggggtcgcgaggccgggctgccgcgacaggtgcggcaacattaccatcccctacccgttcggcatcggcgccgggtgctaccgcgaggaatacggcttcgaactcctctgcgacgacgcccgctccccgccccgcctcaccatcagcggcggctaccagctcgccagcctgtccttgtcagccggcgaggtccgcatctacctcaacgcgacgcgcaagtgctacaacgtcaccacgggtgccttcgtcgaccgcaacgacgacgcgagtctggccctcggctctgccagcccctaccgcgtctccccgaccaagacccgcctcgtcgctaccggttgccccaccatcggctacttcgtcgacggcgccggatacttcgtcagcggctgcacgtccgtgtgccggccggcgcagtacgccgtcgaggggcaggggccgtgcaccggcgtcgggtgctgccagagcgccataccgtccgacatctactactacgagcccaacacgctcagcttacagctgcaggcggggaagctggaccccatcctcggtgcaaatgtcaccacgtgccagtacgtgttcctggcggacgccgactggttcagctacaccgacagcgtgttcttcaaccggaccgacgacttcgccgcgcccgtcgtgtttgactgggccgtccggaacgtcggcaactgcagcgccgcgaagctgaacatgacggactacgcctgccggagcagggacagcgagtgcgtcccctccagcaacggcgccggctaccggtgcaattgctcccagggatacgagggaaacccatacctggacggtggatgcagagacatcgatgagtgccttcgcccagatgagtaccaatgctacggaaactgcacaaatctgccgggacactacatctgcaagtgccgtccgggaaccgacggggatccccgccagcggaacggttgccggcccaaggataagttcacgccagctctcaaagtggttacaggggtcagcgtcggggtgttcctgtcagtgttcatgtgcttctggctctacctggggctacagaagaggaagctcatcagaacgaagcagaggttcttcgagcagaacgggggcgtcatcctgcagcagcagatgcgctcctacaccagcgccggcgccggcccaggcgggttcaagatattctccgaggaggagctggagaaggcgaccaacagcttcgccgccgaccgtgtcctcggccgcggcgggcacggcgtcgtctacaggggcgtcctcgaggacaagacggtggtggccatcaagaggtccaagatgatggaggaggccgagaccaaggagttcgcgagggagatgctcatcctctcccagatcaaccacaggaacgtcgtcaagctgctcggctgctgcctcgaggtacaggtgcccatgctggtctacgagttcgtctccaacggcaccctctaccactacatccacgataaggaccgcaagaccgacatcaccctggacacccggctccggatcgcggcagagtcagcggaggcgctcgcgtacatgcactcgtctgcctcgccgccgatcctccacggagacgtcaagacggccaacgttctgctcgacgacaagctcaccgcaaaagtttcggacttcggggcgtccaagttggcacccgctgacgaggccgagattgcaacattggtgcaggggacttgcgggtaccttgaccctgagtacctcatgacatgccagctaactgacaagagcgatgtgtatagctttggtgtcgtcctgctggagcttctgaccgggaagaaggcgctctacttcgacgggccagaggaagacaggagcctagtgtcatgcttcatgacggcgaccaaggctggccggcataaagagcttctcgacagccaagtgaggaacgagatgagagccgaggtgcttgaagaaattgcccacctcgtgatgcgatgcctgagcatgagtggagaggaacgcccgacgatgaaggaggcggctgagaggctggagaggctgaggagataccagcagcacccgtgggctcaggatggcaacctggaagagaggcagaccttgcttcccatggaacaacgggaccttccttccatgttcagacagcaagatatcttagatcttgaagagggcagtgcatatacttacagcttgtaggtagcattatttgtgccgtaattttagcaaattgattcgagtatggcttcttttcgacgaacccttagccatcccattcttaatctgccgatcccaatgcatgtcaaataatccttgtgcctgtagtttgtttgtcagttggcgtcgcattgttataggagctttctgttagccatgcacaaagggagagcctggtcgtgcgatcgtgtgcgcagtccgcacgaccggcgcgtcgcacgctgtgactgaggtgagtgggatggcactcaacgatgagaggcatggcgtgcaaatcagggtgatcgtgccccacatttctttttcctttctttaagcggtaaactgtcaggttgtaagctcatggtctgtacacgtctctttatatacagagtcagaaaagctgttggttgttcacaacaccaaatcagagtgtgcccacttgtgttcgtgtgtgtgcgtgagtcttttctgtgaccagcagggtgagctcgccggcaacaggaggttgcttctcc

SEQ ID NO: 2194 - DNA, 2335 bp, Zea mays
gcaaagaaaccattcactggcatgtgggccaagctgtatagggtcccacaaggcagaggcacgacgtaggaggcaccgacgtggagagcggagggcagccacagccatcccgtatccggagtggctgacgcatacaagaggggccgtcccgatcggacggctggggacgcaaccgcggccgatatataccaagcctccgcgctgcctctatggccaccgccgccgcatccaccaccacctccgccgccgtgctcgccttcaggctcctccgccgcctgccgcgccgcctcagcgtgtcccgcgcgccgcccgcggcactcgcgtcgtcgtcgtcgtcgtcgtcgcgcagactaccgtccctcgcccgccacccgctcggtcaccgcacccggatggggcacacagccgccgctgcggccgcggccgccgaacccgctctcggactcaccaagcccaacgccgtcgagccgcctcaggtcaccttttccgcgaaagacatcgaattctccgagtggaagggcgatattctcgctgtcgccgtcacggagaaggatctgtccaaggacgcggactccaaattcgagaatgccgtcttgaagaagctggacggccagctcggcggcctcctgtcggaggctgcggcagaggaagatttcaccgggaagacggggcagtcggtggtcctccgcctcgcggggcagggcttcaagagggtgggcctgatcggtcttggtcagagcgccccgtccaccgccgccgctagccgaggcctcggcgagtctgtcgcgtctgttgccaaggccgctcaagctagcagcgctgcaatcgttcttgcctcccccagtgggatccaggaagagttcaagctgactgctgcagcagcagttgcttctggaaccgtgctggggttgtatgaggacagcagatacaaatctgaatcgaaaaaggtgcacctgaaacaggttgatattattggactgggttctggtgcagaggtggatcagaaacttaagtatgctaatgatctttcgtcgggtgtgatattcggaagagagcttgtgaactctcctgcaaatgtccttacccctgctgtgcttgcggaggaggcgtcaaagatcgcttctacttacagtgatgtgttcactgccacagtactagatgtagagaaatgcaaagaactaaagatgggttcctacttgggagttgctgcagcttctgctaaccctcctcacttcatccatttgtgctacaaacccactgatgggaacgtcaagagaaagctggctattgttgggaagggtttaacttttgacagtggtggctacaacattaagaccgggccaggctgcagcatcgagctgatgaaatttgacatgggaggctctgcagctgtatttggtgcagctaaagctttgggacaaatcaagcctcctggagtagaggttcactttatagtcgctgcctgtgaaaatatgatcagtggcacaggcatgagacctggtgacattgtaactgcttccaatgggaagacaattgaggtaaataacactgacgcagaaggaaggctaacacttgctgatgctttggtctatgcttgcaaccaaggtgttgaaaagattattgatttggcaacgctgaccggcgcttgcgttgtcgcactcgggcctagcattgccggaattttcacgccgagcgacgagcttgccaaggaggttgccgctgcttccgaggtatccggcgagaagttctggagactcccgctggaagagagctactgggagtctatgaagtctggcgtggctgatatggtcaacactggcggcaggcagggaggttctattaccgccgcgctgttcctgaaacagttcgtcgacgacaaggtccagtggatgcacatcgacatggccgggccagtgtggagcgacaagaagcgggccgccaccgggttcggcgtttccaccctggtggagtgggttctcaacaactcgtcctcgtcgtgaacaaaacccatacctcccctcgtatcacaatgcctttccatgcgtttttattttgttcctcctcttttgtgctaccattccatagttgcaaactgcagagcgcctcttggcatgtgataccgttgtgatagaataatcagcatgggtagtggtgtcgggtcctcctttccctgaaagaaagcagcggcgtgctggtcgcggtcaagccatgcctgtcgccttccggctgccgctgtgggcatttgtaacgcgtctctgcccagtgaaataacgtttgttccttgtgtttgtgcccccgcccaaaagaaagctgcatcggaactgatcttcccgtg

SEQ ID NO: 2195 - DNA, 2108 bp, Zea mays
aggaatatctcaaaacaattaggcgctgcagaaaagggtgggttttattttattggttgtggaacaagttacaatgctgccttagctgcaagaccctttttgtggaagaactgactggtattcctgtgactatggaggttgcaagcgacttgctggacagacaaggtcccatctacagagaagacgccgcagtttttgttagtcagtctggagagacagcagataccctccttgcattgctcttgattatgctctagaaaatggacctctccgtgttggcatcacgaaatactgttggaatcacactgtctagaagaacgcactgcggagtccatatcaatgctgattgccggtacaaaggcatatacaagtcaaatagtagcaatggtgatgatggcgttggctatcggatccgaccaataatatatctactcgagctagaaggaaaattatcatcagtggacttaacaacctttcaagtacgtcgaacttactagatccttgtgctatggctgcagtcaagcaaaaaggctgtttctgacgcatgcttcagcaagcagcagtcggtgatccagcagctcctctcgcgcaaggggacgccgccgatagtgatgtgctcgaggggggacgccaccgcgctgctgtatgccccagtggatcctgcagagtcattgaagttccggaggttgcatgttgtctccagccagtgattaacataatcccattacagttgctcgcgtacaatctgactgttctccagggattcgatgtggaccaaccacggaatctggagaagagcgtgaccacgcagtaggtagagaggtggaagtggatgatgagatgcgcgaacgatttgtacccctatgtcgtgttgtgtagggttctaggagagagcaagccggctatagctgttggttagtcattttcttttgtgtaatgtaattattactgttcttgaggtagctagtactatcattactctacgttaaacaagtcgttgtgaaatgcatggtacaaaaggtatcatttgagaaacaagtgtgtttttcataccgattgggcgatataaatctcgtaaacttgtaattctgatctctcaaatttgaggcgtctggcaaaggtacaaaatcaaaaccctcaaaaatctgacggcagaaattttccgacgaacattgtatcagagttttctctccttatttcctgtaagaacatgacggtcatttctttttacagggcattgagccccctgatattccagtacaacagtctaatactccaaattctaaaacaggagctgagatattcatgtatgacatctcgtcggcgtcttcttctgcctcctgtcctccggcctcatctggcctttgctgcggccatacgtattcatgtatgccatatgatcgacggcctccccctgtataaccctccagggctaatcttgctctgggctttcatgtggatttggtgatattgagtcagtttaaatccataataaattaaaatccacctcaatacatctcaatcctataaccgaacaaggcctcatcgttggttgaagctccagctattctctaaaaatcaaatatggtggtaaggatgaagatgaacagttggaacacttttctgaataggtaaaattttcagcccactcatgtgtgagccaccgtcagcattggatcggctgttctttttatatctgtagtagggcctcttatcatttcaaactgatgggtgatctcaaggacctcagggggtagctgagaacacactgacctgaatcttcgacggaagaaacttgaagatatcatagatctgcaaagggcacatgtcagttgaagtcaagcagcttataagctatgaaaagacatctgcatagggcacattgtgccagttaaaggcaaacaacttacatatattagttgaaggcaagtaccttataaggaggaaagaagagttgaaagctggttagatgtatatgattcccaataataaatttgacctgtgcatatcacaatactactaatcaccgaataccatgcataaatgtcgattagttgagatctgcagtttctttcctgattcagcctaggagtacttaacagtttatt

SEQ ID NO: 2196 - DNA, 1263 bp, Zea mays
cccgcccctgttgctccctatcctattcttatagtctagaactctagatccacaaagaaggggaggcaacaaggcaggaagctttggagctgtaggaacactgtagatccagcagcagccagtggcagatttggaaggagaggagggtacgtgcatggccagcagcaagtggtgggagcaggcggcactggacttcccgccgccgcagcagcaccatcaccagcagccgcagccgcagcagcagccgcaccaggcggtgcccatgccaccggcgctagcaacggcgccagccggggccgtgggggcctcgccggagggcaagcagcagggccagcagcaggcgggcgccatcgtgccgctgcggaggccgcgggggcggccgcttgggtccaagaacaagccgaagccgccggtgatcatcacgcgggacagccccgacgcgctgcactcgcacgtcctcgaggtgtcgccgggcgccgacgtgtgcgcgtgcgtggcggagtacgcgcgccgccggggccgcggcgtctgcgtcctgggcgcgtcgggcgcggtcggggacgtggccgtgcgcggcgccgcggcgccgctccgcggccggttcgagctcctctccgtgacgggcaccgtgctgccgcccccggccccgcccgaggcgtccggcctcgccgtgctggtctccgccggccagggccaggtcctcggcggcagcgtcgtggggcccctcgtcgccgccgggcccgtcacgatcttcgccgcgacgttcgccaacgcggtctacgagcgcctcccgctcgccgatgcccccgagctcgaggtcaagcccgacctctccaccgccacctcggctggtgggcaagatgtgcagccgcagctcccaatggcgccctcccaccagcaacctccggacatgggcgcgggctacgctggccaccgctcgcctccgtacccgtggggaggcgacgtatgagcagccccggcggtcttggttttcttggtcctaacattgactagagaactaggttttgtcaaggtaattgttgttgggctggtggtactgcatgcagcatacatggaattgattcattggagcccttcttgggctcctgtaatttccttctccttggatttgtggtttttgttgcgggaaatggactggttttggccacagggagccaaagaatatggagcattagatcggcatggtgcttgcaaattactctagcaaatacagcaggttcggcgctggagccaagtgttttt

SEQ ID NO: 2197 - DNA, 1203 bp, Zea mays
atggagtctggcggagggacagctgtcggagcggttgggtccttgctgacgtcctcttgcttccgtgacactgcagtcggagtggcgcaggcggcgctgtccttctgtcaggccgaagttgactctggaagcccatcggatgttgagatattagaaaacccaacagattctaagaagaggaagctagtccacgtgcttgatgataacgaagtagtgtatgaagatgaggaaggccctattactcaagcagacttgcaaaagtggtttgttgatgattgggataaaagaactcctgtaaaagtatctaacgatgggtgcaccaatgactttttaatggttggtctttccacaaaggacatgccagtgaccaaagccgattcaatagatgttttatgtgattatatcatggcaatagaagacgatacgacactagagatgacatgggtgcgaagtttcaatccttttaagatagaaatatctgttaaagacctacaaaacatattaacgataaataaagatatgactctaagatgttttgacatggctgttcggctgcttgccaataaagagtcatgtaggccgaaaggagaaatcataaataatagaaagcattatatggacatgcgtttctggagaatggttggttttggtaaacttccaaagtaccatcaggatcctacagcaaaagagttagccaaaacactcgattgttggccatcaatgaattattatatcacgggttgtagatatgttcttatgccatggaaattcaatggatgtcacgcccttttcgtaatagatcatgttaaaaagcatgtgacttttatcgactttacaccgactcaagattggtgtaaacacataccatacaagaggtttgcggaagcgattatcatggcctcaaagaaatataagattgcttacaacaaaaaacgttctggatgggcggaggatatctttaagtgggaacatacaattcagactggtgttccaattgacttaagagggtttaataccagctacctcgttctacaagctatggccatgtgggggaatgacagacgaatgaaatttgttggggatgcaaagattgttcgaaggagctttgtgattgatctgttaagttatgaggataattcgtgccgatatgccatccctgcaaacatacaacagagacttatcgatatcgctaaaaaggattag

SEQ ID NO: 2198 - DNA, 570 bp, Zea mays
atggtaactatggtgcatcaccggcgagcaccatcggctcaccgcgccggcagctgtccaaggaagggggcaaggcactacactggctgcgggccacgccgccatgacagcagccgctcagggaaggggtctaggcacagcgctgacagcaggccacgccgccgcgtcagcaaccgtcgcgccggcagccgcccatcccaggggcaaggcgttgcgctggttgcgggccacgccaccgcgccggcagccgcccagggaaggagaatcaccgcctctgtccaggatgaacctgttggtgctcagggaatggaagacaatggtgttcagcttggtgacgacaatgaactcccagcatggtttcatggagcagcgggtgccgctttgggggaagactggatgttcgaagatggtaactatggtgcatcaccggcgagcaccatcggccaaactccagcaccatcagctcgccgtaggggtgggcgtgcacctcaagctccagctattgtaactcgctcctatgcacgctctgtctccccgaacgtcaacctcgacctcgctgatgcaaggtaa

SEQ ID NO: 2199 - DNA, 1201 bp, Zea mays
ctactacgccatggccaccaaagcaggctcctcactgtcgccatgcatcaggctcgtggaggaatccctgctcctcccgacgcaagacgccggcctcttcgcaaaggccttcgtgctcatcttcgcccacaccttcctcttcatcgcggtcgccgtccacttcgctcacccactcgccacggacatcctcgccgacatcaaagcacaaaggagcagcagcaggaccactaccactaccggcgccgcgagctcaaaccactccaaggagcttgcgttgctagcgatctacctctgctacctcgcgagcaaactcgccacccagctcgtcaccgccctcgccaccgccacgacctactccggcgagcgcctcacgcgtaaggtggtcatggagaggatcgccggaggcggcggccttctcggcacggctgccgtcgccggcgtgctggagctgtcgttcacggctctactcgcggcgctactcgtatccacgtggacctacgctgacgactcgatcgtaaagtctgtgtgtggctactcgatgttctcggtggcgcttctcgtctacatctacctcgccacggtgatcccggtcagcgtcggcgtgtcggcggtggacagaggctgccacggcgtctgggcgctccgccgggcgtggcggctcttgagagcaagggggaaggaggctgccgtgctcgtgttcgtcgtcaacatcctgcctgctttcatctacccagcccccgtgtacgcgttctcgtacatgtacccggcggacgagtactccctctactacggacaggacatggcggtcaggttttctctccacggcccggcgatgtggaggcagtggagccagggcgtgtgctggttcatgggcgtagttttcggatctggtcttccctcggttggtgcgcagctgttctccatggtggcagccacggtgttctgctgcctctccatagaaaccaacgatgatgcagcgcgcgcagtagtataaaactgcttgacaattttgtattaattgtcgatcacacctaagctagtcaaaatttacctactttaattttcgtcatgttgtggccaagactttatcgttgttttatacgagagagagttttacaatgtttctctccccaaagtgtgtgtagggacttaatgtgttactgtagctactacaaaagagctatgcaatctaggtttcaag

SEQ ID NO: 2200 - DNA, 444 bp, Zea mays
atgactctcgccgccctattccggcgaacaaagagccagggcacagtggcgctgatctttggcatccttagaccactactgagacgtgtccgcggcacacacaaacaagtcaccaagcttcaatgcccgagccgagcacgcacggattctgaccacgacgctagtgagatcttcgacttgacgagcctgatctcgagccatacatgcaggatggttccaatcaagggctcggagagcatcactcaccttcctaaatcatggtgccctcacgaagttgcgcggggaagtcgcgagtggataggtcggcatggagaccgctcatggcaccggtctgcagcggcgcaaccacgttccaatcaggtgatagtggtaaagttcaaaataccaactgggcaagcttcactgacctatgtagatcatggaacaagtttcccctgggcatga

SEQ ID NO: 2201 - DNA, 2769 bp, Zea mays
cactgcccgtgtccccagctcccaagccagtcccagactcccagtcacaaaccccaaacccctcacttgtcatcgacctgcgctttgcatccgtttcttcctccgccttcccttccctttgcagtcttgcactccactacccctcgccgcaccgctctcctctcttgacgcaaacctttccacactgctaattaatcgccatttcctcggaggatccggaggcaatggagaaggagagcaagcagggtttcttttcggcgctcaagggggaagtcgtgcgtggtctctcgccaggcagatcccgggggaagtcgctgctgcttccgcgcagccgcaagacggcggccgcggaggaagtggcgccgccagagaagctcgcccagtacgcgccggatccgctcgtcacccactccggcagcctgcggcttgccggcgaggtcctggcgccgctcatggagggcccggacgtcgccgaggacgacacgttcgccgaggattccggacggcgagacgggttcgggcagtgggtccgcggccacctgacccgtgccccgttgatcgccggcggcggcgacgggtctttccggcgctccgacctccgcctcctcctcggcgtcatgggcgcgccgctcgcgcccgtctcggtctccaccgccgagccgctgccgctcgcgcccgtcaagggcgcccccattgtgcgtacacgcctcggttttttctctcctggatctccactgttttcacgcctggctttggcaaatgcggcagcgttttgggccttgactcctccggcggctctggatctggtatttatggcgttgcaggaatcctcgtcggcgcagtacatcctgcagcagtacttggcggcgtcgggtggcgccaaggtgctccggtcggcgcggaacgcgtacgcaatggggaaggtgcggatggtggcgtcggagttcgagacggccacgcgcgtggtcaagaaccggggcgccgccgccgccgccgccgtggagcaaggcgggttcgtgctctggcggatgtccccggacatgtggtacgtggagctggccgtcggcggcagcaaggtccgcgccggctgcaacggccgcctcgtctggcgccacacgccgtggctcggcgcccacgccgccaagggtcccgtccgcccgctccgccgagccctccagggtctggatccgctgtcgactgcggggctgttcgcggaggcgcggtgcgtgggcgagaagaaggtgggcgacgaggagtgcttcatcctgaagctgtcggcggacgcggagacgctgcggcagcggagcgagggtccggcggagatcatccggcacgtggtgttcgggtacttcagccagcgcacgggcctgctggtgcaggtggaggactcgcacctgacgcgcatccagccgcacgccggcggggacgccgtgtactgggagaccaccatcagctcgttcctggaggactaccgcgcggtggacggcgtggcgatcgcgcacgcggggcggtccgccgtgacgctgttccggttcggcgagacggccatgagccacaccaagacgcgcatggaggaggcgtggaccatccaggaggccgccttcgacgtgccgggcctgtccaccgactgcttcatcccgccggcagacgtccggcgcgactccgactccgtgggcgagccctgcgagctcccgccgcgcggcgccaaggccggcgccgtgcaccccgcgtgcgacgcggtgcactcgcggcggcggcgggatgtggccccggccgatggggagctggcgacaagatctaccggacggtggagatgcgatttctgactgtgggcgacgggactgatcgagcggattcgtatcgtaagagtagcactattactagtagctaggaagaaggcgggggggaattcagcaagcaaacaatttgttcatagtactactagaaaccaaatctctctccaaatactaacgaactccatctcctcctcctaccagtcatcagtgccttgtattctgtacagatcggtgaggaagcgcctcggcgacaatgttgagctcatcaattgtactgtactccagttctagctgtatgaccgtaagaatcgcaagaatttacggtgcacaagtataccaccagattctggatatgagacgatggaactggatacttgttgcaattctacgtcacgtcttactgtgtaggcgccaggatgatcttcaagctgggtggtaaaagtggtaggtgaggtatgtcttgctgtcgacctccgtttcgtttccattccatggctttgggccttttgttttttgcttagaaactactccctccgtctccgttgcttatgaaatagacgggtcttttgttccttttggcacctatcatgtttgaccatttgtctttgtgggagggcgaatccctcggctgagtggcgagagtgtacacactccctcggaggaggagtaggcttaggcgtttgtctcgccttaggctgtctccagcagcgtcccctaaatttcgtcccctaaaggaatattccctgtactttataagacactctaaaagattctgtcctctatatcttctgtgtctccagcaacgtcccctaaattcgatcccctaaagctacagtgttaacagaattcgttttttcttttctttttctgttttctttgttttgtacccatttaatggtactgaaaggatgctaaaaattttgtaatcaataaaatttcaaataataatctaaaaactatggttcattaataa

SEQ ID NO: 2202 - DNA, 2607 bp, Zea mays
gcctctgtcaacgcgatacagcagtaaacatgagtacaacgtgagctcagagccgtccatggcgtacgagggcacgtcggtaaaatctcaacgtcccgtcccgtgcctgcctgccatttcgattagttagaggagctgcgcctgcgtctgcctgcccccttgaactccccaagagccaagaaccagcgcagcagcgcgccccctccccgccccacaataaaacagccacacgctcgccacccatggccaccaccaccaccaccaccacagcacaggcccactgccaccgctaccgctaaccatggcctcctcagcgtccctgcagcggttcctcctgccctcctcgcacgcggcggcgacggcggcctcgccgtcctcccggctgcgccgcacagggcgcgcccgcgcggccgtctccgtgccgccgccggcggcggcgggggagcaggtcccgacggagcggctggagccgagggtcgaggagcgggcgggcgggtactgggtcctcaaggagaagtaccgggcggggctgaacccgcaggagaaggtgaagctggagaaggagcccatggcgctgttcatggagggcggcatccaggacctggccagggtccccatggagcagatcgacgccgccaagctcaccaaggacgacgtcgacgtccgcctcaagtggctcggcctcttccaccgccgcaagcaccagtacgggcggttcatgatgcggctgaagctgcccaacggcgtgacgacgagcgagcagacgcggtacctggcgagcgtcatcgaggcgtacggcgccgacgggtgcgcggacgtgaccacccggcagaactggcagatccgcggggtgacgctcccggacgtcccggccatcctggacggcctccgcgccgtcggcctcaccagcctgcagagcggcatggacaacgtgcgcaaccccgtcggcaacccgctcgccggcgtcgacccccacgagatcgtcgacacgcgcccctacaccaaccttctctcctcctacgtcaccaacaactcccaggggaaccccacaatcaccaacctgccgaggaaatggaacgtctgcgtcatcggctcgcatgacctgtacgagcacccgcacatcaacgacctcgcgtacatgccggccgtcaaggacggcgagttcggcttcaaccttctggtgggcgggttcatcagccccaagaggtgggccgaggcgttgccgctcgacgcctgggtcgccggggacgacgtcgtccccgtgtgcaaggccatcctcgaggcgtaccgggacctcggctccaggggcaaccggcagaagacgcgcatgatgtggctcatcgacgagctcgggatggaggtgttccggtcggaggtggagaagaggatgccgaacggggtgctggagcgcgccgcgccggaggacctcgtcgacaagcgctgggagcggcgggactacctcggcgtgcacccgcagaagcaggaaggcctgtcgtacgtgggcctccacgtgccggtgggccggctgcaggccgcggacatgttcgagctggcgcggctcgccgacgagtacggcaccggcgagctccggctcacggtggagcagaacatcgtgctccccaacgtcagcaacgagaggctcgacgcgctgctggcggagccgctgctgcaggagcagcggctctcgccgcggccgtcgatgctgctcagggggctggtggcgtgcacgggcaaccagttctgcgggcaggccatcatcgagaccaaggcgcgggcgctgcaggtggcgcgggaggtggagaagcgcgtggccgtgccgcggccggtccgcatgcactggaccggatgccccaacagctgcggccaggtgcaggtggcggacatcggcttcatgggctgcctcaccaaggacagcgacggcaagatcgtcgaggccgcggacatcttcgtgggcggccgcgtcggcagcgactcgcacctggccgacgtctaccggaagtccgtgccgtgcaaggacctggtgcccatcgtggccgacctcttggtggagcggttcggggccgtgccgagggagagggaggaggatgaggagtaggaccttcgtcaagcgccggctgggactgtcctgacctattttatgaggtcttgattggatgtatatatatattcatcttaatctatatggatttctgaagtttgatctaaagttcacaccagattactgcaacccacgtggattaaagtggatacgtagcattcaaacaagtcctcagcggtgagatgttgtttgctgtaaaaagtaagatgttgcctcttcgctggcacggcaagtgttgttgtagccaagacgtcccccccccccccccccttctctattcatttcacgctatagagaacgccgatgtataaagtaacacgctatcaatcatcctactactgttgtggtccgtcaaccttgttacagtattttgtatgttgtgaacttaccctcttgtttaaatcagttggaatttttttcgctgtttaatcgtctcacagaatataaggttattgacaatgctactgcggggtgatgtgggtacaagcactatacaacacgaaatggaa

SEQ ID NO: 2203 - DNA, 1700 bp, Zea mays
cacgcacatgtaccgtgtggtcaaagaaagcctccaggtcggcgtagctggttccgctatcaaacagtccatccgcggcggccggaccgccggagccaccgcttgccttgtacgaagctcattccgggcaggggtcaggccgcacggaacggcggaggtcaaatcgaacgaacacgctttggtcatcacgggcctccccgtgtctccgtcgcgcaccgaagcaaacgcgcggccaacggccatcgacgacccacgcgggacgcgcacacgcggctttcgctccgcgaccgcgagcctcggctcgggctctcgagtatttatcattccgccccttgaatacatcacgtttgcatctctaaccacctgcgctgcgctcgcgtctctcgtccccctcagatccaccgactcgctctgagtctctgaccgccccttccgtcgtccccgttcgaaggcgcggcaagcgagcgattcagccagattcgattcgacatgaatcccgagtacgactaccttttcaaacttctgcttattggtgattctggtgttgggaaatcatgcttgcttctcagatttgcggatgattcatatttggacagctacatcagcacaattggggttgattttaaaattcggacagtagagcaagatgggaagaccataaaacttcaaatttgggatactgctgggcaagagcgcttcaggaccatcactagcagctactaccgtggagctcatggaatcattattgtatatgacgtgacagaccaagaaagcttcaataatgtgaagcaatggttaaatgaaattgatcgttatgcaagtgacaatgttaacaagctccttgttgggaacaagagcgacctaactgccaacaaagttgtggcaactgagacagcaaaggcatttgctgatgagatgggcatcccgttcatggagacgagtgccaaaaacgccaccaacgtggagcaggccttcatggctatggctgcatccatcaaggacaggatggccagccaaccagccgcggccaacgcaaggccagcgacggtgcagatccgcgggcaacccgtcaaccagaagacgtcttgctgctcgtcttaagcttgcctgatttctctggttccttgtgactattactaccgtttgtgcgagcatgcaaatgtatttgttgcattattgctgatagcatctgttcgttggccagatgagtagagagctgaaaaaatgttaagaacaccatagagagaagtctatccgtgctctctcaacttaaggagcaaacagcaagacttcattttttttctactttactgtttattagtcgcgttacatttgtgaacagttattgtaatgtctttttttttaactctgtattcgtagtgagatgaaatgcgtgtgtgggcaacaaatttcctttttggctagttgagtggtcttatcattgtgcccggtgacggtgacggtgcctctgtcctgtggccttgcaatggtctgtgggcttcgagtgggtgtgatactgatacgccctctagtgcgtttttgacatggagaagaacgccgcttggcccaccaccaccgccaattgctgtgtcctctgtggtgtgtcagcgcgagataacgtttgacaggcgaagcgatgttggggcacatgcgcaccaccgctgatcgtgaggcactgaaaatttcaaaaaaaaaaaaaa

SEQ ID NO: 2204 - DNA, 5213 bp, Zea mays
cggcgcggcgcggcgcatcggttcgctcccaaatctcattcccatgggccgtaaaaagcgaacatctacaccaaaccctacttcgccaccgtcgtacgccccccgccggccggcgggggctaaggtggctggcaacggcggggaagatgatggcgtgcgcgccgaggtcgaaaaggcactcgcctgcctgcagcgggggaaccacgcgcgggcggtgcgcctcatgagggacgccatcgcccaccacggggaggcctccacgccgcttctcctgcgggcgcatggtactgtcctcgcccgcgccgcctccgtccttgacgacccggccgcccgcgcgcgccgccaccgggcagcgctccaggcggcccagcgcgccgtcgagctcgcgccggactccatcgagctctcccactttcatgccatgctgctcttcgacgccgccaccgacacccgcgcctacgaggaggtcgtcgccgagtgcgagcgcggcctcagcatcgaggccccttccgaccccgcgccccactccctcaggctgcccggccccgacgtcgaccaggtccagtccgagctccgcaacctgatccagaaggccaatctcgcctcagtatctacctggtttaaaaccctgcgtagcgcgggcgacgataagtttcgcctcatccccgtgcaccgttttgccgacgaaccaatggaggcccggctcgtcccctcggcgccctctccgcgccgctcaaacgagatcaagaaggcgaccaagacctccgaggagcgccgccaggagatcgaggtacgcctggctgccatgaggctgctgcagcagcagaaggagcagagcaatggtgttgtgtctgccacccctgcctcttcccagtcacagggagatgaggccccctcatcgtctctgtcattggtgggtggacatcgagctgacaggagaaaaggcgggtctaggaaagcaacaggcttatctgcatctgaacgcactgaccaggcgcgtgcctactggggttcgataccagtggatcaaaggcttgcgttcttaaacactagcatttctgagctcaagtcacactatgcttctgcaatccataaggagaaagatgttgccagtgcagcatctgatgtgctgaatgaggtgatacgatttgccaacaagcatggcaactgggagttcatggtatgtggtaggtgtcggggacagtttacagatgttgaggcacaccggtggcatgtcatgggggaacatgttgggctactctcatctgagctgcaggaaatggtgccgcaggagattgatgctgactgggtagaaatgctcattggttggaactggagtccattggatgctactgcagcactgaaactgtttgaggaagatcaaactgacaatcttggaacagataggggcaaagaatcggatccgacggataattggagtaacaaagacaaccctgacatgtcagaatcctctgcctcgccacacaacggggagtgtaatggctttggagtggtggtgagggaaggtgacggtacgtggccactatcagatgatgacgaaagggcaaaaattttagaaaggatccattcattgttcaaaattcttgtgaagaaccataatctttcagtgtgcaatctaaacagggtgattcgatttgctgtagaggaactcagggggttgtcatctgggtcactactgcttaatcactcattggacaagtcgccgctttgcatttgcttcttggaggcatcgtcactgtggaaagtagctaaattcttgcaggatttagtgcaggcctctggaattaatagaaacctggagaatgatggactaggtgacagggatagttccccccaaaaccacaatgtactggagaaggttattcttagttctgattcttctgaactgatcattgatgggcaaacttttggtggaaagtttgactctgagagtgttgatactgacacactgttttcatggttgtacgctggatcctcaattggtgagcagctattggcttggaaccgtatgattgacgaaaggtcaaatcagtgcatggaccttattcgggcacttgggagggagttcaacaacttgcaaaactcatgtgaacggaagcttgaacagctgagaaatgaggaggcttttatttctgtagaggacctcttatgcgaagagcaaacacgaagggagcaggtggagcagtatgggttccaaagttttgaggagatcctcaggaagcggcaggcggagttgttggaacgcaatactgaggtgcagtccgacagtaacagatccgagatagatgcaatctcagctgttttgaagaaactccacacttcacacttcggttatgatgatgccttttctggaatggccccacgcctttttgacttggacggggtcgaagatgaatggaggctgcatgattttatacatccaaatgattcaatggtacacactgttatatcaaagatgaaggaaaaagttactgtggagattagcaagatagatgctcagattatgcgaaatttatctgtgatgcggcatctagagcacaagcttggacctgcttctgctcttgattatcgaatgattcttttaccccttatgagatcgttcttacaaagccatttgggagagctggtggataaggatgccaaagagagatctgatgctgcaagggaagccttcctggctgaactctccttggatgctaagaagaatgcaagcaaaggggctgatatgaaacaatcccatgaaaaatcaaaggataaaaagaagttcaaggattctcgaaaatcaaaggagctcaaggattcaagctggagcaaccagtctctcattcaccaagacagtaccgatgagggaacatcagagacatctcaaatgcttgctgattgtgatgatctgtgttgcaaatgctcgacaagtgaggattacttcaatgaacaagaggaagaacttaggcatagggtacaacttgaagcagaggaaagaaaattggaagaggctctagaatatcaacggtggatagaggaggaagcaaagcagaaacatcttgcagaacaatgtagaagtacacatgcatcttctgttattggcataaagtttggtgactttagctacaccgagaacgagaacaatttcagccagaaactcaatggaatcgagttcgactcatctgatgcacatgcattaaccagcagtgatatgagtgtttctatgttgacgttgaaaatgaatggggtttgcaataatgcacaacctataaagcctcttggtaattttggcacccaaaatcccaagagaagttctagtgaaccacaaaggtattctcaaggtcactctgcaggaatagagaagccaaattttgagaaagttggcagtggtgcaataccatcaacggatgtgtgcatcgaggatgattttgataaaaggtttcaagaagatcttgatgaagcagtgcgccaaagccttggatgcgatgcttatcctgctggtacagtaagcacttcaaatgggacagaagtgtatgggactggacttaaaaatgctgctggtgaatacaattgttttttgaatgtgattattcagtcattgtggcatataaggcggtttcgggacgagtttcttaaaacatcattactgcacaagcatgttgaagatccttgtgctgtctgcgctttatatggtatcttcattgacctgagcaaagcatccaagggacaaagagaagctgttgcacctacttcgttgaggattgctttgagcaaatcctacccaaacagcaaattctttcaggagggacagatgaatgatgcatctgaggtactgggtgtaatctttgagtgtttgcataagtcatacacttctcgtactgtctaccatggtgtatcccacgagaaaaattctattggatcatgggattgtgcaaatatttcttgcataacacataatctttttgggatggacgtatatgaacggatgaactgtcacaattgtaagatggagtctaggcagctcaagtatacttcatttttccacaatatcaatgctagttcactccgaactgcgaagatgatgtgtccagattcttcatttgatgaacttttgaaggttgttataatgaatgatcaactagcttgtgatcaagacgttggcggctgtggaacaccgaatcatatagaccacatcctttctaattccccacatgtctttactgttgttttgggatggcagaacaacaaagagagggtggatgacatatctgcaactttggctggtatttcaactgagatagacattagcatattctaccgtggtctagatcaaggaggcaaacacaccctggggtcagtggtttgttactatggccagcattaccattgttttgccttcaaggatggacggtgggtcatgtatgatgaccagacagtcaaggttattggtagttggggtgatgtgctcgtgatgtgtgaaaagggccatttgcaaccccaagtgcttttctttgaggctgcaaattaattattcttcagagtcgcaaaacgcgctacagcggttaacatgccctcaaatataggttttttccctgcggccatgaagattagaaatagggtagcagattcgttttgagcggggatatatagtactagcattcaacggtgcttttcgttgtgagtccgtaataagcagtcatctgagcattctagagcaaaaaagggagctgtttatcccccccttttttgctttaacctttggtgtaggcgctgaacttctgatctcatctgccaataaatcttcactgccgatcaagcgggtggagcattcgacttgaactgccatccaacagttgtagccgaatctgcatgaactcttcgttatacaccaatcatctatagaattttctgcttacattgggccgggcgggcgttctctctctctctgttttttttttggggtgggggtctggtataggagtgacagttttgaggccaccagatatagaatggaatgatatgggaatgggtgatgcggtgtgaactgtattttgctgtggatgatcttttgaaaagagtaaagctatctggaatatggatatggtaagaaatctgtagtacacgagtctatatatacaatgactcaatgggattatgcgagatgattataacgatgaataccaaaatctttatcacaactgttggttaca

SEQ ID NO: 2205 - DNA, 1476 bp, Zea mays
acctaaaggctaaagcacatgtatgtaccccctcccctcctctctctctttctctctcgtgcgtgtcgaagactccaagtcgaactcaaaacacgcaacacgcaagtcacgaacgcacgacaaaaggaagaaaaacccaagaaatatctctgcggccctgctcgtcccgagccgagccggcgagatggcggggatgtctcgcgcgatccgcaacttcgccgccgcgtcccggcgaaccctgaccgctgcttcggggccggcgctgccgaaggaggcggcggcggcgggggcgcgggtgagggcggcggcgcccgggcgcatggggcgggatcaggaggacgggaggcgcgtgcagtgggtgttcctcgggtgccccggggtggggaagggcacctacgccagccgcctctcgcagctgctcggcgtcccgcacatcgccaccggcgacctcgtccgcgacgccctggccacccctggccccttctccaacaagcttgctgagattgtcaatcatggaaaactggtgtctgatgagatcatcataaatctgctgtcaagacgtctggaagagggagaggaaaagggtgaattggggttcatccttgatggctttcctcgaaccataggacaagcggagatacttgaaggagtcacagacattgatttggtgatcaatctcaaactccgagaagaagctctgcttgcgaaatgccttggcaggaggatgtgcagccagtgtggagggaacttcaatgtggcctccattgatattgagggtgaagatggtgggcctcgaatgtacatgcccccactgttgcctcctccacagtgtgaatcgaagctgattgctagagcagacgatactgaagaagtggtaaaagagcggctgcgtgtgtaccatgatttgactgaaccagtggaggagttctacagagcacgtgggaaactgctggagttcaatctgcctggtgggatacccgaatcatggccgaagttactgcaggccctgaacatagaagaccccgacaataagcgatctgcagcagcatgattcttgttttgttataggaatgcacattctaaattgaacatctgtagactatgtcaaagctagtcaaattggtgggcattccttacatctttgggaagcctactccattctggatccagattattgtggcatggcactcaactgtacagtagattgatcatcgattggcaaggtcgatcgatggatgtgctgactgtgatcctcgaacgtaaggtgtgtaaaaaggcaagaaaataattgttgggcgtcgagacattcacttgtaggtcgtaccatgcatatgcttgttgaaagaggggagcatgccagaaacgtctgatttttatttttatttttttatttgggagggctggctggctggagcttttcgtgtatgtgacgagctacctatgtacgcaatacactaatactacactgcatgcgag

SEQ ID NO: 2206 - DNA, 1235 bp, Zea mays
gcctaatgttagtcgttcgaattgaataactaaccttaggtagaaaagttaggcaaagtgtggcaactgaggtagtgaaccaaacaggccctaaaaacgcaaggatttctcggttcctcctcgtcctcgcgctctcccggtctcctctcccccgagcatcccaaaaaatactcggccactgcgctatctcgcccaccaagccagcaccagcagcggcgcgcgatggccaccgcgccctacgcctcctccctcttcctggcttcctcccccatctccaccgcgccacgaatccgcgccgggccctgccctccgtccgcccagccatccctgcggctccggccgaggccgtccccggcagccgcggccgccgtccaggcggagcaccagcccgcgttgaccgcggcgccgaagccacccgcgctaccgttccgcgtgggccacggcttcgacctccaccgcctggagcccgacctcccgctcatcatcggcggcatcaacatcccccacgaccgcggctgcgaggctcactctgacggtacgcgctcctgcggccgccactgccctctatggttcctgcgtggtcccgtttctgacctcgcgtttgggaactttgtttcttcgccccgtgcaggcgacgtgctgctgcactgcgtggtggacgcgattctcggcgcgctggggctgccagacatcggccagattttcccggactccgacccccgttggaagggcgccgattcttcggtgttcatgagggaagctgtgaaattgatgcatgaagcaggctacgagctgggcaaccttgatgctacgctgatcttgcaaaaaccaaaaattagcccattcaaggagacaatccgatcgaatttgtgcgacctacttggggcagatccatctgtggtcaatctcaaggccaagacgcacgagaaagttgacagtctaggggagaacaggagcatagctgctcatactgtagttctcctgatgcgaaagtagaaagaacaaatggcagctaattgtatcatgctacacggaaaaggttgttatcttatacttgtgattgttgagtgatctagccagtatggaaaatcttcatgtggtagaaacaataaagctgattgcaatgagaatttttctgtatttcacttgtgctgtcaatttgcttcatggattcccccccttctacgatgtatcatgatgttgagttgtctttaattgatatttaggaatgagaa

SEQ ID NO: 2207 - DNA, 3676 bp, Zea mays
acagcccccggcgcgcgggcgagccgacgagagtgggagtgtacggcagcggtagggtgggtttgctctttgattggccgcggctaaacaccaaaccttggggaaatggagctgctcagtggtgcagtggcggagcgggagcttggggaagcggaagcttgcgagcagccagagcactagccattacccagcgctaccctacactgacaagtccatcgatctgatcgcgctgctgctgagtgcagtgtgtatacaaaaggccgtgaaggcggtaagaccgagctgcaaaggggtgtgagggagaagcgagaagcccgtgagctgagctgctgcggtgctagggagccagggtttcgtttcgtttcgtctcgtctggcccctcttctcttggcgcggccatggacgcctacgaggccaccaaggtggtgttctcccggatccaagcgctagacccggaccacgccgccaagatcatgggtctcctcctcatccaggaccacggcgagaaggagatgattcgtctcgccttcggccccgaatctctgctccacgctgtcatggccaaggcgcgcaaggacctcggcctgctcctcccggcctcgccgacctccgtcgcggccgccggccacgcgccgttcctgcagctcccacgccaaaactccgggcgcgccggcgccccatcgccgctctcggtgtcctcgccgtcgtcatgggggcacgcgccggcgttctccaggagcaatagcacgagtaatggtactggcaccgcggaggaggcggcgggggctggggaggagctgcccagtcccgtgaacggcggcgcagcgccgttcttccctcatcagtccggggacgcgctcctggacgacttgcagctgcaggagcagcttgcgttcctcaacgagggcagcgcgaacccggcccaccagctcccgggtttcgtcggcggggagtgccggagccccggtccgggtgatgcctctgggatgttcgcgttcggcctcgggtggcccaacggcggcccagcgcaccgccggagctcgtcagtcaacgagttctgccttggcggcggcggcggcggcgatggtttcgggtggaagccctgtctctactacgcgcgcgggttctgcaagaacggcggcagctgcaggttcgtacatggcggtctctcagacgacgctgctgccttcgctggcgccaagatggaggcagctgccgatcagcagcagcagcagcagtgccaggacttcctcatccgttccaagagccagcgcctcggctccgccgccttcccctactcctccaccggctccctcccaggctcgccctccgccgctagcaagtgcctcagctttctgctgcagcaacagcaacagcagcacgacagagccgcggcggccgcgtctctgatgctgggcggcggcgacgaggcgcacaagttcatgggccggccgcgcctggaccgtgctgacttcgcgaacatgatgaacccgggctcgcggcagatttacctgacattcccggccgacagcacgttccgcgaggaggacgtctccaactacttcagcatctacggtccagttcacgacgtgcgcattccctaccagcagaagcgcatgttcgggttcgtcaccttcgtgtacccagagacggtgaagctcatcctggccaagggcaacccgcacttcatctgcgacgcacgcgtgctcgtcaagccctacaaggagaagggcaaggtccccgacaagtgcaggaagccgcagcaaggggacttctccggctgcacgacgcccactggcgggctggacggcgggtacccctttgatctgcaccagctcggcggcaggatgctgcagcactcgagcagcgccaacgagctgctcctacgccgaaagctggaggaacagcagcaggccattgagctccagagccgtcgcctcatgggtcttcagcttctcgaccttaaggctcgcgctgctgctgcagcagcatcgccactgccgacaccaattggcgatgccttcgcgtccagccaacctgtgagcaccaccgcagtcgagtcgccatcgccgccagagtccgggcagcagctgctcaagctgaggagcggatttgctctggaggggaaggtcaacggtggtgataaggaggaatctgctcgcgaggcgagcccagacgccgctgatagcgaccaaagcggcggagagcacaatttgccggacagcccattcgcatcccctacgaaatctgctgcgcttttgcatgacagtttcactgccacggagaccgagagcaccgccgcgtcccgtgttggcgtggatgccggtgtcgggagcaagatcgacggtggaagcaaccatctccgcccccccgcgttggaaatcccttcgcccagctcctacttcttccccatgcacaggctgtcctccgatcacggagccatggggatgtaaagttcaccattgtaggcgagttataccccccaacctaatcatagaatactagaagccaagaaaagcgatggtggaatatatagggaaaaaaaaaggagtcgagtgtcagcatagtgttagctcccttatgttctagtaccttttttagaggatagttctactaaaccacaagagaagaagatgccattagccttgattaagaaaacggcagcatatgcagtattgccagatataagtatatatatattatatatacaaataatccagtgtcaccctagtctttagagagagatatataaatagtatctgtacttaatgtttaccagtagcaggcaggtaacatgagcacaaagatgttactgtgacactgtccttgatgtactctacaatgacaggccccccaacccaccccacccccactaggtttattatactaaatgcgaggttaatccacgattctggtaccagccacatgtcacatgtaaagagcagtacagctacagcctgctgcgagattcatcagatattgtatactactaggccactagggaggcccagtgactgtagaagtgcacatgaccatggcagttgtctgtaagctattttaactgctactagtgcaagatcccaagccaggatagagagtcatagaggtgtgtgtgtatgcgtgggtgtctcggtatgggtctcctagtatgtccgcagtctgcagagacaggtcgctgcagaatactactacaatactactagtacatgattgtattgacctagttgcgtggatgtagttgacagtttgacacctctatctacagacagaatggaagtaaaagtgagaaagaaagtttgtgcgagtgcttttgcctccattgatccatctttcaaaacctcgaaaggtgtgctttgcccctccagcggtccaattgatccacctttcaagatctcaaaggtaccgggatcaggtgttgctgctgttgtgagatgggtgtgaggatcttgactgaagaatgatggcggtagcgggtagcctatgagtgaatttatttaagtgtccaaaaggcttattttggaacgcaggaatttcagagaaatcgtataggaaatttacaggaatcgtgaagctgtgatctattcagatgtggctgtggttgtttgcagctatatatacagtggaatctaatttatttttgcacccataacagtttctgcagcaattaaaagttggc

SEQ ID NO: 2208 - DNA, 109 bp, Zea mays
cgtccaaagggatcgcattgatccatcattccttccattttttcatgcatggctggtcttcgtcgtctgcaaggacttgtcgatggatcaatgcgatccttttggaggc

SEQ ID NO: 2209 - DNA, 2163 bp, Zea mays
cacgcgctcgtaggcagtaggcacgcacacgccgccacgtcgcagccacgagcccacgccacgaggccacgaccccaaaaacagccgtccacgtcgcttccccggtccggcgaccgcgcccgctgttttatacgcgacccggcggccgcacccggcttgcgcacgccgttcacgtcccccggcccccgctctcgtttcccccgcccgcaccaggcacgctcacgcgctgcgcaccggatggcccctgctaacgtgcgcgcggcgcaggcgcaggcccccagcgccgaccgcaggttaagtacgctagtggggcacctgctgccttcctccccacgaagagcagcagcagacacctccgccacctccaccctcgaatcgttccccaccatggcgtcgcagggatcctccgtcttcgccgcactcgagcaggccccggaggaccccatcctcggagtgaccgttgcctacaacaaggatcccagccccgtgaaggtcaacctcggggtcggcgcctaccggaccgaggaagggaagcccctagtgctgaacgtggtcaggcgcgccgagcaaatgttgatcaataatccgtcacgtgtcaaggagtacctaccaatcaccggtctggctgaattcaataagctgagcgctaagcttatctttggcgctgacagccctgctattcaggagaatagggttgctaccgtgcagtgcctatcgggtactggttctttaagagtcggaggtgaatttcttgcaaggcactatcacgagcgcactatctacatcccacaaccaacctggggaaatcacccaaaagtcttcaccctatctggcttgaacgttaggagctaccgctattatgatcctgcaacatgcagccttcacttcgaaggactcctggaagacctcggttctgctccttcaggttcaattgtactgctgcatgcctgtgctcacaaccctactggagtagatcctaccatcgaacagtgggaacagattaggcagctgatgagatcaaaatcactgcttccgttctttgacagtgcctatcaaggctttgcaagtggaagtcttgacaaagatgctcagtcagtgcgtatgtttgttgctgatggtggtgaacttctcatggctcagagctacgctaagaacatgggattgtatggagagcgtgttggcgctttgagcattgtatgtaaaagtgccgatgtagctgttagggttgaaagtcaactcaaacttgtcatcaggcctatgtattcaaaccctcctcttcatggtgcctctatcgttgctaccatactcagggacagcgagatgttcaacgaatggactctggaactgaaggccatggctgataggatcattaacatgaggcaacaactatttaatgcgctgaaatccagaggaacccctggtgattggagccatatcattaagcaaattgggatgtttactttcactgggctgaatagcgaacaagtcgcattcatgaggcaggaataccacatttatatgacatctgatgggaggatcagcatggccggtttgagcatgaggactgtgccccatcttgcagatgccatacacgctgcagttactcaactgaaatgaggatagtatcgcagctttcgtgaataaaacctgaatcacccacaacaatgttctaagtactcagccagtggtatttactggttgacctactgtagtttgcgtcggaatagatatgtttttttactcttcgtggggcagttttgtactggtggattcataaggactctgattatggtgcgttcggaacttataataataagcacatgaaattttgcttcaggtgcagtgatgctgtctcattaagttattagttattaggttgctgtcttattaagttatcaggtcgcagctgggttgaagcggagcacctgtcttgatttatctcttctcttttctagagagcttctgtcattcgtgtgcccttttatatcattttgctctatcaatgattatcctacaatctgcagtagttttgattccgttttgttctttgcctgctgtactggctcagaagtacggtaatgctcgcaagctttgcggttgttgatttagggactgaaaggatctgtttagaaaggtgtcgatttggagactcaaaaggaacga

SEQ ID NO: 2210 - DNA, 3295 bp, Zea mays
atgcctcccgtgaaggccgaggacctggttgtgcacgccgtcaaggagcagttcgccggcctcgactactgcatcaccagccccccgccatggatcacgacggtgctcgttggcttccagcactacctggtcatgctcggcaccaccgtcctcatcgccaccatcatcgtcccgctcatgggcggcggccatgccgagaaggcgatcgtgatccagaccatcctgttcctctccgggatcaacacgctgctgcaggtccacttcggcacgcggctccccgccgtgatgagcggctcctacacctacatctacccggccgtggccatcatcctgagcccgcgatacgcgctcctcatcgaccctctcgagagattcgtgttcacgatgaggtcgctccagggcgcgctcatcatcgccggcgtcttccaggccgtcgtcggcttcttcggcatatggagagtctttattaggttcctgagccccctcgcggcggtccccttcgtcacgctcacgggcctgggactcttcttcttcgcgttccccggggtcaccaagtgcatcgaagtgggtctccccgcccttgtcctcctggtgatcttcgcagagtacgcctcccacgtgttcgctaaggggagcttcgtgttcagccggtgcgccgtgctggtgaccgtcgtgatcatctggatctacgccgagatcctgacggcggccggcgcctacaacgagaggggccctgtgacgcagttcagctgccgcgccgaccgctccgggatcatccagggctcaccttgggtgaggtttccttatccgttccagtggggataccccattttctgcttccaggattgcttcgccatgctggcggcttcttttgcgtcgcttattgagtctaccggcaccttaatcgcagtgtcaagatactcaggcgcgacgttctgcccaccctccgtcttctcacgtggaattggctgggagggtatatctatcatactggacgggatgtgcggtacactgacaggaacagcggcttcagttgagaatgcaggtctactggcagtgacgcgagttggaagccggcgagtcattaagatctcagccttgttcatgattttcttctccttgtttgccaaatttggggcggttcttgcatccattccattgcctattttcgctgcactgtactgcgtcctcttcgcttattcagctggtgcaggcttcagcttactccagtactgcaacctcaactccttgaggacaaagttcatactcagcatctcgttgttcctggggctgtccatcccacagtacttccgggtctacgagatgttcttcggcttcggaccagttcacacccattcagtagcggtacgcgagctagatgcagtagacgaaataaattccattaagctctcacatcctcacctctcttcctcctacttgccgttgcagttcaacgtgatggtcaatgtcatcttctcatcgccggcgacggtggccgccatactggcctaccttctggactgcacccacctgtactgggaggctagtgtgaagaaggacaggggctggttctggtgggagaagttcaagtcctacaagtatgatggcaggagcgaggagttctaccgtcttccttatggcttgagcaggtacttcccctcgctctaggacgccgggaggaagacgacggacccaagttctatgtagctgctcgagcgtagaagctgaacatcagttgaaggcaacagaaccatatgttattttcatatatcaagcagttgggagggagcttgatgttttgatttaccttgtaaaacattttggatgataaacttttgcaattactgggagagtaggatcaaccaggggagaattctgcaacaattcagtcaccgtttttgcttcagattcgaaacagaacacagatgccttcacaggcttcgattattttcccacatcatccatgcacaagtcaagcgtgagttcgctaaagcaaaagcatagtcaagttactacccgagtggagtggcaatccgattatttgtcctcgccgctggaggatggtccagccaccgctgccttgggcacccacacaagcccgtgcggctgtgcagccctaatgccgcgggggcgccagggttgagccgacctcctcgcaatccgtggattcggcccggtcacggcctggacctccaccaccggttgccggcgctgcccttcgactaggccctctggcttcgcctccatggtcttgcggagcatgccaccgctcttcgatttgctcctgccatcggcgggcgaggtggaagggttcagagccggggccggggccggggacggggccggagccttcccatcaggagaatcgctgcctgtcccggcgtctgcgagcctgggcgctgcaggtttcggtttccccgcgttgcccgacttgacgcctcgcggcagcgacggaccggccgtcttcaccttcaccggaccatcgccccggctcgtctctgcgctccggttacccgcgcctttccccttcctccccttgcaggtcaggtggcccggggatgatgccacggccgccttggccggatcgagtggcgcaaccgaggccttccccatcgccttgagttcgctcttgatgtccaccttgccgccgttcgatgttggaggagctgcctcggccagattacctggctcgcccttcttattccccttcctcttccccttccgcgggtacttgcgtccgccacggggatggggtgcactgtccgcgacatcgtccagccccttcttgccacggctacctcctaccatccattccctcttccctgccgcaacttccccgcacgtcggcggcgctcgatgcaccacggccacccaccggtggccctgccccccatgctgcctatccttggccccacagaaggcctcgcgcgagaccgatcgtcccttagtctctgccttcagcgccgcctcccgcttaaccgcggcggccatggcctcctcctccgcccttagcgccgcctcccgcttaaccgcggcggccatggctgcggcggcctcctcctcccgctgccgcttctcctcctcctcctccttctctttgaggcgaagctcaaggagctgctggaggctgacgtagttgggagggatggaaggcggctcccgcctcgacttggcgatcggcgccgccttcatcgcttctcccctctcggtgatgggccttggacaggaaggaaaaagagtattgacggaatcgggactctgtacaatcctcttatgtatatctccactagtttcc

SEQ ID NO: 2211 - DNA, 1857 bp, Zea mays
gaactgagcaagaccccggcccggtcgactgagctgatcagcctgcccaggccatgtgcagccccaacatggcacgttctccctcgctcctctgcgtacacacagaaacctctcctccctcccctctcgcagctagcgtgccggcctgccggtgcccttctgcccatctggcttataaataggcccacacggcaccacggccaccaccaccacccaccagtccaccaccactgctcgcactcactccaccgctgcccacttcttgtttgtattgtatccagactccagaggaagccgagagggccaatgaggcaaggcatgagctccccttccgccgccgcggcgctcgtgctcctcctggccctgctcgccggaggccagtgccgagaggcccagctcgacgccgcggacgccggcaccggcacggagaactacaccgccagcgacgccgccgtgtactggggcccctggcagagggcccgggccacctggtacggccagcccaacggcgccggccccgacgacaacggtggcgcgtgcggattcaagcacaccaaccagtaccccttcatgtccatgggctcctgcggcaaccagccattgttcaaggacggcaagggctgcggctcctgctacaagattcggtgcaggaaggacccgtcctgctccgggcggacggagacggtgatcatcaccgacatgaactactacccggtgtccaagtaccacttcgacctcagcggcactgcgttcggcaggctggccaagcccggcctcaacgacaagctccgccactccggcatcatcgacatcgagttcaccagggtgccgtgcgagttcccgggcctgaagatcgggttccacgtggaggagtactcgaaccccgtctacttcgcggtgctggtggagtacgaggacggcgacggcgacgtggtgcaggtggacctgatggagtccaagacggcgcgcggcccgccgacggggcggtggacgccgatgcgcgagtcctggggctccgtctggcgcatggacaccaaccaccgcatgcagccgcccttctccatccgcatccgcaacgagtccggcaagacgctcgtcgccaacaacgtcatcccggccaactggcgccccaacaccttctaccgctccttcgtccagtacagctaaccgatcgggatccgtgccctgcccgcaattggagctggctggctggggcgctactcggctcggtcaccatcgtctacagtactatactatgctctactaccactagactgctgctgttactactagtctactaccaccaagtacggcggaacggaacagctagtcgtcgtcggcggccttgggaggggaggtgtctccggtcaccgtgccgttgcagttgtatcgtgatcatggtcctgggagttgttgcatccggggcgcgctttttaggtcaggcgtcgtgtgcgatgtttgtggggtcaggctggcatgtcatgccgtgcgtgaccctgattgcgagccggcaagcaagaagacaaaaaaactaaagccgtgtgggaaaatggaggaggcaggcgtacaagctacgctctcccgcccactgttgcttttataatttatcatcatcatcatcttcattccgatcggtgattaatcgaaaagtatattgtaatgtataaacgccattttcctttcgtcagtgccttttttttcctggttgtggatgttttgtttgcgcattcagccttgctgtgctgaagccaaacgcaagtaatgtgctgaagccaaacgcaagtacacaagtaatgtacataatgaagatgtgaaagaaagaaaaaacgacagaaatataaactcccgtttgacgat

SEQ ID NO: 2212 - DNA, 1443 bp, Zea mays
atgcccgcgtcccgcatccctttcaagcgctgcaccgccgccgtcccgggcgtggggaagcccggccccgctgccagcatgccgcccgccaagcgccgccgcgaccgcgtcgtcccgtcgcggtccagggactcgatgccgccgcccgcgccgcacgtggaggaaggtgacaacaggcacggggaggtgtacaacgtagagttgctcatggccgagcccaaagtcgactcatttggtcccgtggagaccgcgttgtggacgcaagcgcggacggcgcccacggatgccgacctgtaccgagcgtgtcgtaacataaacaagaggggcagctgtgggggagctgccagcggtagtgtgctcacgtctgtgagcaatgccgcctcggacgcttgtgctggtggcaatggcaccattgtccgagtgagcaatgctgccttggaaggtggtgctggtagcaatggtggtctggaggggagacctgcggtggtggagtgcaagcccaagagggagggcagcgacaagaaagaggatttctactggccggaggattttgtgcttggggatgtcgtgtgggcgaggtccggcaagaaatccccaatgtggcctgcactggtgattgaccccctgcagcatgcgccggaagtcgtgctcaactcctgtgttcctggcgctctctgcgtcatgttcttcggttattccgctaatgggcatggcagggactatggatgggttaagcaaggaatgatctttccctttgtggactacctagacaggtttcaaggacagcctctgtataagctcagaccaaccaaattccgtgcagcaatcgaggaggctttcctagctgaacgtggtttttttgatctcgacatggatggggcatgctcaccgcgaaagtttgtagataagcagtctgatcctaatggctttcaggaagaggccgcttcaaataacgagcaggagtgccaatctgagtctcaggttgttggcaaatcggcactgtgttgtgatagctgtggtaatcgcctaccatccaaggtttcaaagaaaaggaagcaagggggtgagcaggtgctttgtaggcactgtgaaaagttattgcagtcgaaacaatactgtggcatatgcaagaaaatttggcaccacacagatggtgggaactgggtttgttgtgatgagtgccagatttgggttcacgtagaatgtgacctgacatgcaacaacatggaggatttggaaaatgcagattatttttgtccggattgcaaatcaaaatgcaaaacagttccagcaactgaaaaaatgaatacttcccacagttcagaatgtgctagcacttcaaagggaaaatcaaccccaatgatagctgttttctgcaacggcgaggaggcattgtatgtacctgagaagcacataacattaccctttatgagagcaggctaa

SEQ ID NO: 2213 - DNA, 1109 bp, Zea mays
ccgcgagaccaccacctggctcgttccctccccgctattaataattctctcctcctttcgccctgcggcttcgctgctgatccgaagagctagcgcgcgatggccaacaacctcctccgtccgctcgcgctcctcctggccgtcctcggctgcgcgctgtgtccccgcgccgatgccaccgcgttcgaggtcggcggcgacgacgggtgggtcgtgccgccggccagcgacggcggcaggtacaaccagtgggcgtccaagaaccgcttcctcgtcggcgacgtcgtccacttcaagtacagcgaggactcggtgctggtggtgacggaggccgactacgacagctgccgcgcgtcgcaccccgtcttcttctccaacaacggagacacggaggtgacgctggaccgcccgggccccgtctacttcatcagcggcgagaccggccactgcgagcgcggccagcggatggtcgtcagggtcgccggccagggcgcgcccccgccggcgcctcccagcccgccggccccaaccggcggcagcgccgcgccaggcaccaccagcggcgccatcgcggcactggccatggcgttgctggccatcgccatcggcgtctgagtgatcactcactcgcgggggcgagtttgcgattaatggcgctctccattgtttgcgattaggcgcgcgtgtctttcgtagatgaaatgaaattagtggtgagaatgagaagattgcgagaagagtttttgttttgttttatttaatttttggattttgcaccccccccccccccccccacccaaaaaaaccgtattgtttcgatgtacgtattttcggcgcgtacacatgtgacgacatgatggcaaaagtattatgcccggcgtttcgaatttgtagggcatttaaactttcacaagccctttgcgtgtcacgtcctgcagcacagctcttgggggtgccagaacatggaccggaccggaccaaggtattccagtgggctgctttgccacattctgcagcctggtggaaaccgtatgctccgtggcagcagcaattgcggggcccaggcccagcgtgccaataaaaggatgggggtagatgcagtcatttaa

SEQ ID NO: 2214 - DNA, 2013 bp, Zea mays
ctgtccctggggcatttgagagcggatgaacgagaacgatgtgtgcgtttctactattctgcagcctgcccctctgcacaggcgcgtccacgtggccgcgcctcatcatcatgcatcccgctgacggctgaactgcctcctccgctccgcagcaagtgtcgaagcgtgggctcgtgcgcgtgcatccgcttgtcccttgccggctcccccgctcctcaaatattctcgcccgcccggcctcccctttcctccatcctcatcaaccatttcattccttcctgacttcctcctcccgcacgcagcgcagcttgcaacccgcaacgaaccaaggccgcgccgcgcgcgccctgccggccgtcagagggaaacccagctctaactgaagtgccggctacatatactgctgtgctagctagctagctagctactcttctggtcctgagcgcacgtacgccatggctcaggaggacgtccacctggacgatgccggcctggcgctgggcctgtccctcggcggcggcggcggcggcggagcctccgccgcggcgcgccacggtaccagcagaagccggctgagcacggaggcgccgcgcacgctggagccgccgtcgctgacgctgagcatgccggacgaagcgacggcgaccgcgaccggcgggtccggcggcagcggcggggccgcgcgcagcgtgtcgtcgcggtcagtggagggcgtgaagcgggagcgcgtggacgacgccgagggcgagcgggcgtcgtcgacggccgccgcggcgcgggccggcgccggcgccgaggacgacgacgacgggagcacgcggaagaagctgaggctgaccaaggagcagtccaagctcctggaggaccgcttcaaggaccacagcaccctcaacccgaagcagaaaatcgcgttggcgaagcaactgaagctgaggccacggcaggtggaggtgtggttccaaaacaggcgagcaaggacgaagctgaagcagacggaggtggactgcgagctgctgaagcgctgctgcgagtcgctgagcgaggagaaccggcggctgcagcgggagctacaggagctccgcgcgctcaagcagctcgccggcccgcacccacatcaggcgccgtcgtcgtcgcccgccgccgcgacgcagggcgtgccggtgccggtgccggtgccgccgccgttgtacgtgcagatgcagatgcagctgccgatgccggccgccacgctgagcctctgcccgtcctgcgagcgcctgcgcggcgggcccaaggccgagcccgacaggccccaggcagccacccaccgcttcttcaaccccttcacccactccgccgcctgctgaatgatgattttgcttgcgcgcgcctgcgctgcagctgcgcaccagcacgcgcatctaccttggcgtacgtgcgcgtgcatgatgcatgagcaagcaacacgcagcggcggcagcgcgcgaacagatagcggcaccgcccaccaccgtaccgcagatactagctaccacgtacgtaggtatacactcctccgacgatccatccacctcgcgtacgtcacaagtaacatgtgatcctccgatcctctagctattttatttcttgatccggaggggttaaagttacttgtcagtgttcccatcagctaatcgatcgatcgatcgatcaatcataggcttgataggaggaggtagtagtcaaaatagccggtccgtccatccatccatccatgtatatttttgcgcatgcatgctgtaattcggtccctctcgatcggccggtctacttgctcatcatccctccccttcccttctcgataggagttctacgtagcttcttcatttgtcttctttttttttggtcttgtctcacacagacacaggttagtataataataatcgtccgagcgagggcagtagttgattaagtggtagtatatatcgatcttaagattgaccccctgtacacctattattggattgagatgcttctggtggtcttctgctagct

SEQ ID NO: 2215 - DNA, 1774 bp, Zea mays
cacaggccacacatgttggtggacctaacaaatcaccttctcgtcaaccgggtcggctcgggccgggcccacgccagctccccctcccaatctcgattctcctcatcacatatcactgccgatgaaccttccagtagcctgagcgccggggccatcggtagcagagaggttttgctgcagagagctcaagaaagatgtacgtggtgaaggatattggcggcgccatcgggctgatggcggtggcgctggtgctcctgggcacctggccggttgtcctggcggtgctggagcggcggggccggctgccgcagcacacgttccttgacttctccgccaccaacttcatggcggccgtgctgatcgccctcaccttcggccagatcggccccgccagcagcacgcccaacttcctgacgcagctcactcagttcaagaacaactgggcttcggtcttgtttgccatggcgggcggcgtcaccctgagcctgggcacattggccacgcagtacggctgggcgttcgtcgggctctccgtcactgaagtcatggcctctagcctcaaggtcgtcatagggacaacggtcaactatttcctggacggccggatgaacaaggcggagatcctctttcctggcgtcggctgcttcctgattgcggccatccttgggtcacttgtccacgcttccaatgccgccgacaaccaggagaagctggctaataataacgcttccaatgcagctgcagctgcagatgaggagaaggatctcaccaaacacctcctagagctagagataccatcccaagaagcagagccggatgcaggaacggcagggttcctggttggtctggaggagaagaggtcgattaaagtgctgggatcccacacgctgctgggccttggcatcgtggtgttcgcgggcatcttctacgcgctcttcgcgccagcgttcaacctggccactaacgaccagtggcacacgctccccgccggcgtgccgcacctggcggtgtacacggcctacttctacttctccctcgcatgcctcgccgtcagcgccgccctcaacgtgtggctcctctaccggcccatggtcggcgtgccaagctccaccctggcggcctacgtcctcgacggcgacggcaggggcctcgcgatgctggccgggatgctgtgcgggctcgggaacgctctcacgttcatggcagggcaggccgccggttacgccgccgccgactccgtgcaggcgctgccgctggtcagcacgttctgggccgtcgccctcttcggcgagtaccgccggtcgtcgcggcgcacgtacacgctgctggcgagcatgctactcatgttcacagtcgccatggtcctcctcatggcttcctcaggaagccgctccatcattcactgagctggccacgtggatggatatgcgatgcgatgcgatgaggagaatggacaccgggatagctcttgtcttgtgctggaatggaatggaaccaacccactagctgtacagagcgatcatgctacgtccacccactcgtccatgaattgatttgtctctgtatttttttttaaaaaagcgtgcgctgtcacccgcgggccgcggtagcatgcagcccgtctccagcggtctacataaagtttacttaaaaaactgttttatacttgtatgcactataaactacactgttagtggagtttgaatatagctgtagggataggtaagctgatagagatatcctgatatccccaccttaccaattagcccgctgc

SEQ ID NO: 2216 - DNA, 1561 bp, Zea mays
aatcaatttatagttgtgctactagaaacaaagccatactatagttcttccatccgtagcttcgaaaacgatcgaaccacgtgacagtaacaccggaaaattcaaggaaggtcatctagaagcgcgacgacaaatggtgatgcagctccacctctccagtccccgctatataagcctgggccgtggccagcctccttccgaaccaaaattttccaaatcaagtgctgaaattccctccgaaccacgacaccacgtgaggggcaccggagaccaacaaagatgctgcttaacccggcgtgcgaggcggcagcgccgatggacagcatccggcatcacctcctggacgagccggcggcggcggcgaccgcgagcgcggctccgcggccggtgtactgccgcagcacgagcttcggcagcctagtggcggaccaatggagcgagtcgctcccgttccgccccgacgacgccgacgacatggtcgtcttcggcgcgctccgcgacgccttttcccagggctggctccccgacggctccttcgccgccgtgaagcccgagcccctggcgttcccggactccccctacgagcgcggatcctatccctgccttggtggcttccttctcgcggaggggcctgagacgccgaccgaggcggcgacgacgcccgggagcgaggaggaggccgcggcggcggtgtccagggggaagcactaccgcggggtgaggcagcggccgtggggcaagttcgcggcggagatccgggacccggccaagaacggcgcgcgcgtgtggctgggcacgtacgacagcgccgaggacgccgccgtggcctacgaccgcgccgcgtaccgcatgcgcggctcccgcgcgctcctcaacttcccgctccgcatcggctccgagatcgccgcggcggccgccgccgtcgcggccactgcccctgccgcgggagacaagcgggcgtccccagagccgaccgcgagctccgactcctccccttcggcctcctctgcgacaccgaagcggaggaagagaggcgaggccgctgccgcgaccatggccatggcccttgtgccgcccccgccggcggcgcaggcgcccgtccagctgaccctcccggcccgtccgtggttcgccgccggccccgtccagcagctagtgagctaactgatggtgtaccagtggttcgtggttcatggattcatctcagtgcaagaacagagcaacaagatgcgcatcaattcaaacacaggcacacgcgcgcgcgcgcgtgcgctggtccaagaaatgcgtgtgacgagctcgagggcatcgtcatctggatgttctctggttcgcatggaaactgttcctccatggtcgctagtgtggtggcttgtgaattgtgatgtgtagaaccagaatgaatcgtgtttgtggcgtcattgcattggattcggacgagttgaaatcggaagcttctctgtctgtgagagaggctggtgcaagtttgcatcaccatgtctcgaatggatattattctttgttctttggtattcaaagtggttcctttgaaatcaacaga

SEQ ID NO: 2217 - DNA, 3708 bp, Zea mays
tgtggcctttgccatgcggacatatgggattcgcccactcagaattatattcccaccttcacactcggctattggccccgtctccaagaaaacatcgcagcgaagcttcagctcggctgtccaccgcggcggcggcggggaacggcgtgagcgcaggacgaaacgaaacgaaacccatctccgcaagggcagcaaccctaccgggaccggcagctcgctcgccttgcgccgcgcattcccaccacgcgtctccccaaattcgcggccgtctatatatataaagaccccgcccaccaccacttttgccatcgcaacccctcgtccttttttgcacagcggccatgcctcccctcacgagctccctcctctcccgctccaccaccggcggctcctccgcccgcggcgtggcggtggccgcagcgatctccaggcccgccgcggacgccgccccttcctcctcgtccccgcctgcccgtccgaccccgaggccgcgcccaagcccggcgtcgcccttcgcgtccggcctcgcgggccgcctcttcggcggccaccgcgccgccacccgctccgcgtcgtctgcggccgccgtcttcgagcgccggtttgcctcagccgcgaccaggaactcgtacgatgaaatactgacgggcctcgggaggccaggaggcggagaggagtttggcaagtactacagcctgcctgctctctccgatccgcggattgatcggctcccatattctatcaggattcttctcgagtcggcgatcaggaactgcgatgatttccaggtcaccgggaaggatgttgagaagatcttggactgggagagaagtgcaccgaagcaagttgaaatcccgttcaagcccgcccgtgtcctcctccaggattttactggtgtcccggctgttgtcgaccttgcgtgcatgagggatgctatgagcaaactcggcagcgacccgaacaaaattaatcctctggtacctgtagaccttgttattgaccattcagtacaagtcgacgtggcaagatcagcaaatgctgctcaggcaaatatggagcttgagttctatcgtaacaaggaacggtttgggttcttgaaatgggggtcctctgcattccgcaacatgcttgttgttccacctggatctggcattgttcaccaggtgaatcttgaatatctggcaagggttgtgtttaataatggtgggatcctttaccctgacagcgtcgtaggcactgactcccacacaactatgatagatggtcttggagttgctgggtggggagttggtggtatagaggcggaagctgcaatgcttggccagccaatgagcatggtcttgccaggggttgttggcttcaagttatcaggcaagctgaggaatggagttacagccactgacttggttctaacagtaacccaaatgcttcggaaacatggtgttgtcgggaaatttgttgagttctatgggcaaggcatgagtgaattgtcacttgctgatcgggcgaccatcgcaaatatgtctcccgaatatggcgcaactatgggtttcttcccagttgatggaaagacgctggactatttgaagcttactggccgaagtgatgatacagtggccatggttgagtcctacctgcgtgcgaataagatgttcgttgatcacagccaggctgaagctgaaagagtatattcttcttatctagaactgaacctggaagaggtagaaccatgtctatcgggaccaaaacggcctcacgatcgagtgacattgaagaatatgaagtctgactggctttcttgcttggatagcgatgtaggattcaagggttttgctgtccccaaagagtcacaaggcaaagttgcagaatttttgttccacgggactcctgcaaagataaagcatggtgatgttgtaattgcagcaataaccagttgcacaaacacatcaaatcctaatgtaatgctgggagctgctttggttgccaagaaggcttgtgagttaggcctggaggtaaagccatggattaagacgagccttgcacctggttctggtgttgtgaagcagtacttggataagagcgggttgcagaaatatcttgaccagcttggcttcaatattgttggctatggttgcacaacctgcattggaaattccggggagcttgatgaatccgtatctgctgcaattactgagaatgatattgtttctgctgctgtattgtccggaaacaggaattttgaaggacgtgtgcatcccttaactagagcaaattaccttgcttcccctccattagttgttgcttatgccttggctggcacggttaatattgattttgagaaagaacctattggaatctcgaaagatgggaaagaggtttacttccgggatgtttggccatcaacagaagagatagccgaggttgtcaagtcaagtgtgcttcctgacatgttcaagagcacatatgagtccatcacccaaggaaatcctatgtggaatgagctgccagtctcaacaagcactctctatccctgggatccatcatctacatacatccatgagcctccttacttcaaggatatgacaatgactcctcctggcccgcgaccagtgaaggatgcatattgccttctgaactttggtgacagtatcacaactgaccacatctcgcctgccggaaacattcacccagacagcgcagctgcaacatatctgaaggagcgtggtgttgaaaggaaggacttcaactcatatggtagccgaagaggaaatgatgagatcatggctaggggaacctttgccaacattcgtctcgtgaataagttcttgaagggtgaggttggacccaagacaatccatgttccatctggggataagctttcagtttttgatgctgctatgaaatacaagaatgaagggcatgatactattatcctggctggtgccgagtacgggagtggtagctctcgggattgggctgcaaagggcccaatgcttcagggagtgaaggctgtgatagcaaagagctttgagaggattcaccgcagcaatcttgctggcatgggaatcatccctctatgcttcaaagcaggggaggatgcagacaccctgggcctaaccggccatgagcgctacacggtccaccttccaaccaatgtgagtgagataaagcctggccaagatgttaccgtgacaactgataatgggaagtcgttcacttgcacactcagattcgacactgaggtggagcttgcttactacgaccatggtggcattctaccatatgtcatcagaaagattgcggaacagtagattgagatgattgcgatgcggtgaatcgtaattggtgtaaacgacccatttttgagtacttataataacctctgagtttctcagagtgagctgtctgaacttttagtaaccttttgctttctttaagacactgttaataatatgttaactcctgcaatatctgaatatacatttggcagatgattccctatgttgtaaatgacactagttcataacactgacgcagttcaaagcggttcttgttatctggtggtactcaaattagtactgcaaacaatcgattagctgattttattttgagttttgtattacgaacctttttgactggtgaaacggttattccatttgcttcaagcgatttggaaatgattgttacagaaagctgtttgttacagtg

SEQ ID NO: 2218 - DNA, 2574 bp, Zea mays
aggggcgtatttgtgggaaaaaaacccgaaaagggccaatttgcaaaaaagttggaggagagcgtccaccgttgaagccagtctaaagacttccctcctctctctcttcgccgcccctgtttccgccgccccctgtaaacctcccatccgccattgctaatccagccactcctccccaaaccacgggatctatcctactccctcctccattcggcagtgccgcgtggcacacctatatataaacacccggactccacactcccccggcatcgccgccccccgtcccgacgaattggaatacggaaagcgaaaggtaagatctttcccccggcctcgcgatccatggttcctgcttaccagttagcaccgatgatgatttttgcggcgccggccaccgaggatctctctcttttttttaatcctgctcactcccctaactgtatccagtgcctgccattcagaatttatttttcaaaagacacttttacttcgatacaaacgaagttcgcggcctccatgcccaccctaccacctttgatctgatccactctggcaccttttgactgcattgcgctcgccgcgatccgatcctagttcctaacccatggaaatgccgtttctcgtgaaccagatgatggatctcgccgacccccagcagcagcagcggctcatcgccggcgcggcgctgctgctggcaaccgcggccttcctcaggctcctcctgggctcccgctccgggggcggcaagcgcctgccgcccaccatcccgggggcgccggtggtcggcggcctcgtcaagttcatgcgcgggcccatccccatgatccgggagcagtacgcccgcctcggcagcgtcttcaccgtccccatcatcacccgaaggatcacgttcctcgtcggtcccgaggtgtccgcgcacttcttcaagggcaacgaggccgagatgagccagcaggaggtgtacaggttcaacgtgcccaccttcggccccggggtcgtcttcgacgtcgactactccgtcaggcaggagcagttcaggttctttaccgaggcgctccgggcgaacaagctgcgcagctatgtcgaccagatggttgctgaggctgaggagtacttctcaaaatggggagaaagtggcactgttgatttgaagtatgagttggagcacctcatcatactgacagctagccggtgcttgctgggaagggaggtgcgagaaaagctgttcgacgatgtttctgctctcttccacgaccttgacaacgggatgcagccaatcagtgtcctcttcccatacctcccaatccctgcacataagcgccgcgacagggcacgtgcacgtctggcagaaatctttgccaccatcatcaagtcccgcaaggcctctggacagtctgaagaagacatgctgcagtgcttcattgattccaagtacaagaatgggcgttccaccagtgagggcgaggtaaccgggctacttatcgcagcactctttgctgggcagcacaccagctctatcacctcaacctggactggagcatacatgcttcggttcaagcagtacttcgcagaggctgtagaggagcagaaggatgtcatgaaacggcacggcgacaagattgatcatgacatcctcgcggagatggacgtcctctaccggtgcatcaaggaggccctccgtctccacccgccgctaatcatgttgcttcgtcaatcgcacagcgacttcaccgtgacaacaaaggaaggcaaagtgtatgacatccccaagggccacatcgtcgcgacatcaccatccttcgccaacaggctgccccacatctacaagaaccctgactcatatgaccctgaccggttcggtcccggaagggaggaggacaaggctgcaggtgccttctcgtacatctccttcggtggtggcaggcatgggtgcctcggtgagcccttcgcctaccttcagatcaaggcgatctggacgcacctactgaggaactttgagttcgagctggtatcgccgttcccagagaacgactggaacgccatggtggttggcatcaagggcgaggtgatggttaactacaagaggcggaagcttgtcgtggacaactaagattgtggtcgccagtctctatctcttagatgcttgcttgcttctttttgattcgattgctttcacctgtttgtcagcatttgttaagttctgctgcacacacgccagctttgtaggggtgtttctgttgtttaggattctgtaatttgcttcgccatgggggtctgccatgatatgcaacatccgcttgttagctagcttcctagctcagcattccccttagtcaaatctgtaacctgtagcatctacaagcgtgtggctttattgttgaaatcctgatgtttatcgttctctataaacacaaaactgaacaaataacctcgctgcaatgaataaactcaggtgttcagtgtgaatctgttggttgtgcccccatgctgcattgagttggacagtacaggcatttcagacttgttgggtaattaatatcatgtcgacactgaaggtgtccagttttcgtccat

SEQ ID NO: 2219 - DNA, 1506 bp, Zea mays
atcctacccatcccattcccactccgccactcggccactcgacaccaccctccgcgctccgcatccgctcctccctctgctgccgtgccggtgccgctagccatccccacttctcacccgccccctctcctctactgccgccagccgcaacaaagatatggatagagcggccgcgacagccgcagacattatcgtcatgatcccatcgctctcgccttcgcctttgtagcactacctcctcgtccatccgcccccctatttcgtcccactcgggttgctagatcggactggatctctctgcccgtttcttggagcagagatggccgaaatgaccgtgactgtcgcggccgccaaaagcaccctccggacgtgccccggcgcccgccgtgctgcggttcttggtcggtggatgcctcttgcaccagcggcgcccgccaacttgaaattgttctctccagctgtgagggttccaagggctacttcccctgcggcggttgagcaggatgggagcaacactgatatagtccctatcccgaaagttataatagaccaagactcagatccggatgcaaccattgtagaaataaccttgggtgatcgtcttggcgatctccttgatacgatgagtgcgctaaagaacttggggctaaatgttgttaaagctagtgtctgtctcgattctactggcaagcatatcaagtttgctataactagagcgttcactggccgtaaaattgatgatccagagttgttagaagcagttcgactgacgatcattaacaacatgatacagtatcatccagagtccagcagtcaattggctatgggggcaacttttgggccagaagcccctacggaagaggttgatgtggatatagcaacccacatagatatctatgatgatggccctgaaagaagcttacttgtggtggaaacagcggatcgtccagggttactggttgaccttgttaagatcatctcggacatcagcattaatgtccaatctggagagtttgacactgaggggctcctggctaaagcaaaattccatgtcagctacaggggcagaacactgaccgaggctttacaacaggttctttgtaatagcttgcgctatttcttgaggcggccgacaacagaggacgccagcttctagccagatagatgatcatgaagcctcccaactttcttatgtggtggtattcacatgaattgaataccatcgtcaaagcatttgaaacacgcacaataatttgttaagatggggggaattgtacttgatgttatggcaccacaccaattcgaagtattttttgttccaaggcacgggaatctgttgtatccaagtgcagaagattgctattcttaatcatgtaataacacattattattttgctacttgggatacaccgtttggtggtaaataagatggaatattgtgggggcccatcatcccgtgtatcatgcaaataccgtctattgtcagattaatgatggagttaccaa

SEQ ID NO: 2220 - DNA, 3174 bp, Zea mays
agagagagagagagagaatgagagatggatgcaaaagcaaaacaaaaggccggccatatcgcgcgtactgtactgctgtgtcgataattgggggagtcttgtcttcctcatctgctcccctttcctcgccgctctgcctcgccttttgggtttctgagaggcgctgcgctggtttgccttccccactgctcgctctgccggtcgccgccgtggaagagctacaccacgacgagacacaggttctctcgacccgtcatcacccacagcgaggtgagattctcgctaaaagatcgggcggacggagggcgtggcggcggttgccagttacctgctgccacgatgccgccggaggcccggagttgctgttgacgacttggcgatgctgtggtttccaggctgagcggagaggagacgaagagaggaacagggtacacagatctcaagaagctccatgagggcgaacctgtgccccggcgcgcgaggctgagcttcttgcacgctgcgcccaccccgagctcgccgatgcgccgccgccgcagcagccgcagccacggctgtccagccggcgtgctgacctgacgcggactgacctagacgcaggttgccctgtccgttcccttttttttctggtgagtactttggccttgccttttgctgcagcgccttgactggcgtactcgtgggtgtgggttatgttcccttgcctctctctcttggtgctgctacactatgttctgttcttgccgtgatcgacgattcctctgttaaaagttcaacggttctgttcttgcaacctcgcgtacttaccctgcgaacctaatcatgatgcataactgagtgccccagcccccagatatgcttgttcttacccgaaccctttctgctctttaacctgcttctctcttcctttttgttgttgttgttgttgttgtttcagagttagccgcttcggcaggcaagtaggacgaggagcagcagctcagatttcggatcctggcactggcaactggcatgggctcgtttgggatggacatggactggaaccagaaggcctccgtgctgctgtgggactgggagaacctgccgcccgcagccgcaaacgggagcgagagccacaggacgaccgctgccgcgcctcagttcgcgggccttgaggccacagggcatgaaccggcgccttcttccgtatcctcgtcaatccattctctgcccagtgccaaggggaacaagaacaagaacaacatggagctcatcagtttcgcacctgccaaagcgcccgacaaggacactggttcggtgctcagcagcggagagccggtggtgctaggcctgaagcttggcaagagaacgtatttcgaagatggttgtggactagggcagagcggcaagagttcggcggcgttaggcactgccagtgcagcgacccctccgggtcctgcgaagaaggcgaaggcggcggcggcggctccaaccgcgcagcagcagaaatcgtactgccaggttgaaggctgcaggaccgatctgtcctctgctaaagactatcatcgcaagcacagagtctgcgagccccattccaaggcgcccaaggtggtcgtcgctggcctggagcggcgcttctgccagcagtgcagccggttccatggactggccgagttcgaccagaagaagaagagctgccgcaggcgactcaacgaccacaacgcgcgcaggcggaagccccagcccgaagcgctccctttcggctcatcgaggctgtcggcgatgttctatgacacgaggcgccaggcgagcctcctgtttggtgaaggtccctacggtcagatgagaagctgtgcgagttcttggtgggatagcccaggagcaggaggaggaggcttcaaattcgcggagacgagaggagctccttggttgaagccggcgagagctgctgctgatgggctgctgcctttgtcaggtcagcagcagcagcaggtgtggaatgactcgattccgcatgttgcccatcaggaggatttcgatgggttcacggtcacggcgttcaaaggaatcagtccaaagacccttgatcatcaaggcgcaggcgttgaagcctgtgcggccgtctccagcccggacggcgccccggaccttcagcgtgctctctctcttctgtcaaacagtccggccggtggcggcggcaccaacaccaaccacccgccgccgccgccggcggctgagctgcaccaccaccgcgctgccccgagcagctgcctcgccgccggctccgtctccgtgctgcaggaggcctcgtcgccggggctgtggcaggacggcggcggcagcgcggccctgggccaccacgcgcacgcgcggctccaggctctcgacgccgccatggcgacggcgcaggagctcctccagctccccaggccgccgccatcgtacggcggctcctcgtcccactacgacctgatgcgctgatgcttccttccttgtggattgtggtggagaactggagatggagcgggagcgccgccgtgcccccggttggcgcgtggaaatcagtcagacgtggcttctgtggcgtcgtctctgcaacgcgggagcgggattttgcttgtgttctgaacgaacagaaaataataaaaaagaagaaggccttgtcgccatgggaactcgtggaggtcgccggtagagctgcgcgcgcttgaataatccacggttttgtgacgctagcagttgaagttctattgatttgtgcaatgtaataacttggttgcttcggaagagttctattgtcatctttaatggcaccattagttcaatctaacatttattctgcttccaatatacgtagtacattattagaactaggagcgcaaccctaaaaaaaagcatagctgcattattccaaccaccgcacatagctagctactcacaaaaaagctgattgattcatgagacagctaggcggccggcaagacagccctcggcgtgccaagatagaacaccaagaacaccaagacaacaaagcgcctttcagtcaagttgacggggccaggccgggtcactaccgcttgccagctcccaggactcggcaccggtactctcccagagcccagatcgggaaggtgttcctgtactgggagtaactgatcatgcagttcttgttgaacactcctatgatctcctgcg

SEQ ID NO: 2221 - DNA, 2086 bp, Zea mays
ccaatcctgacacattatcctctccacctcttcagaatccggacctcggcagagtccagtactccagtcccttgtgcatctcggcctctccactctcctttccacgcccgtccagtcctctaatctgacccctcttctccagccggccggagatggtctcgctgcgatgcacaaccgcgcaccactccctcctcggctcgccgacctgcctcgcgcgcccgcggcggcgggcgtgccccgtcgtgcgcgctgccgtcgccgtggaggccggcgcgcaggccaaggtctcactcatccgaattgggacgcgtgggagtcctcttgctcttgcacaagcccacgaaactcgagaaaaactgaaagccacacactctgagttagctgaggagagggccattgagatcgtcatcataaagaccacaggagacatgatcttggacaaaccccttgcagacattggaggcaagggtttattcaccaaggagatagatgatgcgctcttgcagggaaggattgatatcgctgttcactctatgaaagatgttccaacatatctacctgaaggcacaatattgccctgtaacctaccacgagaagatgtcagagacgcattcatatgtttgactgcaaattcgcttgcagagcttcctgctggcagtgttattggaagtgcttctctgcggagacaatctcagattctctacagatatccatcactgaaagtagttaacttcagaggaaacgttcagacacggttaaggaaactcaaggagggagatgtctctgctacattgttggcactggctggattaaggcggctaaatatggcagaaaatgcaactgctgtactatcagtggaagaaatgcttccagcagttgcccaaggtgctattggaatagcttgccgaagcaatgatgacaaaatgatggagtatctatcagcgttgaaccatgaagataccagattagctgttgcatgtgaaagagaatttttggcagttcttgatggtaactgccgaactccaattgcagcctatgcttaccgtgacaatgatgggaattgctcattccgcggtctattgtcttccccagatggatctaaaggtatccttgattttcgactgaaaagagcttacagtgattttgttgtttccatcattgaacggcaacaccttgtcacttttatggttctgcttacagtatttgagacaacaagaagtggaccgtactcttttgacgacatggttgagatgggcaaagatgctggtcatgagctgaaggcaaaggctgggcctggcttctttgatagcttgcaatgaaaagaatgagcggccatgagcaatttcaattgtcactcttttgggtagaaacagagggcccaagtagagtgttgagaggtttgtttttgtttattctttctcctactagttctgctagagaagggtgtacctggtgtagtggtgagctgagtcatcaggtcgcgggttcgaagcatccagtctccgtatttgtgggagaaggtttgtctcggtttatctcttttccgctactcatatgggagaaatgtgggagcctcagtctgctcttttttttttccatactagttctgctagtgccttgtactatcactcgtattgagcagccccattcagctttgtagtatctcactctgggttagagcctttataggtatctgcacagcacagctatatgttttgtcgaagaggtatctgcacagctacgttctcggaagactccagcagccagctgcgtcagcacgatcagatcagtcatgctcgtgcccatccagcagccagcagtcgagatttcagatttgttgcagcgaatatgattttaaaagtctgaaccgatttgctgcagcgaatatggtttaaaaaaccggaccgaaggcagttttgatattcgggttgttcacttcggattgaaattatagagataaaaatacagtaaaaacaaagaagctggtatggattaaagaacgaacaagttgattaatgtgatgtttactccggatctagatataaaaatgtgcatatgcatatttcccccacgttgttccaatata

SEQ ID NO: 2222 - DNA, 1605 bp, Zea mays
cagagatggactgctgtagataatgctacacttttccggggttttctctctctctctctcccgcgagctgactgacggctcctttatctcctcccgcgtgcatcccccagctactcgtcattcttatccgcctgcctccgccctccgccaccgctacctttatagctctagcttccttcctccattccctcctcatgccttcgtcttcgtcgtcctgcagccccgcaatagagcatcgtacttcatcgttccacttacatcgtttgttcgttcgttcttccgcgtgatctgcttgggagttgggggcaatggaggcctacgtcctgttcgcgcgcgccaaggagcaggaggaggacatcggctgcccgtccgagtcgtccgcggcgcgttccacgtcctcgtcgtcggacggggtggacctcgccgacgacgccagctcgtccgggtccacctgccacttcgagatggcctccctcatgacgcacctcccgatcaagaggggcctgtccaagttcttcgccggcaagtcgcagtcgttcgcgtcgctggcggcggtgggcggcatcgatgacctgcccaagccgccggcgaagcggctcaagacgtcgtggagctgcggcgtcggcctcgaggacgcgcgccgcggccctccctccgtgacgaccgccaataagcaggcgtccagcagggcacggctgacgccgtcggcgctcggctcgacgccgagaaggctggtgcgagcgcggccgcttgtaacggcgagaccggaggcggcggccgggaagcccctgttatttgcatagggggaagggattcgcctgcctaccagtaaaatcactatcacataattcggctgttacttgttagtttgcgcggaacttgaaaagtgaaatggccagagatttgacccagtttccgcgtgtaaatatttttgcaacagagctaacatgttacaaaggtgtccttttttcatggatttgacccagtttgcaatgcatcatattggttggtcctttccataacttcgtttcgtgtgatagatctcctatttgatctgaaactggctaacatgttacaaatatgttacattcagaacacgcttgataaatgtgctgccgatagttttagaggtcttagtgatgctacgctgactattgcctaggagtacaagtacacaaaattacaaagacaaggtgagctcccctattctctacttttttttttttgaacaagcaggcactttcttgccgtttttttgctttttgactttttttgaaaaattttcacaactacacactttctagtttgaattcacgaaatgaacctttactcggcgccattatcattgacgtcaaggtcacacgtctcaacgtcaatataaataacgtccagatctagctctggtaagtcgatctggcgcctatatggcaggatgtcagcgccgtggttattggtgccgacctccttttcaagaaacggcggctcggctcatatctcaacaagtggtgcgcgtggctcgtatgtgttatatatatatattagtatatctatgtatttatattaatataacatataatttattaatattataatatatatattata

SEQ ID NO: 2223 - DNA, 2230 bp, Zea mays
aattttcgaacccttctgccgttcgtgtgcacctggatggggtccataaatatagaaggcctcttcatcttcctattctcctttctctaaaccgccgcttctgttctgatctgctccccgaaactactaaaacaaatcgaagtggggaacagacaagagagaagggagatggcggaggcggtggcggtggcgtacgaggagcaacggcggaggcagatagaaatgaacaagcggaagctggaggagctgcagctccaccacctctccgccgccgtcagagaggccgccgccgctgccaaaccctcgtcggccaagaagcggaaggcgccggtgccgcgggacgccgccacggagccgccaaggcggtccgaccgactcgccaacctccctgagaagccaatgtaccgcgaggtcagggtgaacttgccatttccggagggcagcaagtccaatgcgcgggtgccgctggacgctgccaactccgtggtggtggagccactacggtggtccgaccgactcgccaacctccccaagaagcccatgtaccacgaggattcggacgaggagaggagctacgccatctctaaggctgaggagctggtgcaagagctgggctccagcttccccatcttcacccagcccatgacactgtcccatgtctccggaggcttctggctgggcctcccgaagcatttctgccgggagcacctgcctaagagtgatgagacgatcaccttggtggatgaggaggatgacgagtcagacacgttctaccttgcaatgcaggctggcctcagcactggatggaaagagttcgccatccagcacaagctgcttgatggagattgcttggtcttccaactgattgagcggacaaagttcaaggtctacataattcgagcaactttgtacttcgaaagtgatcactgatgaaactagtagcttctaatatggttattggagcacgggtaaaacttgaccttcattgtttaaaatggttgaataagagtttcatacttctgttttttttcggagggtgcaaattctcccatttccatattgggtttgaactttcagctttttgatcgctaaacatcaatgtttataatctcacttccattaattatgaaaatacaagggcctatgctgcttcagtgagcaggggcggacccagtccaacatttgagtgggggcctaaatagaggctaaatgactactagacctttgtagctacactaaaatgtccactgaaactagaaaattgagtgggggcctgtgcccccgctaagcccaacgtgggtccagtgaggttatcttgatctcacattgcaaagccaatatattttgggtggatggcttccttttgtccaagctatttgaccaatgtttgataggcgaatgcatgaactgagcaagtactagatggtatggtgactctttcgactgatgtagattttttttttgttgtaccattgccttctcctttccagatacatttcgtttcattggtacatgaactctgtgctccacctttctcttgtaggttcctagtagtagtctacacaatttcatttctgtattttttgggtaaaatagtactttttcagaaattttagtaggataattgtttgttgaaggcatattgtcgtagctgttgttggaagctctgatagcttggcacattgtcttcttattctttatttgacatgtctacagttgaaccaagagatgtttgtttctaaaacttactgtacatccattgcaagtgactctccttgtttcacttctgactgtcctgtagaaattactgaaggtacacaattttgaggatggtgaatagctgtcctgatgtgaacatgtttccttgttccttcactcagttatgaggcagttgcgttggacaagctctcatctggaatttgctcggcatcttgaactttttgggtggcagaaagttagctgatatataaatgtttacttaacctagtatctagttatttagcagctgctaatttgtgtaattgggcttaccaattgcacggttcagaaacctgcactatgtaaggggatgttgatggcaattgacctcattttataaatgattgatgtctgtccatatttctcttggatcaatttcagtgttcagtcaatcctgtgtggttcattttcttatagttatttggtaccaccattagtggctttgtggtgttagtattcagacacatggtct

SEQ ID NO: 2224 - DNA, 5842 bp, Zea mays
caaagaatcgtgtccacatgggacgcccactaaacttccccggccgtctcgtctcgtgctcgctcttttttcgttctttctttcccgtctccgcaccgctgtcttgtgtcccctccccccctcagatcagatctctccctctccttctcccggccccgagtggagctgtggaggcacctcgcatcaccgccttcgtctctccagactagccgagagagatctcgacaccgccgcccgttgccatggcggcggccaacgcccccatcgccatgcgcgaggcgctcacgctcaccagcctgggcatcgcgccgcagtttgtcacgtttacccatgtcaccatggagtcggagaagtacatctgcgtccgcgagacctcgccgcagaacagcgtcgtcatcatcgacatggccatgcctatgcagccgctccgccgccctatcaccgccgactccgccctcatgaaccccgacgccaggatcctcgcgctcaaagcccaaatacctggaacaacacaggatcaccttcaaatatttaacatcgaggctaagactaagatcaagtctcaccaaatgcccgaacaggttgtattttggaagtggatcactcccaaattgttgggtttagtgacacaaacatctgtttaccactggtcgattgaaggtgattctgagcccaccaagatgtttgataggacagctaacttggcaaacaatcaaatcatcaactatcgatgtgacccagcggagaagtggcttgtgcttattggaattgcaccgggagccccagagagaccacaactggtgaagggaaatatgcaacttttttctgtcgatcaacagcgtagccaggcgcttgaagcccatgcagcatcttttgcaacatttaaggttgttggtaatgagaacccatcaacccttatttgttttgcctcaaagacaactaatgctggacagatcacttcaaagttgcatgttattgaactgggtgcccagccagggaaacctggcttttctaagaaacaagcggaccttttcttcccaccagatttccaggatgattttcccgtagctatgcaggtttcacaaaagtatgggcttatctatgtaattacaaagcttggccttttgtttgtatatgacttggaaactgctgctgcagtttacagaaatagaatcagtccagaccctatattcttgacagcagaatcttcctctactggtggattttatgccatcaacagaagagggcaggttttacatgccacggttaatgatgcaactgttgtaccatttgttagcggccagctgaacaaccttgagcttgctgttaatcttgccaagagagcaaatcttcctggtgcagagaacttggttgtgcaaaggttccaggaactgtttgcgcaaacaaaatacaaggaagcagctgagctggctgcagagtctccgcagggcctcttgaggactcctgaaactgttgcgaaatttcagagtgttcctgtgcaagctgggcaaacacccccactcttgcagtactttggcacattgctaactcgagggaagctcaatgcctttgagtctcttgagctatctcgacttgttgtcaatcagaacaaaaagaaccttctggaaaactggttggctgaagacaaactggagtgcagtgaagaactaggagatcttgtcaagactgtggacaatgatcttgcactgaaaatatacatcaaggccagggcaacccctaaagttgttgctgcttttgctgaaaggagggagtttgacaaaatacttatatattcaaagcaggttggatacaccccagattatctcttcctcctgcaaaccattttgcggacagatccacagggagctgtcaactttgcattgatgatgtcacaaatggagggaggttgtccagtagactacaacactatcactgatctcttccttcagagaaatatgatacgggaggctacagcttttctgctggatgttctgaagccaaacttgccggatcatgcttttcttcaaaccaaggttttggagatcaacttagtgacttacccaaatgttgcagatgccattcttgcgaatggtatgttcagtcattatgaccgtcctcgtattgctcagctctgtgaaaaggctggattatacttgcgtgccctccagcattattcagagttgcctgatatcaagcgtgtcattgtaaatactcatgccattgagccccaggcacttgttgagttctttggcaccctttcaagggagtgggcactagagtgcatgaaggaccttctactggtaaatctgaggggaaatcttcagattgttgtgcaggctgcgaaagaatattctgaacaactaggagttgatgcttgcataaaattatttgaacaattcaaatcttatgagggcctctactttttcttgggatcctatttgagctccagtgaggatccagatatccatttcaaatacatagaagcagctgcaagaactggacagatcaaagaagttgagcgtgtaaccagagagtctaatttctatgatgcggagaagacaaagaactttttgatggaagcaaagctacctgatgcccgcccactgattaatgtttgtgaccgctttggatttgttccagatctgactcactatctatatacaaacaatatgcttcggtatattgagggctatgtacaaaaagtcaatcctggtaatgctcccttggtagttgggcaacttctggatgatgaatgcccggaagatttcatcaagggtttgattctctctgttcgttctctgcttcctgttgagccactagttgatgaatgcgagaagaggaaccgcctacggttgcttactcaattcttggagcatctagtgagtgaaggtagccaagatgtgcatgtccacaatgctcttgggaaaatcatcatcgacagcaacaataaccctgagcatttccttactaccaacccattttatgactctcgtgttgtgggcaaatactgtgaaaagcgagatcctacacttgctgttgttgcttatagacgtgggcaatgtgacgacgagcttattaatgtcactaacaaaaactcattgttcaagctacaagctagatatgtggttgagagaatggatggtgatctgtgggataaagttcttcagcctgagaatgaatatagaaggcaactcattgaccaagtggtttcgaccgcattgcctgaaagcaagagccccgagcaagtctctgctgctgttaaggcattcatgactgctgaccttcctcacgaattgattgagcttcttgaaaagattgttcttcagaattctgcattcagtggaaacttcaacctgcagaacctactcatcctgaccgccatcaaggcggatccatccagagtcatggactatgttaacagactagacaattttgatgggcctgctgttggtgaagttgctgtcgaggcacagctgtacgaggaggcttttgctatatttaagaagttcaacttaaatgtgcaggctgttgatgttctcttggataacatccgaagcatagacagggctgaggagtttgccttccgtgttgaagaagatgctgtttggagccaggttgctaaagcccagttacgtgaaggtctggtcagtgaagcaattgagtccttcattcgtgcagatgatgcagcacacttccttgatgtcatccgtgcggctgaggaagccaatgtgtacaatgatttagtgaagtaccttctgatggtaaggcaaaaggcacgggaacctaaagtcgacggagaactcatctttgcatacgctaagattgacagactcagtgacattgaagaattcatacttatgccaaatgttgccaaccttcaaaatgttggtgaccgtctatatgatgaagaactatatgaagctgcaaagatcatatatgctttcatctcaaactgggctaagctggctgttaccctggttaagctgaagcagtaccaaggtgctgtggatgctgctcgcaaggctaacagtgctaaaacatggaaggaggtctgctttgcttgtgttgacgcggaggagttccgtcttgcacaaatatgtggtctcaatattattgttcaggttgacgacctggaagaagtcagtgagtactaccagaacagaggatgcttcagtgaacttattgctctcatggagagtggtcttggacttgaacgtgcacacatgggcatcttcacagaattgggagttctatatgctagataccgctctgagaagcttatggagcacatcaaacttttctccacccggctcaacattcctaagcttattcgagcttgtgacgaacagcagcactggaaagaacttacctacctgtacatacagtatgatgaatttgacaatgctgccaccacaattatgaaccactctccagatgcatgggatcacatgcagttcaaggatgtctgcgttaaagttgcaaatgtcgagctatattacaaggcagttcacttttatctgcaagagcatcctgatctcatcaatgatatgctaaacgtgcttgcacttcgtttagatcacaccagagttgtagacataatgcgcaaggctggtcagttgcatcttgtgaaaccatatatggttgcagttcagagtaacaatgtatctgccgtgaatgaagccttgaatgagctttatgtcgaagaggaggactacgagagactccgtgaatcagttgacatgcatgacaactttgaccagattggtcttgcccagaagcttgagaagcatgaattgctggagatgaggaggatcgccgcctacatttacaagaaggctggcaggtggaagcagtcgattgctctatcgaagaaagacaacatgtacaaggactgcatggagacatgctcacaatctggcgaccgtgaactgtcagaggacttgctcgtgtatttcattgagcagggtaagaaagaatgttttgcttcttgcctcttcatttgctacgacctgatccggccagatgtggctcttgagcttgcatggatgaacaacatggtggactttgccttcccgtacctgttgcagttcattcgtgaatacactagcaaggtggatgatttagtgaaggacaagatcgagtcgcagaaggaagaaagagccaaggagaaggaggagaaagaccttgtggctcagcagaacatgtatgcgcagctgcttcctctcgctttgccggcgccgccaatgcctggcatgggtggtcctccacctccgatgggtggaatggggcatgcctcccatgggcgggatgggtatgccgccgatgggccctggtccgatgccagcattcggaatgggaggctactgagtggtggttttgcagggagcttagatgatgatgtgaattgttccattgcaagcataagtggaacctcattggagctgtagatggttttacagtttgggaaatcaatattctttattgtaccaggaaacttttttttgggcgagtgagtgaaatcagcctgacccatagtttgagaagcgcaacctgtgatatgttttacgatgggatcggaaataggatgattaggttgtttcagcatgagctgttaaaagctggtaccatgtgtatgtatagtggtgtgataaaatcttttgcgtgtcggcagagtgaagatagacaaatgtatgtttccttgttacgacctgttaatctatatattagcccgacttgtagttcaaatgccctacattattttcttctagctcctccaacttgtagttcaatcggtaatactatatttattaataaattcaatggatatgttctctatctcgag

SEQ ID NO: 2225 - DNA, 2124 bp, Zea mays
gcaagacgcaaacgaacccccccaagtgttacgcgaatattcgcgtcacccgtccggacggcccggcatcggggcacctatttcatttcacaaccggctcgcctcgcgggcgaggccgcagccgccgtgtgagttccagttccaagtcctccgcgggcgcggagggaggaagaaatcggcaatcgccccaccccatcccatccccccccgccccaagaataggctagcggctggtcctcgaatctaggagcccccgacctgcgcgtccgtccgtccgtcctccctaaatccggccacgcccgccggtgaggagaggcgaagattgatcagccactcccgaatggaagattcatcggcctctgtcccggacccggacgaataataacttagttctactaagtttctcgggggtcgcccttcgcttgcttccgcccccttgttgttgttcctttgtccggctcgatctgggtcgctcggcggctgttcgtccgtcgcccgtaccgccgccgccgccggttggttggattagtactccactcccgcttcgttccgttatctctggtctgatatttacgggatattccttcgcgtgctctgcttctgctgggattcaagtgaaggcaccccatggccgagatagaagacgcgatgggtgcgccgccaatggtgacgacgacggagtccgagggcacgaccacagatgaggacgtgcatctttcgccgacctgcatctgcggcggcgcgggcggagctggtgggggaggccgcatcaagatcctctgcagcttcggcggccgcatcgtgccccgcccgcacgacggcgtgctcaagtacgtcggcggggagacccgcgtcctcgccgtgcctcgctccatctgcttccgcggtgggtgttgttcgctttctccatgcgctgtgccgcgctgcgtgacctgccgccgtttggctctcagcaggccgagatgtctgtcgttgccctgtgcagagttgaagaagaaggtggaggacatgttcaagacggaggtcgcggccatcaagtaccagctgctctccctcgccgaggaactcgacgtgctcgtctccgtcacctgcgacgaggacctggtccacatgctggacgagtacgaccgcctcgaggcgaagcgctcgccgaccacgtccccgcgcttccgcgtctacgtcttcacgccgcaggccaccgcgccccacccgtcggccgccgcacccaccgtgccctcgtctacccgctacgctggtctgtcgcgcctccacccgcatcaccaccaccatcagcagcaccgccaattccagccggagcgctacgtggccaccgtaccagcctcgcccgacgggagcccgccgttctccgcccagccgcacggcgccgtctcggcgggcaactccccgcgcgccaacgcgttgggcgttgggttcgggatgcagcgcgtccggagctcgccgaacctcagcaccctggacgcggcggcgcggcgcttgcatcagcacggcgtggacggcagcatatcgggctacgtgagcggctcaccaaggcacgccggcgcggggcccatgctgttgcagaacaatttccaccactaccagcaccagtacccgacggcgcccgtgcccgtgcccgtgcctgtgcccgtgccgcaccacggtgggcggtacgacgcgcgcgggtacgtccgggtaggcaactacctggcgccgatggtgcccgctgccaggccgctctcgaggggaggaccggcgccgcacagcgacatggtgacgccgaagaagtctgctattgtgtgggactgacccggccggtcgtacgccggaggggcctcttgtgagttgagtgtttgagactgagatgtgtaaatagacggtcggatggatggatggatgcacgcggccttattttagctgttgcgtttgtgtccacgctgaatttgtttgtccgttttctactggtcgtgttcacggccttgttttagctctcccatagtctgaaatttatttttcttaaatcactgtactaacttttaagaaaaaaaaataaattattgtactagcttttagggcttgtttggtgacagaaaaaaaggctagtttgatgacagaagattgagaagg

SEQ ID NO: 2226 - DNA, 890 bp, Zea mays
cctgcttcccaccccaccaataacaaactgacggccatcgtctatcagacgacacgagcagagagagttaaacaaatttccctggccaaatcttggatgcttccaacagcgttcacctactccattgtccatggctgtggctgtgtctgtgtgcatgcggagcggagagcactcgagagtttcgctcgcaccggctccatttgcgaacctactacacatagcgagcaactccccagattagccataccagcccagccgcaggccttccatagccattaaccagaaccgaccgagcaacagaggtggaggagagagcgcgctgagagatggatggctacagcaacctggccttgtcccctccgactccgactccgactccgacggcgagcggcgctcccagggcggcgaggccgtcgatggagctgaccaacacgaaggagaccaaggcgtgggagggcctggccatcggcgcggtcacgctggcccggaccttctccacgggctcgcacaggttctgcaggtccggcagcgagaggaggaaccatagccggagcggcctgctgaggcgggccttctccatgcgccgccaccccgcgggcctcctcggcgccggggacgggtactggaggatccacgacatggacggggacagcgaccgcggcggtggcggtggcacggtcgtcgtcgaggagcacggcgagggcgaggaaggagacgaagacgaagcagcggctgccgaggaggaggtgcagaagaacaagaagacggagcagcgagacgaggacgcggcggcagggaaagggaaggaggaagcggccgccgagcggagggacaagaagaagcggcggggtggcatcttcaaggcgtgcaagaagcttttccggttgtag

SEQ ID NO: 2227 - DNA, 1551 bp, Zea mays
atgatgacgcgacgcttggggcatagcatatggtattggagatgggctcccggacccgaaatccccgccgcacttaagtactacaatcccaggggccaggccaccggcatgttcgcttccatctgccggcggcggctcctccgcctctgccaaatccccttcggcaccggcgcaatccctagcgacgccctcccccactgccactccttagcaaccatcgcggacgctcccgtctccgagccctgtgctgcccttgtctcttgcgggctctcccccgccgccgcggtcgcccacaggctcccaatccgctccaccgccaaggccgacgccgtccgcgcgctcctccgcagctacggcttcaccgacgcggaggtcgccgacctagtccgccgattatcgcagatcctcagcgtcgaccccgaccggatccgccccaagcttgacctcttcgcctccctcggcgtcaagccgcggcggctcgccagatatcctgccctcctcacgcgcagcctcgacaagcacctcgtcccctgcatccagttcctccgcaacattctcagcaccgatgaggacgtctgcctcgccatctcgcgcaccccgcgcgccctctcggctggcctggagaagatcatgcggcccgccttggacaccctccgccgtcttgggctccccgacgagtctatctcgaagttagtagtcatcgagatgggcgtgctcatgatgtcgcccgaccgcatatgccagatcttcgaggccctcaaggagctcggcttgggcgtaacggagaagcgctttccttacggcatccgcgccttgtgctgcattagtagggagaagtggctgcatagggtggccctttaccggagcttcggggtgtccgagggtgagctgcagagagcgttcaagaaacagccgaatatagttaacttctctgatgagatcataaagaagaagatccggttcttcctggatgtgctgaaggttgaactaagcgaagtaatggagcaacctgcgattatagggtatagcttggagaggaacatcataccaaggtgtgccgtgctaagcttgttgatgagggagggaaagattgggcccaacgtcaagttgatttcggcattgcttggtagtgccaacatgttctccacaaggtatgtattgaggtatgccaatgagttgccagatgttgttaaggcatacgagggtaagatcacatttgatggcttcagggaacaggatcttttagttccactgaagctgtgagacaagtttagcaagattatgtcacaagtttaggcgccatgctttccaatgccattgagatcatagcatgctatgattctaacactgtattattgttatgttaattctggacatttttcacataaccatctttgtagcatttccctttttttatcctcgctaacaaatgtaaaaatacggatcttgtgatgctgtcttagttatttgatctggtgagctgaactggttcattgaatctgttatgcttttgaaatatgttgcatgaattaccttagtaactcatttact

SEQ ID NO: 2228 - DNA, 2436 bp, Zea mays
gcaaagagaaacggggaggcggacatccaaccggattggcgagaccgcaacggcgcaacgggcttctcccgttctccgtcggtcgcggtcttttcccgtccgccccgcctccagctcccgtctcccaccccaacccggatctcgcgcgcgacgccgcgcaggcgaaccccacctcctctcagaagcctctagaagttcctcaccccgctcccgcgcggatgagtggcagctcgggccccctcccctactcgatgcgcgatgtgggtgctggcggcgcctacaacaacgccaagttccgccaccggtctcgcctcaagatggttctacagtccttggctactaacagaagcaaataccattgtggaaagttcactgttggtaaattcttgagcctgttgatggtttctggcttattgtacttatttatgcacaaaggctcagagggtattgtatccagtgagcttcatggcaaagaagtacagaataaaaatgttaggagatctcccagtatacgcacattctggagaaaaccaccaaggctgcccccacgcctccctccaaatgaaatctacaaaaataattctctgcttcagcagtctccatctgagtggacatcgaggcagaagaaagttaaagaagcatttgaacatgcatggtctggttatcaaaagtatgcaatgggttacgatgagcttatgcctctgagccacagaggcacagatgggttaggtggtctaggagctactattgtggattctttggatactgcgataataatgggtgctgatgatgttgtttctgaagcatcaaaatggattgaagacaacctaatgaaaagaattagtgagaaagggcaggttaacttatttgagactaccatccgtgtcttgggagggcttcttagtgcataccatttgagtggtggtgatcatccaggggcaggtgactccggagtacctgtaacatataaaaaggctaatccagagcgacttttggaagtttcaaaggatttagccgacaggttattattggcttttacatcaagcccaacagctatacctttaagtgatgttattcttcgtgaccatactgcacatgcagcgcctgatggcttaagcagcacttcagaggcttcaacgttgcaattagagttcagttacctcagtaaagtattaggggatcctaagtacgacagggcggcaatgaaggtgttagagcatatacatacactcccaaaggtggagggtctggtgcctatttacatcaacccctcctctggtcaatttagtggtgagaatattcgattaggatctcgaggggacagttattatgagtatctgctaaaagtgtgggttcagcaggaggaatatcgtgacagtagtttaaagtatctatttgaaatgtatactgaggcaatgagaggggtcaagcatcttcttgttcggaaaactgttccaaatgggttggtatttgttggggagcttccatttggacgaaatggcgggtttagtcctaaaatggatcacctggtgtgttttcttcctggtacccttgctcttggtgcaactaaaggtatcaccaagagaaaagctcttgagactaatttgttaactgatgaagatatagaaaatctgcagcttgctgaagatcttgccaaaacatgtgttgagatgtacttcgtgacctctaccggccttgctcctgaaatagcttatttccacattgagggtgatacagaaggggggcctgatggtgggaataaaagctccaaatatatcaatgatatcgtaataaaaccacttgaccgtcacaatcttctacgcccagagactgtggaatcactatttgttttgtatagaatcacagaggattccaagtatagggagtggggttggcagatctttcaggcttttgagaagtacacaaaagttgattctggtggttacacatcattggatgatgtcacaagcctacctccttccacgagagataaaatggaaactttctttcttggagaaacattgaagtatttgtatttactgtttgatgaaaacaatacccttcccctagataagtatgtgttcaatacagaggcccatcctcttccagttatgcggtctgcagaacaggcttcacattctgtgtagtttcccaagtttatagctgttgtaccatggtgagaagtacagatctgtgacaaatatacttgacaacatagttggaggaacgagaaattgagaatcccttgcatgactgttcttggaggcaagctcatggttctggaatctccatgcctgatttgaggatttgggggttttacttgtatttactggaaggccatacaacctttgtactctgtactgtctgtagtctgtaatacctaacttcaaattttgaaatcggctagcagttataccaagatttttatcttcaaca

SEQ ID NO: 2229 - DNA, 1444 bp, Zea mays
aacgtaacaaaccaacgataatcctccctcttgctacaaaaaaggaaaaaaaaacatcaataataatccactgcggtcgctcgtcctcctcccaacctcctcccaagttgcctcgtgctctgcttcttcggttttcaggagcgtcggccattgctgctggaaaagcagaccattgggactccctcgtgcgttttccaaatcagtcaggttgatggcgatggagggaccagttttatgccgccctgcaatgcaagccaaatcgcctgctgctgcgctggtcaacaactccctgaccagattcgggcagcttgggaccatttcaaaatacaggaacgtttcaagattcatttctcccatctctcagccatctacgaagaacataggtccatgctgtagcttcagctcgtcttctgatggcaatggatacatggctggaaactttagcgacagtgatgaagattatgttaattctactgtgctagaagcagttgaggtgagaagtggatcggaaggatatgtgataaagatgcgagatgggaaaaacttgcgttgtgtccataacaattctcaagggagaaatattccagagagtgcaccccaacctgctattgttttgaggattgaagatggaagcgaaactttacttccaatcattgttttggagatgccaagtgtacttctgatggcggctattcgtaatgtccacattgcacgaccaaccatatatcaagttgtcaaggaaatgattgataaaatgggctatgaggtaaaacttgttcgggtaaacaaaagaattcaagaagcgtactgtgctgaactttgtctaacaaagaaacatccggcactgcagattgatgattctacagacagcatcaccttcgatcttcggccttcagatgccataaacattgctgttcgttgcaaggttcctgtacaagtccatagaagtcttgcatacagtgacggcatcagaccagtcgagccagcaagaatggcagtagcagctggcctatcagatgggttgttatttacagagcttgacagacccgatggacaggcatctgttgaggctcaagagtttggattggtgaagaacatgctcattgcagccgtagaagagagatacaaggatgctgcatcatggaaggacaaactgatgcggctgaggtctaagcggaagaactgggcctgacagcgttgcatgtctggatggtgtaaataaagatgatgcccagctgaattccagtacgcattccagataattgatgctgggttatggctatgtaactagctgtacatattgtatggacccgaggatggtcttctgtaaattcagactaagctttgaagtgaaacactaatccttcggagaaacttggtaccttgtccgtgttcacttgtggtatataatgttggaaattaacagggttaagattaatttgat

SEQ ID NO: 2230 - DNA, 3262 bp, Zea mays
ctctctctctctctctctctccgtgccccccaggccctcctcccaggctcccagcccccctcccgtccctctctctgtctctctccacgcaccatggcgatctccgagctcgggtgagctgacaaggtgggcgtcccgtacctagtaccgctgcctgcctcgggtgaacgagcgtcggttcggctcggtgcagaatgcggccgatttgagcgaggacgggaggggcgcgatggatgcgggttcgggcggattcgcgaggaggctctagaggaggttaggtttcggccccggccccggcccggctgtgggagatgagctcctcgtccgcggccagcatcgggcagcagccgccggaggaagagaagaagtgcctcaactcggagctgtggcacgcgtgcgccggcccgctcgtctgcctccccaccgtcgccacgcgcgtcgtctacttcccgcagggccacagcgagcaggtggcggcgtcgacgaacaaggaggtggacgggcacatccccaactaccccaacctgccgccgcagctgatctgccagctgcacgatgtcacaatgcatgcggatgtggagacggatgaagtgtacgcgcagatgacgctgcagccgctcaacccacaagagcagaacgacccgtacctgcctgcggagatgggaatcatgagcaagcagccgacgaactacttctgcaagacgctgactgcgagcgacaccagcacgcacggcgggttctctgtgccccgtcgcgcggccgagcgtgtcttccccccactggtgtgatgagtgtgtattttgggtggcgtttcttttgttcagctgcatgctgggttgtttggtttgctgttgcaaataacaggtggtatagtgtgccgccagcgcattccactttctagccgccagcgccaggaactgaggaaccctggaagttggaacggccgtgcactcgccaggaagtcaagaactgagaagccgtgtcgaacgattgaaactgggagatgttggatcgttggaacggcccaacgacgcacaggatggccatgtggggtccctggtgggcctggcttagggaatgagaaaaaccagcttctgcttggaatcagacgcgccagccgtccacagactgtgatgccctcttctgttctttcgagtgacagcatgcacattgggctccttgcagcagcagctcatgctgctgcaacaaacagccgtttcacaattttctttaatcctagggcaagtccatcagaatttgttatacccctttcgaaatacatcaaggcagtttttcacacgcggatatcagttgggatgcgattcaggatgttgtttgagacagaggaatctagtgtccgcaggtacatggggacaataactgaagtgagtgatgctgacccagtgcgttggcctagttcctattggagatcagtgaaggttggctgggatgaatcaacagcaggagaaaggccacctagagtttctctgtgggaaattgagccactgacaacctttcctatgtatccatccctcttcccactgcgagttaagcatccatggtattcaggagttgctgctcttcatgatgacagcaatgctttgatgtggctgagaggagttgctggtgaagggggctttcagtctttaaacttccagtcacctggtgtaggttcctggggacaacagagactccatccatccttacttagcaatgaccatgatcagtatcaagcagtggttgctgccgcagctgcttcccagtcggatggttatctgaagcagcaattcctacaccttcaacaacctatgcagtccccacaggaacagtgcaatctcaatccgctgttgcagcagcaaatactacagcaagggagccaacagcagatggttagtcctgatgctcaaaatatccagtccgtgctcaacccaaatgctattcagcagcagctccaacaattccagcagatgcagcatgctcataatgaccagaagcagaagattcaaccagatcagccgtaccaagttcctagcagtgcggttctctcgagtccaacatcattaccaagccatttgcgggaaaaatttggcttttctgatcctaatgtcaactcttccagcttcatcagctctagcagcaacgagaatatgctggaatcaaacttccttcagggaagctcaaaatctgtggatttgtctagattcaaccaacctgtagttagcgagcagcagcagcaacaggcatggaagcaaaagtttatttgctcacaatcgatgtcttttgggggctcggtttcacttaactcacccactaccaaagatggtcctgttgacaacaaaattggtcgtgatgtgcagaaccagaccctttttagccctcaagttgactcttcctccctactgtacaatatggtacctaatttgacctcaaatgttgcggataataatatatcaacgattccctctggatcaacatatctgcaaagtccaatgtatggttgtctggatgactcttctggtttattgcaaaatacaggagagaatgatccgacaactagaacattcgttaaggtttacaagtcaggatcggtggggagatccttggacatcacccggttctctaattatgctgaacttcgagaggaactgggtcagatgttcggcattaagggtcagttggatgaccctgatagatcaggctggcagcttgtatttgtcgacagggagaacgatgtgcttctccttggagacgacccgtgggagtcatttgtgaatagtgtatggtacatcaaaatactttcacctgaggatgtgcataagatgggaaagccaggaaacgatccacgctacctatcttaaattgatacccagagctctttcgggctcccgtgacgattctgtggcacactgtagcactgtccatggcggtccggtgtgctgtgctcccatgttcgctggtgtcacctctagcatgtacaccgtgcgcgtcttcagaactcccccgttacttgtatccggtgcaggccaccgctctggactgatatcttgtaggttccacttaggaatcagtatcagcgactctatcctagttggtttgtagctcgcacggcactcgttcttgtgtcgcatcgaaatcttcaggctaaatgcttagttgaaactgttcccgtgattcttaagctatctatgtatttgaggattccccggcatgctttcgacgatgaactgcaataatctgaatgcaggaggattgtttgaatgct

SEQ ID NO: 2231 - DNA, 2893 bp, Zea mays
ccagcactaggctggctgatgagcgcctcagagagtcagcggacagcggtgcgcgggtagccaccttctgtctggcactccggccgtcctccggctccgtgcactctgtagtcatagggagcaagagcaaggttaggcgctcggattagctgccagcctgcccgctacctctgacttgaagcaactcaatgccgtacagtactgtagaacgcaccagagctccagaatgaatgtacaatgtaggcttttcactgacgcacgcaccatataggccgccggcggtgaaaaagtacggcgggccgggcacaatcactgcggtaggctggcaggacaggcaagcgcggcgtgaattccagcgtgacgcagttattactagacccccacaccacacccccacgtttgcatccacctcgagatgcccgtacctactgcgactttgctactgctggtgtctgtctactctactgtacagtctgtactctcctggggaagggaggcgtggccaccgcgggccgggggatggaccggaccgtggatggattcatttccctcccacttcgcctctgctattaaaccgccacctccctcacccgccatttttaataccgcgcgcgtctctcgctgcgccgtgccgtgccatgctgtctccgctgtccgctctcagtagtgctgcggctgccgctcacgcagtcgtcgccggggacggagagatgcgggttgctgatggcggcggcggtggcggtgctggtgagactggggcggggctccgcggcggcgtcggcggcggggccgtggtggaggacgggcacggggaggcaagcggcgggtgctcggcgagtcgcgggagcagcgcgcgcggatcgtctggcggcgactcgcctttaaccaggttcgtgcgccggggtggtcgactggggacgatggatccggagcgggacgagatgctgacttcctcgtcctcctacgcttctgcaggttccacggagccacaagaggaggaggaggagggcgccggggcattagaagcggccaaggacaacaagcgggtacatggtgcacgaccccaggggcagaccaagaatgcagccccctgtttcactcgagaacgccaggaccagcggcatcatcggttgggagctgttcttttccaaggcaggaagggcagggcgcagcggccggcctcgcttgatttcggctgccctggtgttgccagatcctcgacgcattctccggggttcccggccgccggtgtcgcggtggtgaacaaggggatgggcgtatcgtatccgtcacacagtaggccggacgtgctgtctagtccggggacgccgagctgcaatcggcgtgggatggcaggcgttggctaccagcagggtcctcgttcagaaagagtgatcccgccttggaccggccatacaagccattctgggagcggcatggtgttaccttacagcactgggactgggaggacgctgccatcgaaatgggaggatgcagagaggtggatcttcagccccaaccccaaccccaacaatgcactcgggaggtcggtcccgcaactctggcggccaaaatccaaaagtgggcctcttggacctcccggtagattttgtggggcgtactcttgtgtttcgtcgtcggctcagtttcttgacaacggtagagttggaaatctcactgtgaatgcacattacatggctgggatgttgctacctgagcatatttgcgggggtgttatggactgggaaagggatgcaagtggagcatcgggtgaggatagtagcaatggccagggaggctgcaggcctggtcaaatgaatgttcggcatcctgctatgcagcccaccagggtttctcagcaacatggtagtgcaatggagtcatatcagtcattgcatgcttctcttcaatctatacaagatggtggaattgaaagcataaaagactctgccactagcagtgcccccattattctgaggaaggatgtggcaacacaaacaagccctgctattagcaggtcatcctctcccagcacgaggacttcgttctcccgttcactatcgtcacaacaagtcaaagagctggagagttgtttctctaagctcgaggtcagggatgtgcaggtggatgatcgggtgactctgactaggtggtccaagaaacatgtcacccgaggctctgaaaagaatgctacaaatattattgagtgcaagaaaaaaaccgtggattctaaatcttctgcctgggaagtaacacaaactgcaaagtgtatttcaatgattgagggagaggaagcaaaaatgactgcatgggagaatatgcagaaagctgaagcagaagcagccatacaaaagcttgtgataaaacttgaaaagaaaaggccatactcgctggagaggattttcaacaccctcaggtctggctctcggaagacacaggtggtacgcagtacatcaaccgcaaatcaggatcagcatatttccagaactatcaaaacggcgccaaacctcagcaagaacggtcaaatgagttcattgagtggatgctttacatgtcatgctttctagagatgtagctccatggaaaacacaggtggtccatgcacacttaacagtagtttccttgttttcaggcactattgttagtttaaagtgtagaggaaaaaaatagatccttgtcagtaaccaactagggactgaatcccccctcccccttttccaatggtcaatctatagcatcgatcataatctggattgtccttaagtttttattgtgctaggggaacataagaaagtatgtagagcaaaatgagaggagctgttgttaccctcaattctttgtgattattggtattccaccatataataataaaagaggttcctcttctactagt

SEQ ID NO: 2232 - DNA, 1307 bp, Zea mays
tatcgcttcatgagatgctccattcccactgccctgttgggcggccttcaaaacacagcccctcctctctctctctaagacgggaaactgcagcacatattaattagtaactagctaggtagaagaagatgagctcgtcgatcagcatgatggaggcgagaatgcctccggggttcaggttccaccccagggatgacgagctcgtgatggactacctcctacaaaagctctccggccatggccaccatgccggcgctgccatcgtcgtcgacgtcgacctcaacaagtgcgagccatgggacctcccagattccgcgtgcgtgggtgggaaggagtggtacttcttcagcctgcgcgaccgcaagtacgcgacggggcagcgcactaaccgcgccacgcactccggctactggaaggccaccggcaaggaccgcgccgtcgtcgccggcggcgaggtggcggtggggatgcgcaagacgctggtcttctaccggggccgcgcgcccagggggaagaagacggagtgggtcatgcacgagttccgcctccacccccatgccgcgccgtgcctgctagcagcagctgcgccaaacaaggaggactgggtgctatgcagggtgttctacaagagcagaacaaccagcccaaggccagaatctgaagacgcccgggacggcaccccatcagctgaaccgcaactgccggctgccctgccgcttgcgcccctcgctgacacctacgccgccccaacggttgcagagcaggtgtactgcttctccggtctgccggcactgccattcagaagaccagtgagccttggggaccttctggagttcgacgcctccgagaaggaatctgtcacgacagcgatgaccagtgtctcgaacaacactagttcagtgctggagctggctccaaattgcaactggaaccaggaaaatggcatgtcacggatgtggagcccccttgggatatgagatagatctgtgttgtttgctggatctggatgtatggagtgttagtactgagtggccagtagggttctgctgcttagatttgattagcagtgtgacttgcagattgtgtagattagattatccgttattggactaatggcttggcgtagtatttgtacatattactactgaaggaacagtgtccttatccttgtttggcgtagtatttgtacatagcacctgctaaacttcagacaatcagtgaaagacaaatgtgtacattgtaacatagtgttaagaaactctgagagttgctaagttttcaggctctaagttctgatgcaatctcgc

SEQ ID NO: 2233 - DNA, 2088 bp, Zea mays
aaccccttttctcctatccctgcactccccccccccccccccctgctgccccgcgccgaagcaggtgtggcggcgctgcgagcctgcaaccatctccgcagactccgctgcgactcatctgggctacgacccacgtcaaggctgctagttgcgttcgttggagttgcggcttccgcgaatcccccaatccatcccagtcatggcgttctggggggtggaagtgaagcccgggaagccctacacccacatccatcacgctgaccatggccgcctccgcatttgccaggctacactgggcaactgtgatgctgctgcaaggacggtgctgcaatgcaatgttggcaacaagattcccatcaaactttgtagtctaaatccgaaattggccgagacatgccatctagaggttgagtttgaggaggttgatgatgttatcttctcagtaattggtcatagttcgatacatctctctggatactatgtctgtgcaagcaacaggtctaatgtgggggatgatgaatcagaatcttatggggaagatattgggcactccagcaccgatgaggagcatgataccagtgaggacagctatgaatctgacttcattgatgatcgtgaagttccattatctgagaagtatgggtctggttctatagatgacagtgatgatgagtgcacccaacgatgccacagacaaaaagctgaaaaaacgactcaaaatgctgaaagacggcggcgcttgaagaagcaccaagtaggtagcactgattacgatgatgatgatactccagtcatgaaacatgttgcgaagcgctgtgctcctaaaatatctgatagtggtgatgatgacactcctgtcacaaaacctgttgtcaaacgtagagcttcaatatttgatagtgacagtgatgaagatgataatgtacctatttctcttgcattgggtaagaaagacaatgctaaggttgctgaggaaactgaacatcaaaatggacaggcaaatggcatcaccaaaaaaaggattattgatgtcaagaaaagaaaacagtcttccatcagcgaggatcctgcatcgtcaatggatatgacagatgctaatgcaccatctgtttcaaaacaagttgatgaaataaaaaagaaatcaaagaaaaagatgagaaatcaatcaggggaaaataatgagaagcagtccaatataagaacattggatgacgggttggtggttgaatatttgtcaatgggaaacaatgatgcaaaagtggcttctgatggctgcaaggtctatatcaaatatgttggcatgttgaaggatgggaaaattgttgagtctaatgttagtgaaaagccttacaagttcaagcttggtgctggaaaagttatccgtggatgggatgttggtattcatggtatgcgtgttggcgagaaaagaaagcttacagttccaccttcaatgctctctggcggtaaatcagtgggagaagtacccgaaaattcttcagtcatatatgaaatcgagttagtgaaagtgaaataaagaaaaaatatgtcaggcttttgcatgtgccctatctcagcagctgcaacagttgcaggaattttgttgatatacagatgactcatgctcatgttttgcttccttctggaagaatttatatgtgccactcgtgccacaccataggacatcgagcagtgaactgcagcgggtgctttatccatgcatgccttgactggatacttggttttgcactatctggctacattactttgtaaactgcatacgatggttgaagcactattgtggtctggtgatttgccatatgtttgtgactacttcgcggttcactgctttgaatcatgtttgttttgccaatattgattgagttctgtaatagtttgatcagggtctcttggcttacgtgccagtcttttactgtagaagtggattttttttttccttgttacgtttggcagacgttgaactggtgcaaggcctttaaagtaatggctaatatatcgtccgtgcgtcacgaggatacaaattattcaaaagaatattagagcaaaatgattacttaaaaataaacaata

SEQ ID NO: 2234 - DNA, 1692 bp, Zea mays
gtgcggctggtcctagtagcacgatttcaatgcctgcaactgcagtgtgcgctgcgcctctgagagctgagccctttcttttgcaccttcccttgtgtcgcagtcgcactcgcgccatttgaaacgccactacgactctacgacctcgctcgctagtgctccagcgcgcgcccggccggtttggtataagcatggcggttgcggcggcgggcagcagggcgagagcggagcaggccaggctgcagtggcgggagcaggagccccggagccccgagatggccgcgccgccaaggccgcccaggccgcgcccggcgagggcggcggtcgtgtactacctggcgaggaacggccacctcgagcacccgcacttcatggaggtcgcgctctcctgccccgacggcctctacctccgagatgtgatcgaccggctcgacgcgctgagaggcaaagggatggcgcgcgtgtactcatgggcgtccaagaggagctaccggaacggcttcgtgtggcacgacctggcggacgacgactacatccacccggtggtcggccgggagtacgtgctcaagggcaccgagcgcctgcacccggtgccgccgccggcgctgctggacgcggcggccgcgtcctcctcgtcgtccggctcgcaggagacgcccacctcgtcgtcctctgccgggtgggaggcgcgcggcaggacggctcaccggatgaagagcgccagcgcgtgtggcgcggccgacgccgagctcggggagtacgtggcgtacaagggcgaggagcgcgccgcggacgccgcgacgcagaccgaggacggcggccgcggccacggccacagccacagccagaggcgcgtcctggctcccgccgcgcaggaggagctgagcagggcggagacgacgtcgccgccgacggcgtccacgagccccgagacgctggaggcgctcatcagggcggacgggcgcgttgtggcggccgtcagcggcagcggccgggccagggcgtcctccgtgctcatgcagctcatctcgtgcgggtccgtgtccgtgcgggacgcctcggtggtgccgcgcgcgcaggcgcaggcacaggcgcaccaccaccaccaccaccaccaccgcgcccgccgcccgccccgcccgccggcgtccgcggccgtcgacctgccgtcgtaccgcgccaagatcgtggaggacaaggagtacttcagcgggagcatcatcgagaccgcgaagcgctcgccggccgacgacgtcacgtccctggacctggccgttctccggcgctcgtcgtcgtacaacgcggagagggtgataaagctggaggtggcgaaggaggccggggacctgcacgaccgctgcatcccgcggaagcccaagggcaagaaagacggctggctacctggtcatctcctgcagctgcagcgcgcaggcgcagcaggggaatagcaagggatgacgtcgtgtgggcgtcatcgttggtatcctacagtatgcgttgcgttgggaacggtcgtagatgagtgtccgtccactagtccagtttggtgtcttctggttgttagatgctgattgctgaatgcttgcctgtgatttccgtgtgggctagcgacttcacgttatacgtgtcctgtctgcctcgatgtctggactgtttaattactactccctagtgatctgattctctttctgc

SEQ ID NO: 2235 - DNA, 1810 bp, Zea mays
cgagtccaaactccaaactcctacccccgcctcaagaatctctcttcgctccgagcgccggggccgatacggccatacccactgcaatgctccgcgttccacggccatggccttcctcaagaccctaaaccctctaatacgcaggcaggccaccccgatcgctatccccaggctgctcctctccctccacactgtcctcgattcatcctcccccaccactaccgccgccgccaccccgtttgccaacgctgtgcacacccatgtccccatccggtccggcggtccgctgttcctctcgtcggccccatggatgctgtcgcagtcggcgacaccgctcacggccgcggctgccgcccttggcgccaagctccacagggcccaggccctccccggcggccgcgcgctggccgtcgcggccgcagtggggtgggagcacatgcggatctccaggggtgaagcggaggttgcgacgtcttcgggaattgtgggatatggaggtgagaggtttctgaatgcgcccaatttagtgtcgattggacggatggtgtcagggccggtcattggatggatgatcgtgaatgaatggtatcttcctgcctttgccacattggctatctcgggtgcaagtgattggttggatggctttttagctagaaagatgggcatcaattctgtatttggatcatatttggaccctctggctgacaaggttttgattggctgtgttgctgtagccatggttgaaaaagaccttttacatcctggtcttgttggcctcgttgtcgtaagagacttgctccttgtgggtggtgctttctacaagcgggcttctagtctgggatggaagtggaatagttggtcagaatttgttaacctagatgttattcatcgtgaaaaggttgaacctctgttcatcagcaaggtaaacacagtcttccaattaatgttggttgccgctgcacttcttcagccagaatttggcacagaggagactcagaattatattgcacttctgagttggcttgtggctactacgacaatcacttccacaataggttatggtgtgaagcactaccgaatcaaaccaaggagtcggtgactgttgctgcaggctattcatggattaatttgctgctgctgatgacatacatcaagtgacttactgacttgtatcaagcatgctgttgtttcttaagcttcgtcaacttcccaatttgcagctgcacaactataggtcttgttgcccccctttgtcctcatggatttccttaacggcaaaattttgggcaatattggagaaaggagtgaagaacggtctcatgaattgaatgtaatcggtgcatgatttgtgcggtaggcctctggccgtcctcctgtagctgttaagtcgtggtgactacttttgcctagttttggcctaaagtgtccatcaatttgtcagagatcaaactagccgaacctttgccttttgctttgtccagacacattagctatattgcaggtgtacatatgtacttcagaatacttgaacttggcaaatggcgatcgctaggtgatatcacgcttccagatgtctgcaggttaaatgcatttacaactatgttcatgcatcaatgcaactgtttagcagggcttttttatgagaaaattccctttgtgtttgtgtgctccactgtatggactggacgggtagggctggaaaccgagccgagcctgtcttttgggctcgttcccggagcgagccgagccgagccggctcgcgagctctgtcaaattacttaatatgtagaataatgatggatattggtta

SEQ ID NO: 2236 - DNA, 1719 bp, Zea mays
atggagatgtcagccatggaggaagccctccccaaggcgatggagaggaggaagggaggcctcagaaccattccgttcatcatcttaaacgagatattcgagaaggtggccacgttcgggctgtcggccaacatgatcctgtacctcaccgagcggtatctcatgaccaacgcctttgccaccgtcgtcctctacttctggcatgccttctccaacttcctgcccatcttaggcgccgtgctcgccgacgcccgcctcggccggttccgggtcatcaccctcggctcctgcgttagcctcttcgggatgtgcctgctgtggctgacggcgatccttccggtgtacaagaacaccccggagtgcgcgccggggcggccggtagggtgcgcggtgctgccgtggcagctgccgctcctcttcacgtcgttcgcgttcatgtccctcgggtcgggcggcatccggccctgcacgctggcgttcggggccgaccagctggacaagcgggacaacagcgccaataacgtgaggacgctgcagaccttcttcaactggccaggggctggggtcgtcggcttcgccgtgcccgtcgtgctcatggtcaccgcgctcacgctgttcctcctgggctcgcccttctacatcaaggcggcggccaacagcagcgtcgtcatcggcttcgtgcaggtgctcgtcgccagctacaataaccgccacgagcccttgccgccggagactgccgactcctcgagcttctacaacaaagcaggctgcaaacctaggactcccacgaacaagctaatgtacttgaaccgggcttgcgtgctcaggaacccgagcaaggagatcagccccgacggggcggcgtgcgatccgtggaggctgtgcacggtgcagcaggtggaggacaccaaggccgtcatccgcgtgcttccgatatggtcgacggggatcatgccgggcgtggtcgtcgggcagcagatgttcccgacgctgcaggcgaagacgatggagcggagggtgggcaagctggagatcccccctgcctccttcggcgtcttcgccatcctgacgctcaccgtctgggttgccgtgtacgaccgcgtgctggtgcggcccctgtcccggctcaccggccacgcgcgcgggctcagcctgcggcagcggatgggcgccggcctggtgctcttcgccgtggccatggccgtggccgcgcacaccgagagcgtccgccgagccgccgcgctcgccgaggggctccgcgactccaacccgctgacgggggagcgcccggtgcgcatgtcggccatgaatctggtgccgcagcactgcctcacggggctcgccgagggcctgaacctgatcgggcagatcgagttctactactccgagttccccaagaccatgtccagcataggggtgtccctgctcgcgctcggcctcgggtttggcgccgtgctgggcagcgccatcgtcggggtcatcgacgcggggacccggagcggcggcagccacgacggctggctgccgagcaacctgaacagggggcactacgactactactacttggtactggcggtgctatgcgccgccaacgtgctgtacttcgcagtgtgtggctgggcatacggcgacgaggggcaaaaccgggtggtggccgccgacgccgcggtggacgacgtcgacgacaaggaggaggagcaaaaggcggtaatcatctag

SEQ ID NO: 2237 - DNA, 1821 bp, Zea mays
aaagtctcaagtctgcagagtaaccggagtagcatagcactagcaagcaatggccgctctcacttccgctctcctcttcaccgccctcctcgtggccgcccagtacatgctccgcttgctccactccttcctgtgggtcccgttccgcctggaacgccgcttccggcggcagggaatccggtggccaccacgaagcctggtctccggtaacgcagccgactaccgcgacttactaggcgccgccaggtccgcgcccctctcctccttccgccacaacggcgtcgtcgcccgcgccacgccgcagtacgcggtctggctggcgcggtacggccggccgttcgtgtactggttcgggccccggccgcggctggtgatctccgacccggagctcgtgaaggccgtgatgaccgactccacggggggctttgataaggcggcctcgggcggcaacaacccgctcgccaggcagctcatcggcgaggggctcgtcgggctctccggggagacgtgggcgcgccaccgccgtgtgatttcgccggcgtttaacatggagagggtgaagtcttggataccagaaatagcagctgcggcatcatctgttctggataagtgggaagccgaaggtgggagccgcactgagtttgagatcgatgtccataaagcattccacactttgagtgcggatgtcatttcctgtgtggcatttggaagcagctacgaggaggggaaacgaattttccaattgcaggaggaacagatgcaacttgctcttcttgcaatgaggactgtttatattcctggattcaggtttgtaccaacaaagaagaaccgaaaaaggcagaggttaaaccaggaaatccaatgctccctgcgcaaattgatcgaaatcaatggaacaaaatgcgaggactcaaaaaatttgctggggttaatgctatcagccagcaaagctgggagtgaatacaaaatgggaatcgaagagataatccatgagtgcaagacgttttactttgctgggaaggaaacaacagcgaacctgttgacatgggcaacacttcttcttgcgttgcatcaagagtggcaggtcaaggcccgtgatgaggttcttaaagtgtgcggaaagcatgagcaccctaatgcagaaaacctgagcgatctcaagattgtaactatggtgttaaaagaaaccctcaggctgtatcctccagctacatttatcaatcgggactgccactagggatatcaagctgggtaaactagacatcccggatggcacacggctggacttccctatcattcacatccatcgtgaccatgaagtctggggcatggatgcagaggagtttaatccatcaaggtttgcagatggcagcagctatcacctaggtgcttacttcccctttgggatcggccctacaatatgcgttggccagaatcttgcaatggtcgaggccaaggtggcgcttgcaatgacccttcagcggtttgcgttcaccgtttcggcgtcttatgctcatgcaccgatgctggtgttcaccctccagcctcagttcggtgctcaagttcttgtccggaagatatgagccttctatgtgaaggatccatgaggcctctcctttttataatattctttcgaacacaggactctactttttttttgttcaatcctgttcatgaaagactgtgtatataagatttgtcctctacaggaatctgctaaaggcttcaaacacttgagctaaaatggcatgtgttgtacaaaaaccatctagaacctgcatgaatataccgatttggaactgcgaaaaaaaaaaaaaaaaa

SEQ ID NO: 2238 - DNA, 2563 bp, Zea mays
gaaaactcgtccttgttggctgcgagattctatcactcctccctcgtctccagttttttccctcgtctgctataaatggagctcaccttccacgacctctggcagttcccatccgccgcccgcgcacttgttccttccggcacagcacacaggacaccgtagacagattcatcgcgacgatggggctggacgtcgtggagatcgggatgggcgccgatttgagcctggatctgaggcacttcgcctccaaggccgtgcggcagagcaaggactacgcgccggcgccggcgccggacatggacgcctgcatccgccgcctcgaggaggagcggggcaagatcgagatgttcaagcgggagctgccgctctgcgcgcgcctcctcgcagacgtgatcgatgtgatgaaggaggaagcggggaaggcggtggcggaggaggacggcgccgccggggacaagagcaagtggatgagcacggcgcagctctggacgggcgattgcggccgcgaggacgcggaaccagagaagcaagacaaggagaggagctcgcctgaggccaggtctcgcgccgccggcggcgctttcttgccgctcaaggctgccgtgggctccggcgcgccggcgttcgcgccgctcggcttgagaatggacgacaaggccgccgcgcgcgccgggatgcccgacctgtgcttgctgtcgccgccggcgaccaagagcgccgccgaggagagccgacgccaggtggtggggtttgcgcaggcggcgacgagggcggccgccgccacggcgccagctgccccttcgcttagcgttggcgtccagtccccgtcgcagcaggcgaggaaggctcggcgttgctggtccacggagctgcatcgccagttcgtcgccgccttgaaccagctcggtggcccccaagttgccaccccaaagcagatcagggagctgatgaaggtggacggcctcacaaacgacgaagtgaaaagccaccttcagaaataccggctgcacaaccggagggcgccagggtccggcgtggtgagccagcccatcgtgctggtgggagggctgtggattccgcaggagcaaagcagctcgcagtccgggtctccccacggcccgctccacttctccacctcaggcatcgcagtctcgtcggcggccaccgtcagctgcgaggaggaagacggacggtccgagagctatggctggaaatgatggagaggctgctgctgctgctgctgctgagaggggagctgcagcctcaggaacgggaatcatcaggagggaaactgagagtagtgtagctgtctgtacacatacatagttacattacattacatacagggagtgagggagatcgggccttgagcgctcgagaccaaactgatgcttcgggtttgtacatcccaaagagatgagatgatacagttttgcggctaatccatgtttcgggcttttttgtcaccatcttcagttcttcttttcgttgaataaaatgtgtgtcgaggaatgaacagtccatttaagattttgcatgtgcagcagtagtaataaaaaaaatgtttttgctgttggtcaccgaatgaacagtccagctgctgaaatgttgcagagttctagcattgaatagaaactttggatgctgtcctcggaacttggggccgggtggtccaggctgaaatcctgataacgattaaccaaccaacatgtcgttcattatcctgttccccatcatcaacagcacgtttctgtactgtactctgtagtctgtaccagtagcagcatgcaggcctccttcatctgctgaactgaactgacagcagaatgctaaagaagacacgggcacggcagcagcctttctgttcatctgctgcccccaaccgtccgcacagtcgcacgccaagaacctcaccgttgccgacggcgggcgttcttggcatgcagatgcaggcctccttcctctgcgactcccccgtgctgcaagcggcaagcctgcatgcagtgcacgctgccgggggtggcggcattaacaactccggcgtccctatcgctggctggcggtcagagtaatctttgtgtagtggcaactgggtcctgcctgcgtgctcttatccacagcggagccggaggaggatattctccaggcattcttctgtctccttcagcgtgcgcctactttgaacttgtctctgtctctgtgtgtctgtcactcaccctgaaagagagaagataagagagagaaagagtgaaaggcggctcggtccatgcattagcgtctcatcagtccttggacaacttatgttatgttgttaggtatagttcctcgcatgatcatttaaagtttgtctagtcaagctataacttttttttaaaaaaaaacaacagctagttgttgtgagatatgagcagctacaaagcttctgtgtacgaatacgaatggacaccacatgtcattcacggttcactcgaccaagtctcctctctcactgacacatggagccactcgtcattttcttccttatttccctcctactgaccagtgttcaccatttcgttttttt

SEQ ID NO: 2239 - DNA, 4614 bp, Zea mays
gggaaggtgaccgggatagagaaagaaaagtagaaacccaaacccccggcgaggacgccaccgtggcgacggcggatgcggcggggctggtccccgcggacctggagagtcgggtgatggaggcggtgaaggcgtcggaggcgcgccgcgacccgccgctgctgcgggcggtggagctgtcccgcgtcgtcgccgaagagggcgcgggcgccgagctggccgggatcctcgtctccaacctctgtttcgcgcacaactcgccctcgctctggaagctcctgggccaagccgtcgcgtcccgcctcctctgcccgctccacgtcctcgcgctcctcacccctagggtgttgccgcagcggcgagcgcagcctgaggcgtatcggctgtatctggagctcctcaagtgtcacgccacgtcgtcgttgctggcgatggaggctgggcctaaccgtgacaagatagggaagtccattgctgaagctttgcaactatccaaggtttatggattttctggaacagagtttggacatgttgtcattctgtttgtgttggctgttgtcaataaactgattgatagcatactcgaggattgtggctttccatctgtgatggcagaggggcaagagagtgtatatgccattgaggggccacagcctatggacttagacattaaaaggggatctactgagaaccaaaatgagcatcgcgaacagttacgccggaagaacactttcatggctttggacgtgttgcatatgatggctgctgatagaaagattcaatcatttctgagcttgatattcctgaacatgcctgaaaagttcagttctctacgccagaggttgagttctattgaagcacacaaggtgaccttggagactctactgccttctggacacaaaattaatgacttgttaataaacatctggagagtttgcaaagcaggctatcaaccaaataacaaacacattctgggtgttcttggtaatatgggatccggtggctcccttctgggccagcttactggagctgggaggcctgcctgctggataatatttgatatatatgtggagaatgcaattgatgggaagcatctaagtgttacatcagctatcgggattataaaagaaatgaccaagacaatgcaagtgcttaatgaagcaagctggcaggaaacatttaaagctctttggatttccacccttcgtcttgtacaacgggctagagaacctcttgaaggaccgattcctcatctagatgcaaggttatgcatgttgttagctcttataccattatcaattgccgcgattcttcaagaggaaagtgatatgtttggagttgaagggaacaaaattcttccacaaagacaagggcttatatcatctctccaggatctgatccagtattcaggacttcttgtaccaccttcatcagtggtgaatgcagctaatgctgcagcctcaaaagcagcaatatttaaggccaactataaggctggggctggcaacactagcatgatggaccagactgactcttcaatgaaagctgctgggaacatgctccatctcattatcgaagcctgtatctcgagaaagttgattgatacatctgcttacttatggcatggttatgttgtaccatctaggactttaaaagatacagctttgccccaagaatccccctggctgaactttatgaaagggtctcaactttcagaaccccttattgatgctctggtcgcaactcctgcttcaagtgttgcggaattggacaagttatacagtgtagcaacaaatggttcagaagaagaaaaaacagctgctgcaaagattctttgtggcgcatcacttgttcgtggctggaacattcaggaacatgtggtcagtatggtggtcaagctattatcagcttctttaccctcagattcctcaacttcaactcctgggagcatgagccactaccttgctcatatgtctacgttgaacgaaatcttactcggtgtgtcttatggtgatgtcatccacattctttcgttgtatggaatggttccagatgttgccgtggctttaatgccactatgtgaggcttttgggtcaatagcaccgccacctaatcacaagtctaccattcttggtgaaacatctgtttatttggtcttctcctgtgcatttctttgtcttcttcgcttgtggaagttttatagaccccctcaagagtattgtcttactggtcgtggaggctcagtaaagctggaactgactctggactatctgttgttgatgcacaataatcgcattttctcaaattcgtctgcccctaatagggattcttacaacagtatgggctcagtcaatgaggtctctgctcagccgatttatattgattctttccccaagctaagtgcttggtatttccagaatcaagcttgcatcgcctctacactttctggtctttgcaacaaaaaccctgtccatcaagttgcgaacaaaattttgaatatgatttgccgaaaaatgaataaaggtggagtatcatctagtaatctttcatctacttctagtagtagcgttagtggttcttctgtaagtgcatcggatgattcttaccaaaggcctgctgttcctgcttgggaatttttagaagctgttccttttgtacttgaagctgttctgacagcatgtgctcatgggcggctttccagccgagacttgactacaagtaagttgattccccatattgtatgtgggtacctcttagcatcattattttttttgctaatgtgctaccgtactgcaggcttaagggatcttgtggactttttgcctgcttctcttgctgcaattgtaagctacttctcagcagaaattacacggggaatctggaaacctgttccaatgaatggaactgaatggcccagtcctggtgcttctcttcattccattgaagctgaagtaaaggaaattcttgcatctgctggtgttcagattaacagctgctatccacgtggtgtgccgccaatgcttcctttgcctatggctgcacttgtcagcttgacaattacatttaagctagataggagtttggagtacattcaaggggtcattggacatgcactagagaactgcgcagggggaagttcctggccaagcatgcccattatcggggcattgtggacacagaaagtgcgaagatggcatgacttcattgtcctctcttgtatgcgttctccatttggcagagacaaagatgcagttgcgcagctcatccgaagctgcttttcgtcctttctgcagtcatcatccagtggttctgacataatcgcaaaccgtggagttggggctttattaggggactcaatcacggatcaaggtcttaggctcccaatggcacctggtttcgtctacctgagaacatgtcgaactttccatgacacatacttcgttagtgaagtgatcctcaagcaagtgattgaatgggctcacaaacttgcaaatggatggtctttcaatgggcctccgcagttgaaatcaggccggacaccactatcttgtgcagcatctatggcgcatcaggtcgcgatgcttggtggtggtctcctatgcatagcaggtggaccacttgtggtccaggtgttgtatgaagacacactaccgacactgctgctgtcagccagagaacagagtttgaaagaccctgggccagtttctagcacactccaaggttacgccatggccaacatgctcttttactgtggtagcctactttggggagcggacaggagttctcctgtcatgaaattgtctttcctctcgaggcggccacgggtggtgagaaaccacatggatttcatagctggtgtactggacggacacattcttctgggctgtgacccgggtacctggaaagcgtatgtttctcagtttatgttcctggtggtgaagtttgttccatcatggttgccggacataaagctggacacgctaaagaagatagcagctggacttcggagttggcatgaacatgaccttgctctatcccttcttgagcgaggaggaccacaagcaatctctgttgtagtcgagacctttctgtgatcctgccatttggacattttgccccccacctgacatcgcagccgctgttagggtttgaagtcggtggtctgaggtctagctgaagtaatcaggatgacccttccagaattccacttgagcaaccaggataactgatgtttttctcatgtatggcgaacccattttgtttttgtgaattcaatacggaagaacattcaacctactagagtctagagtgtattgacatcagccctaacatgtaacctatgggaatttcattaactttattgcactgacttcagccctaacttgtaacatacgggaatactctatcgtgttttatatcggcgttttagttgggataaccgaactttactctccatggttcgcatcactcttaggttgggcctcttttgcaacaatgtttttcaaagtcacagtttataatatcataatttactgtatgttatgatataactataatatattttacatcagtccaatccaacatttatttagagacataatattttagttgtag

SEQ ID NO: 2240 - DNA, 3455 bp, Zea mays
cctcgttctcacttcctacccgctggccgcttgccggtaccacacacgcggcacgccgccgcgccagccatggacaccgctctaccttccgtcctcataggcggcggactctccgtgtccgtctccatttccaccgccactaaagccggcagccaatccatttcctcccacctctcgacctcctccctccgtttaaccgctcgccatcggaaccggcgccgtttgcccctccttgcatcatcttccgagtctcctcccgcgcaactagccgccgcttcgactgagagccagtcgcgttcctccaggtgggtggttgtgatggatacgccccctgccgccgcgggaggcagcggggtgtcccgcgcagaggccgtggattactacgcagccacactggcccaggttgttggaaggtgagtaatttggcattctgtagcaaacgagagcagttaccgttctttttttatttcaacgtttttttatgctgaaaatattgtgggtaattatggcagtgagaaggaggcgcagatgcgcatatgtgaggcttcgtgggatgggacctacgagttccgctgcgagatcgacgaggatgcatcgaaggagcttgcaaagatgcctggagtgttatctgttcaactagatatgggtaacaaatcagagaaggataatcacagcttgagtctctcgacagctaaccttgtaagcattagtgatggtgcttctacatcttcaagtgggaaaaatgagttttggcttgtccggatggagaagcccggagttgaagttgtgacaaaggcccaaatggtggatcactacacccaaatccttatgaaagtgttggggaagtatgtaatctcatcaacctagctactactttactagtatctgtatgttgtgcatgataaaactgttgtcatctctcaaatttcagcgaacaggatgctcaggttagtatatatcacgtttcatgggatagggattatggtttctgttgtcatattgatgaagaatgcgcaaaagagttagctggtgagcaacttgggctttcatacccctttgtatagagttatgacaaatccatgtctttgaatgcactaagccattgacaaattaactttgtatatcagatgttcctggagtgttatctgttcaacccgatacgaactttggatcagacaacaaaaattacaaaggtgatgatggcgtgaaatcatctgaagggactggagcggtcgatatcaaaactaaaaggctctttgttacagggctttcattttatacatctgagaagactctacgggcagcgtttgagcctttcggtgagctcgttgaagtgaagataattatggacaggatatcaaaaaggtcaaaaggttatgccttcgtagaatacactaccgaggaagctggaggtgctgctctaaaagcaatgaatggacaggtaggtgattagaattcctattccacgactagcattgtttcagttgtatgatgtttgcaaacctcttgaaactcacggttatacttttatctgcagatcataaacggctggatgatagttgttgatgttgctaaaactagatcgagagaccgtctatctgggggatctaatcaagcatttcgaccacactatcaggctagatgactgttatatgtacagaacttacagctgtagagtagagataagcacgagagcgaggaattgctgggggatgccgagccgcctgatctgattgtagttcagtgcccttgtcttgtgctaattgctagaaaatgaatactcccagcaaaaaaatatgtaaatgcagctgaagtgtacgattactaacttctacttaattaaatcattctcagatacaggctttttcctgctcgtaagtttgaatatatatttaatatttatgatatgatggattttttattaacaagtgataatcttcctccaaagaaatttattacaattgttcagaaatagcgaacggttcaggttcatatgcagctgatgtaaaattatgtttcaaatcctccaacatatgataaataccctcgctttctatatgcagcttgtctgcagtggcaaaggaatgtacgcttccatctatctctatccagctgagcccaggtttcttggctactctatgttcctccatcctcctccgcgtcctcttcgagtcctcccattgttccgctcgtgcatatgtgttcgatagcagcacatacgagctgccatgacttggttttgcctctgccaacttcgacgcagtgagctctgccatctcgacgttgccatggctacggcaggctgctagtagcgagctccagattacaaaaccaggatcttcaggtagattgctggcaagattgaaagcctccttcaagaacccagcacggccaaggagatcaaccaagcagccatagtgctggatcatcggcctgatgcccatgctcctcattaggtcgaagtacttgaagccctcatcgacgagcccgccatggctgcaggcactcaagacggctacgaaggtgacaccattaggctcaatgcccacctgcctcatctcgacgaacaacctcaaggcattctctggttgaccatgtgctgcgaaacctgcgatcaaagaggtccaatgctccacattcttggtggtgacacttaagaagcaactgtgtgcagcacccatgctcccgcacctcgtgtacatactgaccagtgcaaccccgagaggaccatcaagtgagaactcccgacggagaacatacccgtgtgcgctcttcccaattgcaagtagaccaatgtcccgaacagccgacacgaagccaaccatcgtggcctcatctggcgctaaaccataagccacagtcatctcgataaacaagtccactgccaccggcgcccacccgttccttgcaaaaccagaaattatggtgttccaagaaaccgcattgcgctgcggcattttcacaaacacctcccacgcagcgtccaagtcgccatctctgataagcgcatcaagcagcacgttccaggtgaccaccgtccggtcggccattccatcgaacaccttccgcgcgtcgcacacgcggccgagcctcgcgtaggcgcgaatcagggacgtgaaggcttggacgtgggagacagcccgcgagccgcctgacttgacgaggagtgcgtggatctgctcggcctcggccacggcggagggcagccgcgcgcaggcggcgagcgcgggcatcagagccgggttagtgtggagggcgtggccggcgctgtggtgcgcgcggaaggcgcacagcgaggcgtcgcccgagggcgcggcgcggcatcggggagctgtggcgttcgtggcggccttggagggtagggggcttggcgggaaacctgaggtcgacggcgagagcatcgagagcgccaaattgttcatggaagcgcctcaaactgcctgcccatctgttca

SEQ ID NO: 2241 - DNA, 1730 bp, Zea mays
gatggataagaaaggaaagcggtgcgagcggaggaggcgaccgaagcgccacttgcttgagtagcgaagcgcgagagcaatggcgtcgctgtcgtgcgcctccacgctgccctggacccccgcctcctacccgcggccctcggcggggcgctgcctcacggcctctcgccgggctccgtcgctggtcatcgtcgcccaggggaaggtcaagaagtaccgccaggtcatattgacagacgacatagaagaggtggggaagaaaggggatacactgaaggtgcgagctggattctaccgcaacttcctccttcccaagggcaaggctacacttctgaccccagaagtcctcaaggaaatgcagctggagcaggagagaatagaagctgagaagaagcgggtaaaagaagacgcgcaacaacttgctcgagtttttgaaaccattggcgctttcaaactccctcgcaaaggtggaaaaggaaaacagatctttgggagtgtcacggcacaggatgttgttgacataataaagtcacaacttaatagggatgtcgacaagaagctggtgacggttccagaaatccgtgaaatcggagagtatgttgcagagatcaagcttcacccagacgtgacagcgcgagtaaggctgaatgtctatgcgaaatgagctcagcagttacagaacctcgagtaatggactttggagaagcctgatgtttgccagtgcagagattttgctgcaagtgccaggtgctgcggtagacatgaggcctggtctggccgtgacttgcctggttttgatacacaattcactggctcactgcgcatcctattccctaccgtgtgaagtcaagttttcaacaattatatctgttgattttgaggcggaaaatataaattgttgtaaagaacaatttgtttgaactgtagagcactacttcgccaaaaacgacccttctttcttgtcctctaaccttccccacctctacgtctgcatccactacaaaaaaaaggcaagaaatttgctaagtatggggctccatagagcgttattcagattggaacaccaacgtacttgacacatgaactgcgtttcttttagccaaagtctgggcgtcaccagcgatctgatacagattcacgcaaaccaactgtattcatctcaacatccacgttctacaaaaatgacagtttcacatcgttgtctaaaaatgcaatgactcccgaataccagtacaactcctcgcttcaccctttacaaaaatccttctgcttctgctaaatgaactagcatcataactgaacagccagcattgcaggcaagggggcattgcacagagctagaaatagcctttccgcttacgcccggtgtacttcgtgtcggcgggcacatcatgtcctcttcttctcatctgctcctttttcctcaggagccaatccttgcctttgccattctttttcgttttctgccgcttcttcggcctattcctttcatatattcccacctgcatttcaagataaattttcatccagtgctggcataatactgatacacatccacaatcatacggtaagagcataagatatgggagtaaaaaacaagaaactatgacactgcaaagattcgtgatcaagcataaagagtcagtatttaactactgcatccaagacaacggcagtgtccatactttatagcattgctgcattagacgactactaattagtatgtgcac

SEQ ID NO: 2242 - DNA, 1432 bp, Zea mays
acattttacggccacaaaaaatgtataaaataggaaatgggaaaaccccatcacagctccacgcctccactgctatccctctcttcctctctgctttccccttccaatggaatcctgtagcttccgtgccgcaaccgcgccttctccctttccctccgctccttcttcatcttcatccccgcgcgccccatgccccatactccgatttcccaggccaagaaaagggaggcagattggggtgcggaggagggcgtccggatttgatgccttcgcgtctttcgccggcaaggtcttcgtggatgaggcgattggagcggaatatggggagggcttcgaaacatttcgaatggatggaccactcaaggttgatgtggattatctgaatgaaaaattgcaagagtgcttccttcaaaggataaggcatgctatgaagccggatgaggcgtttggtctaattttttcgtgggacaatgttattgctgatacagactcgctaaagttgaatgcttggagacaacttgctttggaggaaggtaaggatatcccaagtggtgctcatgtccggaagagcattattcatggtgctgctgaccatgttcttagaaaggttttgtactgggcaaaagaggaagataaaatggaaaaattgaaggcacgccttatagagttgtactacgagaacctgttcaaactcgatacacctgtagaaggattgagagaatggctggatgctgttcagacagcagggataccttgtgctgtcgcatcaccccttgacaggagatgcatgatcgaagctttggatcggatggcgctaagcaaatatttcaaggcgatcgtgactgacgaagatgatatggagtcgatagcaaatcgatttctgtcagctgctatgaagttggatcgtaaaccctcgaagtgtgtggtgttcgaggatgacccaaggggcgtcacagccgcccacaactgtacaatgatggcagtcgcattgattggtgctcatccagcgtatgagttggtacaggcagaccttgccattgcaaagtacagcgagctctcagtgatcaacctcagaaggctgtttgcgaacaagggaatcagcttcatggacttgcagaagcagataatcgagaagtcacctcccaagaggaggctgacagtagacaccattttctgatagatacacttttatttggtgtctgcctgttgttcttgagtagccaacaaccttcggcattatggcggtggcgttgtatataagatagtgctgatgttaggtgatccgctgtgtacctccttgtgaatgcaatgcggtagttccatcaaggtaccatgaggaagactgctgcaacaatgttgttgctgatgtaagctgatattattcaaatttattcatatttcatggtcgatatctagctcgtcgacatcttgt

SEQ ID NO: 2243 - DNA, 3576 bp, Zea mays
gcgtgaggccaatgacctcatccgatccctttccctttcccatccgcgcgtccctactcctccccctccctcctcaacgacgcgagaagacgcaatcctgggagctccgaaccctagctcctaatttgagccccggtgtcatcgattcctcaggagcccgccgcgattcggctcccgtagcagcatagggctccaccgctccccagctgcatcagcatcgacggcggcggcgcgccgccgcgactacgctcgaggaagcacctagtctcggcgggttctcgttcttggaggccttccataaggcggtttcgtggtgtccgagcccggatctacggcgatctgcaagcggaaggcgatagatgaggcgattcagtggtaacccccaatccggtgggtttccggctggcagaggcggaaaggttcgggccttcggcgggcggtggagatacaaaaaaattgcttgcttgtacacttgttcatgttcatttgttcctgctatctgttgtggtttaaagcatcaattttccgctcaatttaagggcgaagacactttttttgttccttccttgttggtttctatggaataatctctatattacagaagaggagtgtggaaaagcaacaaaaaagaggaatataaaatacaaaaaagatataaccagcagaaaaaagagattttttttgagtgggcaagcaaatggctgtgtattacaagttcaagagtgctagagactttgactcgattccgattgaggggcaattcatctctgttgccaacttgaaggagcggatttttgagtccaagcatctcggcaggggcacagattttgaccttatgatctcaaatgctcagactgatgaagagtatgctgatgaggccactatgataccgaaaaatacgtcagtattgattcggcggataccaggacgaccaaggaagcctattgtcacagaacctgaagagacaaaagctgcagaagatggtgtacaagatgtcatgcccacatcgggtgcttttcttggtgattcatctatgaaatatcctgaagaatctgagtgggatgatgagtttggcaacgaattatatatttctgattcagttccttatcagcctgtttgccaggcggttgatgctattgaaaataaagttgacgaggatagtaaaataaaagcacttattgatacatctgcccttgactatagccaaatccctgatggttatggttctggaagaggctatggtagagggatgggtggaagaatgatggctggacgtggctttggacgtgggctagaacgcaggacacctcctccaggctatgtttgtcacagatgcaaagtacctggtcattttattcaacattgccccacaaatggggatgctagatatgatgtgaaaaggatgaaacccccaactggcattccaaaatcaatgctaatgcaaactccggatggttcatacgcactaccaagtggagctggtgctgttttgaagccaaatgaagctgcttttgagaaggagatagagggcctacctaccacacgtcctgttggtgatcttccaccagagctacgctgcccattgtgcaaagaagtaatgaaggatgctgttctaactagtaaatgctgctttaggagtttctgtgataaatgcatcagggactacataattaacaagtcaatgtgtgtctgtggtgccacaagcatattagctgatgatcttctccctaataaaactctaagagaaaccatcagtcgcatattagaggcaccaccaactagcagtacagaaaatgtgggaagcatggtgcaagtacaggacatggagtcagctctacctgtacaacctaagcataggtctcctgctgtttctgctgcttcaaaggaagaggctaaagcatccacacttgtagaagagtctccagatgctgagagcctcaatggaacaaaagctacaaatattgatgcgagttcttcggataagaaagctttgacagttccagatattgctgaagggaccttggattctaagaaagcgaaagaagataaaccagtagaagcaaccccagtggcaaaagattctcaagaaaagtttcctgcaggggaacaagcggtaaagaagaagaaaaagaagaagccacgtgttcctggaaatgctgaagagcaatggaaaaattttcaagattttggaactgaaaatttttcggggatgcccttgggtccaactggagcattcaacccttactggggcggaggagtgccattgccaatggattacatgaatgcaccgtttcctggtcccatgccttacatgggttatccaccaggtccatttgacccttttggtgggggtgttctcccacaagatccatttatgcccccaggatacatgatgccaggagttcctagggatctttctgaattggcagttaacgctatgggaataaacatgggcccgccagttatgagcagagaagaattcgatcccaggaaacctgaacataggaggagacgtgaaatggatcggttcaatgatagggaaagagagcgtgaccgttctcgagagcgagagcgagaacgggagcgggagcgttccttggagagggagagggagcgggagcgggagcgtggccgttctctggagagggagcgggagcgggttcgagagctggagcgttcccgcgagggtgaccgtgaacggcagcgaggcagggacagggacagggactcacgcagagaggccagagcatcaccaggggccattaatgatagttcctcgatgaggcggaatgataggtcgaggtcccagccggacaggtcggagcgtggcccgccgcagccgtccagccccgaccggcagtcgcgtcgctcctcctccggcaagaagcgttcctcctccgaccgctacgacgacatgccgctcccacctccccctccgctgcccgcgacgcggcacgaggccgagcccgccaaggcaccggggtcgtcgtccaagtccaaggccagcgtcttctcccgcatcagcttccccggagacggcgccaacccctccgacgccaagcgcagccgcagggcctccgacaagccccccgcgcgctcctcttcctcctccaagaagagcgccgcggcagagggcggggacggccgcggccaccgccaccaccgtgagcccgcggccgccgaggaggagaagcctaggcccgctgcctccggtggcgactactacggcggcacggacggagaggagagcgaggacgaggagcagcacttcaagcggcggccgtcctcgtcctcccggcgcgagcgcgagcaggacgcgccggaagagcagccgcgccactcgcgacggtccagggaccacaggcgccggtgagcgtcgccccgtccgtccgtgatatataaatcttagaagcttgagttgggaggtcgtcgcctccgcagatcagagccgtcctgcttccctgtcgcgtcggagttgggccctgtacattgccttcccgcgattatcatgttttgtttaaatcggatcggatcaaatggggattataataagtttgatttgatggatcatcttaa

SEQ ID NO: 2244 - DNA, 1619 bp, Zea mays
ttactaattgatgatcattatacaatgtgattaattcaccattgaacacaagtacatcacaagcatcagatcaatccgattatactagacatatgtttccattttgtaaattgagacgcataaaatacaagtcgatggtgctaatcacaatcggccaaaaccatacttaaaactaacttaactagttttctaagccatttcatcggattaacttgtacagcctacgagttaaatacgatatttaatcattcgcgctagcaggtgtaccttacacctatattttaccacacctcgcgactatttcataattacgaacatcacaacatacgtatgctaaattaataaaaatggtcacataacagcacgccgacacaacaaccgagctggccataatcactaagcgtacctatgctaaataaaaaggatcgtcgcaacctccatatctattaatccatccactaaaaaaataatagcggtagcgaatcagagtatgattaccatattgaccataacttcgcgcagacagcaacgattcttgcgcagacctttttccgagcacccggccacacgggatttattgctttatccaaattctcgggatcgttcgacgacgcaagggatgtcgacaagtcggagacttgcagggtcgagcacgacaaggaattctgagggttgacataagccgcacgaaattggaaatcaaatcatcagagtcgatgagcacgtcgtgggcacaacgtgggtcgacgacgaggtccatgacgagcgtcgcaaggcacgacaaatgggaaggaggcgacgcacgaatttcagagcatggagctcacggcggcttgagggagacagccgtgggagggacttcggcgagctggagcgggatacggcctgggcgcgacgaagggagctgcgcgtccagagcgagcagggagagcgccgagcggaacagggagctccgggcagagggccagggcgcgaaggccagggaatccagggcgcggcgagccgaaaacttcgcgcgcggccatgggaaagcaggcgcggctggactgaacgagctgcgccagggagcagcagccggctgtgaagaacgcggctgggcgcgatgcaggaagcgcgggcctaggcgaactcctaacaggaccatggacgcggcggggaaactccacggcatccacgggagagagagagctccgcgagctgaagactgggcgcgacgcgagcagagagtcgcggcgccagaggaacagcgatggtcggccgacgaactggagcaggcgctggggaagggaccgagcagggagaagacttggcagccagcgcgcatccgcggcgagcagaaggccaagcgccggccatgggagcaggcacggctgccaggggcgattgcgcccgatgcctgggcgggctgggagacgaccagggcgcgcggcgagctagagcaaagggcagggcgttcaggcgctgcagcagggagagcgagcgtggagcatcccggcgagctacagaggccgagcagaggaagaacgagcagccgccatgggagagggaaatccgatcagaggagatcgcagaggaggggaatgaacctggccgaacgctatggtgcctgacgtttgctg

SEQ ID NO: 2245 - DNA, 2325 bp, Zea mays
tataaatgaagccagatcaaggctacgactcccatccaaccgcacaagaattgcatcatcatcgttagctgccacagatggagatcttccaagtgacgacgatgatcctgcagcatccgttactcacatacttcttctctgcactcctgctcacacagctgctgacggcgcctattgcggcggcggagacaacggtgaaagtgagcaccacccctatcttccccgagatcccacaaggccaggcgagaaaggacttccaagtgctggtgcgcgtcgaggcgccggcgcgtccagaggcgcgcatccccatcgacgtcgtcgccgtcctcgatgtcagcggcagcatgaacaacccggcggcagcgccgacggagagaacgagaacgacgtcgaggctggacctgctgaagacggccgccaagttcatggtcgcgaaactcgaggacggagaccgcctctccatcgtcgcgttcagcgatcggccagtcagagaactgagctccggcttgctgtacatgactgccgacggccggaggaacgccattaggagcttggaccagctggaggcccgcggcggcactgcgctcgtgccggccttcgaggaggcggtgaaggtcctggacgggcggcagggagacggcggggaccgcctgggcttcatcgtcctcctcacggacggcgccgaggacgcgagcgggtcgttcacgttgagcgagcgccgccgcgaggtgatccgaggcgccctccgcaagtaccccgtccacgcgttcggcctcggcacggcgcacggccccgaggtcctgctgtacctggcccaagagtcccgcggcacctactccttcgtcgacggcgacaacgtcggcgaggtggccggcgccctcgccgtgtgcctcggcgggctgaccaccgtggccgccgtggacacgcgcgtggtcctcagggccgacgagctgaacggggtgcgcgtagaccgcgtcgactccggcggccacgacagcagcgtcagctgcggcgggacctcatgcgaggtctccgtgggcgtcctgtacgccggcgaggccaagcatttcgtggtccacctccacgtgccagctattactgcgacggcctcggcgtcaacggagggcggttactactgcgacggcctcggcgtgtgtgaccactaccgccaccaccgccaccaccgccacgggcagcacctgctcgccgtcggctactcgtaccgcagccatccgagcgcccgggcgatcacggtagaagcgcacggcgtgttcgtgcagcggtcaccggcggtgttagacttagacggcgggcggcacgctcctgttattccctccccctcccccgtggtcctgcagcacatcgtccggttcgagctgctggaagtggtggcaaacagcctcgtccgcggcgagctgatcagcaacgacgacagagcgcgtgccgcggacgtgctgcaggtcaagtgggaggagttcagggcgtgccaccagttctggggcggcgggctcctcgacctgatgagcggcctggagaaggaggtggacggcatggtgggcagcctcagggcgggggtggcggcgtacgtctacgcctgggtatcgagccaccagatgcagcgggccaccagcatcggctcgccggacaaggcggccgtcgagttcctgacgccggcgatgcggctcctgttggaggaggcgcgaaagctgccgcgctggcagcaggctgcaacgacgacggcggcgcccacgaacgtccagtacgcgggctgcgtcggcggcggcggcttcgagatggtggaccggaggctggagctgtggtccaagatgaagcgcgacgtgcagctcctcgtgtcggtccaggagcaggcggcggcggacgaagaggagcagcacctcgccgccgtcttccaggaggcgtcgctggcggccatcgaccgcgcgatgcaccgcgacatttacctggccgcggtttatgcgagcaagcagacgcgatgccactcggtcgggtgccaacaagtgaaggactgagaactcgatcgacaccagtagattaagtgggcatgacgtcaataactaattgattacctacctagccgcttgtactagtcatgctctactttatattactttaaaagatacatttcgttgtgtaatcatcttatggttcatcatcgtcatgtgctccactatatactgtctcagatctatattcatcactggcagatctcaatctagctagcaccactcgtttatcactatcggttctcacatacctagcagcaccctttttatctggacttagggctagtttgggagttataaa

SEQ ID NO: 2246 - DNA, 1233 bp, Zea mays
atgcatacgtcgtcggaagtggcagctccaatgacgtggctcgttctcacgctcctgctctcatcagcggtttacttttgccttcttcctttgattttttgtccttcgattggatggcacccgccgacgatttacatttcacctacgcatacgcatgtgccgcaggccgccgccgtggagacggtgaaagtggtcaccaccccagtcttccctcagatccctcggctccaggcaagcaaagacttccaggtggtggtgcgcctcgaggcgccaccggtggcgcagcagaaggcgcgcgtccccgtcgacctcgccgtggtgctcgatgtgggtgccggtggcggtggcagcaccggctcggcgaggctggatgcggtgaagaaggccgtcaagtttatcatcgggcagatccatgacaacgaccgtctcgccgtcgtcgggccgtcgcccaaccgccggctagtcatcgggtttccgagcactcacgaggctcgacagaatgccgaaaaatccgtcgacgacctggagccccgtggcgagttcgcgtccggcgccggcttggaggaggccgtcaagatcctcggggagttaccggcgacggcgagcgggagcagccgcgcgcgcttcgtcatcctggtgaccgacacggcggtgacggagggcagcggcggcagattcggcaagctgcggcgcgagctcctccccccggtgcacacgttcggcctcggcgcggggcacgaccccagggcgctgctctccatcgccagggagtcccagggcacctactccttcgtcgacgaccagaacacggacggcatcacgggcgccatcgccatctgcctcagcgggctcaaggacgtggtcgccgtcggcacgcgcgtccgcgttgaggcgcctgtcgggagcggggcgttggtccgggcgagcaatctgacgcgttgcgacgacgctgcccgcgtcgagttgttcctgccggcatgatccggcgaccgatcgacgacgactcacggggtacgggcaactcgccgccgatcgatccatcaaggatctagctagctgtaccgtctaccgtataccgttctagtaggctagtagtatacggtggtgtgcttaactatacaagctaagtactgtacgaccaagcttagcttgtcataaataagcaatcgatcatacgcactccataactagtacatgctcgtatgcgttgccttgtgctctcatttcctttct

SEQ ID NO: 2247 - DNA, 1806 bp, Zea mays
gtcctccgcgggacaaggcacctcacgagcccttctcgtcctcagatctagcgccgcctccttcaccctgctgctggccgcctggccggcgagctcctcagcgtggtgagtcccctttcccctctgctctcctcttcctccatcatgctgattgctgaccggcgagctactcagagccaggtgctttccctctgctctcttctgcgcggtgcccagagttcctttcccctctgctttccctctaatcccatatgctctcttccgcgcggtgagcccggcgcggcgagatcttccccgtcgtcgccgcgggctgctgcttcggcacagatttaataaaaaaatataattctggatcaccgcgcgggagctccggtggcgccatgatgcgcgtggcctctcctcgcgtcgttggacgcccgccgatttcagcctctctctctctctctcctgtatagaaggagggtacatttcttttttgttacacgatcataggattccagcggcagtgcactcaagtttgagctatcatgtttgtgtgatgcaaaatcttttgtgcccggcgtgtgtcctctagctcgtttctagctcgcagcacagattaaaatatggctgttgcgcttgttcttacctgcgtgtctcgtagcaacttggaactgcattttgatgctagtatagtacgtagcaggcagcatttttcacaacgatatacatatatatacttgcatgatgagctagcatcacaggggaaaaaagaagtggaggtagtggaaggggaaaatagtggaaatcagtttatatgcatgtcttggagcttcacgatgaagagagggaaaaaatatctatcaagttattagccttttttcatgtcctgtactttctatgctagcaaggtataccaatctggctagtgttcgtcgacaatgagtttgctgatgaggaatatatatccaccctagcttggtgtacatagtttgaatgctgattttaatttggagttggagtactgattagaaaagagacacacactgctataatacagtatatctctctatatatctagcttgtgatgataatgccacaacatcttctacaagcaagatcaggaagaagacaaaaaacgttatagtgaagaggaggggttgattgctgcattcaaaagtgtcggggataccttatccaatgctactgagaaggttgccacaggggacactgatgtgccagatgatctttttatagtttgataaacctttcaggttttgagcagacccacatatctctgtatttcaattatctggtggcgcaccctcacattgctagagccttcaacaagttgtcattcgaccacaagttaatctgggctcgcaatttcgtcagtgaaaagttcctaggagtgtgagggcagttggtaggtaggcttggagggttcttttgcttgaaccacattgaacaatgaactgcgatctatgtgtaaccaggagtgtgagggcagttagtagataggcttggacggttcttttgcttgaactacatcaaacaatgaaatgtcgtctaagtatgtcagcggattttgcttgaacatgcagattttgtggaagccttaaacttgatattatgtgtaatgctaggacacattattatgtattgtgtggaattaataatatgtgtgttttgtagacttaatattagttgtaacatatcatgagatgggggcaatggctgcaaacattttttatgctctgttctcgaaccaaacagaggacaggaccaatccatccccagttataccgctaaccaaacaaaaaacaa

SEQ ID NO: 2248 - DNA, 1105 bp, Zea mays
tatagacagagcctgcggcacccgttcatcacaaatcagacggcctagaatccctcagggctaaaaccctaaactagaaatgggttcgcagtgggcagtggcagccagccagtgagctagcctcccgagccctatctatccttttctcggcacctcgcgggtctcccgtccgccccgtcccgcattcgtatcctctcctcactctcgccgccgccgcttcccctgcgccccgagccaagatgaatgttgaaaagctcaagaagatggcaggtgctgtgcgcactggggggaagggtagcatgcgcaggaagaagaaggcagtccacaagactacgaccacagatgataaaaggcttcagagcaccctgaaaagaataggagtgaacaccattcctggtattgaagaggtcaacatctttaaggatgatgttgttattcagtttgtgaatcctaaagtgcaagcttcaattggtgctaatacatgggtggtcagtggaactccacagacaaagaagctgcaagatctgcttccgtccattatcaaccagctcggccctgacaacctagacaacctgcggaggcttgcggagcaattccagaagcaggcccctggtgcttcaggtgcagaggctggcgccagcgctggtgctgctcaggacgatgacgatgacgttcctgagctcgtccctggagagacatttgaggaggctgcggaagagaaaaaggagtcgtcatgattttgccacatgcccgcccttttgaagggcttataagtaaatccttgcgtagaagggacatgttgaactctgacctaccttatttgtgcctgcttacggttatgtcatgaacgagaatttggtagtccagcgctggtccccctttttcacccatatccccgtgcttgtgtggtaaaagtcttgttaatgttaaaggccacacttaaaccaaatcaaggtaccatgtctccggtaccatgcttcacgaagatttacccctaggtaccatgcttcacgaagatgaataccagatgtcagttcacctgccatttgtttgcctggactgtaggaaatgtcatcatttcatgcgctcacgtttcatctgttat

SEQ ID NO: 2249 - DNA, 1969 bp, Zea mays
tatcttgcattgcacccaagcagtgctagtggcgacctccatctttttactctttttttttcttaaactgggatgcaatggtaggggtaggggagagagagagagagatcagacgggagacgagagacttttcaaagcttagcttgcgccttgtagtctgtactctgtagctgtgcgtgcccacactaccatttgctccctctcctcgctacctatgtcctcgttcgctgcctggccgcgccagcgccacccctcctcctctagcagtcctctctctccgctcgtgtgctggtccatcgcctgcctcctcggtttgtcctgaatccttggaccgacgcacgcacacaagctcagctcagctcaggctgctgctgctggattctttggtgttccatcaggccaaggatcccgcaaagagctccggagccaagcctgctgcagccgtcgcgtcgggtgaggcaggcttcagcttcagtctcctactcgacgaggcaagcggatcggagcgggcctccgctccgccatgatgagcttcaagggccacgaggggtttggccaggtggccgccgccggtgccgggagccaggctgcctcccatggtggagcaggcccgctgccatggtgggcggggccccagctgctgttcggcgagccggcgcccccgtcaccggaggagacgcgccgggacgcccagttccaggtcgtgccgggggttcagggcacgccggatccagcgccgcccaagacagggacacctgaggtcctcaaattctctgtctttcaagggaatttggagtcgggtggtaaaggagagaaaaccccaaagaactctaccactattgctcttcagtcaccgttcccagaatacaatggccgtttcgagattggtcttggtcaatctatgctggccccttccaattatccttgtgctgaccagtgctatggcatgcttgcggcttatggaatgagatcgatgtctggtgggagaatgctgttgccactaaatgcgacagctgatgcacccatctatgtgaatccgaagcagtacgaaggcatcctccgccgtcgccgtgctcgcgccaaggcggagagcgagaacaggctcgccaaaggcagaaagccctatctccacgagtcgcgccacctccacgcgatgcgtcgggtaagaggcaccggcgggcgcttcgtcaacacgaagaaagaagggcgtggcacgggcgttgcttcgaacgggggcagcaagacggctgcagcggcaccgtcgcgcctcgccatgccccctagcttccagagtagcgtcgccagcctgtctggctccgacgtgtcaaacatgtacagcggcggcttggagcagcaccttcgggcgccgcacttcttcaccccgctgccacccatcatggaggacggcgaccacggtggtccccccacccgcatctcctcctccttcaagtgggcagccagcgacggctgctgcgagctcctcaaggcgtgaaccgacgaggaggaggggatggctactcagacgaacggccttctcgccgatggctggtcgtctgtaggcaaatcattcttggctgttccgcattggggtgcaacctcatccacatcatctacctacccagtaggccagtaccccctgttccctgaacagtgcttgggttacaggggtcctcctgtgtgtgtgatgatgtggtgtgcctcccccacatgcatttgctgtaacataatagtgtacccaaaccactgcttcggactatcattgtctgtctcggtatggattctctgttgtcacagtgtctgaataattgaggcgtcagacttcaaagttgctccggttcttggagatgggtatgtttgaagcttgcttggaggtctgaaactttgtgcttggtcactcaagaatcaagatgctgagttattgcattctgaacctgtaatttggtgccagcattcagttgttgcagttgac

SEQ ID NO: 2250 - DNA, 2850 bp, Zea mays
cctctgtctctgcgtgaccgtgtccctgttggcctgttctccccacccccaaacgaatcctcctcccccacggaaacagagagaggacgacgattcttcttaatgatcctactagttaagagcactcaaatcctccacatgtagacgagggacggtgaagacataatagtagaacctgccccacctgcctccgtcgtcaagtcgaaggagacgagccgcgccgctcctgctactcccactctccccagcccccactgcctgtgcctctgtctgcaacagcaacccacatccacctcctcctcctctggtcctctcccctcccgcgctcccgcactcctctgtgctgttctgtgaccacccgggcattaactgcccgcattggtggtttcctggggcggggtggttggattaggtcgctttgctgctgcccgcccgaaagcagggttgcaaagcccacctccgccctttcgggcagaaagagccagagagagagagagagaggtcggggccggggagcacacacccatcacccatggcctgactgacctccggactctccctgcttccgtccacgccgcgggccgcccagctgactgctcctgccctccgccatggcgtccgtcaagctcggctccaagcctgacgccttcaagcggcaaggccaggcatggttctgcacaacaggacttcctagcgatgtcaccgttgaggttggggatatgtctttccaccttcacaagttccctttactttcaaaaagcgcctttcttgaacggtcaattgaagaaaactctgaccaagaagaatgcatcatcaaactaaatgacattcctgggggtgccaagtcatttgagctagttgcaaggttctgctatggtgtgaaaatagagctttcacctgcaaatgttgtctacctacggtgtgcctcagagcatctagaaatgactgaagaagtagctgaggaaaacctgattgcacagtcagaaatgttcctcaaccaagtggttctccgtaactggaaagattccttggcagcattggaaacatgtgatgacctactcccccatgctgaagacctccagattgtgaacagatgcatcgagtcattggcatcaaaagctactagtaatccaaacctcttcggatggccgataagggaacatggcatgatgcaaagtcctggtggcagtgtactatggaatgggatcagcacgggtgcaaggcccagaaatttcaattcagactggtggtatggtgatgcttcatcattgagttttcccatgtataagaggttaatctccaccatggagtctcgaggcatccggcctgaaataattgctggttccttaacctactatgccaagaagtatcttccaggacttaggcgtcatagtcatagcatgggcacaatgcctcttactgctactctatctgaggttgaacaaaaaaaattacttgaggagatcgacaggcttttgcctcttcacaggggtatagcatcgacaaaagttctgcttgggctccttcgcactgccatgattctgaaagccagccccacgtgcatttctaacttggagaaacgaattggcatgcaactagaccaggccactttggaggatctgctgctgccaaatttctcctacacaatggaaacactgtacaatgtggagtgtgtgcacaggattcttgatcatttcttggcaatggaccaagcaaatggtggcgagtccccatgcttggatgatgtcatggcatccccatccttgacaccgatcacaagtgttgccaagctaattgacggctatcttgcagaaattgcaccagatatcaatttgaagcctccaaagttccaagctctggcctctgctattcctgaatatgcccggccactggatgatggcctttatcgtgccattgatatatacttgaaggctcattcctggctgtcagaagctgaaagggagcagttctgccggctgttggactgccagaagctctccctggaagcatgcacccacgccgcccagaacgagaggctgccgttgcgcgtggtggtgcaagtcctcttcttcgagcaactccagctaagaacctcgatcgcagggtgcctgctggtctcggacaacctcgaaggctccaggcctctgcggagcggcattgccacatccggcgaggctggaggctgggccacggctgtccgagagaaccaggtcctgaaggtcggcatggacaacatgcggacgcggctggccgagctggagaaggagtgctcgagcatgcggcaggagatcgagaagctgggcgggcgcgctggtaagggcggcggtggcgggtgggcctcccgcgtcgtgccccggcgactgggcctgaaggtgaggtcgcagatgtgcagcgcccaggagggctccgtcagtgagcagcacaggagcatgagcgccaagctcgacaagctgcaggctaaggtgtcgaagcagaagaagcagctggccgcggatgcctgaagttgaggtttcgagactccggcttcatggcctgaccttgtaattttagcccggtatcaattgtttttgcctctcttttgttgcctgtgtagctgttaggcgaaacgaccgagtgcagtgtgtcggttcgttcttgaaccgtggatggtaccaagaagaatgggagtgtcctagctaagaacacgaacctgatgtgatcagttaatagtttgttaccggtaaggaaaatgtcgcttgcttggttacttttgtgatctgtgacatgtccgttgcctacatgttaaacttttctgtctgctaggactaaactaggagtgctgcttgactgctagtggtggaagacggcggc

SEQ ID NO: 2251 - DNA, 4632 bp, Zea mays
aaaaaaaagccgaaacaaaatcgtcacatctatcatagtgagtttgaggacattggaccgcaccctgcagaggccaagcgtcgaacacatggcgtgcaccttcctccgccgcgcgttctccctcaccgccgccggcacccacgcgaccccccgagttgccgccgccttcgcttccacttcctcctcatcctccgtcgtcgtgcctctgcgctccccactagaccaccgtcttctccgccacctccgctccgagatcacctacctcgcggagcgccgccctccccacgtgccgccgagtagcttcaagtcgttcgccgtggaggaccgcccgggggagcagtgggtgcgcctccgcgccagcgcgggagggggaggcgaggaggtgaaggtcgaggccaccatgttcgacggcgctgcggagcctgtcccggacgacgcgcccctcttccgccgcgtggagtcgctcgagcgcgggccccgcctccacctcagcctcatcgtcgaggtcgcccggggcgaccgcgtcctcggcttcgtctgctccgcctggcccgacgacctcgccgtccgccacgtgctcacgctcgcagctggcggtggcagcagtggtggtcgtcgtggtgggcgcgatttcgagaaactggggggcgaggagagggaagcggtgacgaagttcttgaaggagagggaggtggacgccgagctcgccggattcttgcacgactacatggcaaacaaggagaagatggagctgctccggtggttgaagactgtcgaatcattccttaacaagtaggataagatcgcacacagaagacaccgctgatgttactgcctagtttgggaacgggtacgctccaacaacaactggtgacgatctcctgcagtctctgtgatcatccgcatctacccctctgctgacaattgtgtgctgaagatgtttgtttttaatcagcttagatagctcagcgcacagcgctcttggaaactggtgatctgaatatcctactggtactttcatttctttgtgataagattgttctcaacggtgtatcttttaagatacaccccattgggtttttttcccttttgcaatataccaaatctcattttggatttccaaccagttgctatgtgcgtgcttagagtaaaaatctgctcttctgaactctgacggttcaatgtcgaaggaggagctgtaacggttggattaagcggggcgacggctcacatttcagaagccttcacatgatggcattgacacacctcaatccaacagtcgtgccactgccaagctccatcgcgccacgcgtgatgtacgtgattatgatctcactgactagcgggcccgcgtacagattcaaccctcccctcccctcaacggctagttccacctccgcatccgttgggacaaaagggggaaaaaccagagggaacttcaccagccaccaaagtaccacacctctcctctctcaagaaccaccgcactctctctagcaggcctctgttttgtactgtaagcaggcctctgtagagtttgcaaaatgaaatttgaaatagaaaataaatactgtatattatattgtttgtaaagtgaagtttgaaacaggagcgaaaaggtagatagtcactcagcttctcgagagatcgccaaagacgcggcgccggcagcaagttctgcggcgatggggcacaagtacacgccgacgtactactcgggcctgcaggacaccatcgcgtcgctctgcaagtccatcctgccctccttccgcgtgggccggcggctcacctccgaccaggccgcggcgcggcgccacgccgagcagctcaagtggcagcaggagtccttccaccgcatcctccaccttgccgcgctccaccgcgagggcatcgtcccggcccacgacgtcgccgccttccgcggcaccatgctcgcggcgctcgtcgcgccgccgccgcagcaccccgagcagcccgcggtgctccgggacaagctcctcttcctccaggagctactctacgccaagtgcgtctccgcggcggagtacaacgcgtccaaggcgcccctcgtgcggcggctcgccgcgttcggcggcggcgtcgtcgagtgccccgatgccgaggcctcggccgaggagtggtcggagatcgacctccgtgacccgcctcctcccgccggcgcggcgtcctccgacaaaccgaagcacaaggccttcatcacgccgtgggagagcagatccaggaaggatcaggacgcgaaccgcagcgcatcaaggccgccgctggccccggtggatcataacaacgccaacaacgcgtcggtcctcatgcccgagtattctccgtcggaagcggtgccctgcaggaaggcggagaaggggaggaggaggcatctggcggggatgttccacagtggcggcaatggcaccgagaacaaggagcctgcgggggaggaagggggggtcgacgagaaagcgacggtgaaatgtaagaagaaaagctcgtggggattcgatggcatcaagaagtggaagaaagctggcgcctgtaataacaatggcgaggcggcagccaccggtgagcagccgcagcgtactcctccgcgctcatcgtacagcgagtgccaattggaggcgagccccatggctgcatctggcccggatgccaagagggccaagacgaggctgcactccagcacggatgatgactgcttctgagctgctgcgtgataaggtagtgtgaattagtgactcctctcatcatgtataagttggttaagttacgattttcatctggaattactgaagtgaaggtcctggtggaaaacacaaagaaagaactctgttattggtcatttttttttatatattctgtttcccaaagatggatggctcttggatttgcaggaatcagcagatcgaggccatctcaacaaagcttcaggtggacaagtctgacctcaagcccttcttgccaaagtagatcactggatcatccatcattcagattaggcgcatgatttctcataaacgagatagtgacactttttatgcttttgttactggtataatggtattgttgtacttaggttcaattgttacattggaccaggagttgctgtttatggcgtcatttgtatgattggagcctacttcccattgattccttgaatgcacatcagcttttctctcccccagtgagcatttgcccgacaagaaacttcagtgtcacatgaacagctgataactcatttgacttcacaaaagataaacaggcagttctagatgcaagttcctacatatacagcaggcatgaatcgcaattgtaatttgtaaatatataagatatacatatagatatataagttatatatagacatgttacgcccaccggaaactaattgaggtaccgcctgcagtatcttgatctacaaaagcaaaggatcctctggccttcatcttcccggttgaagtggtaatcgtacgtaatttcctcccctgggtttatgtgccgttctgcaaagaacattacctggatgaacatagaaataacaaagtcaaattttagtccacagctggaacttgtgggaatcatgtagcttaacatatacactccctccggcctccttccaaattgtagctcactttggatttgtcaaacttctctaacttaatctacaaattcatataaaatctctactgaaatatactgtgtgaagaatataatgaaacaaatttgatgttctagatgttagttattaggttcttttacaaaactagtagaaattaaacaagattgacttaggacaaaaccaaggtgaattactccctccgactcaaaccaaaacaacctctagagttatcctaagtattttaagtttgaccatatgtatagaaaagaatttatttattttaggacggagggagtaccattttttagtcagaggtaggagatatttaggctaacgaggctgacacaaggcattacgactaaaatttacgatccagaatattaattttataagaaaacaaacatatatataggcaaaatgattaccttcttctcattcctgactgagattattttcgcaacgcagtttggctgattcaaccaagaatgaacgaattgaatgaatataaaaccgtacattagaataataagcacactagaatctcaaaagaagtctcatccctcttgttccaaggggtatctaaagaatgttcaaggcttcaagcacaagttattacctggcatgaatgattgacgaatcttgcaatcccacctttgcgggtggcatcaataatatgctccctgtcaatcttaaagaaataacatgcactcttatattgttgccgtttcccggactggtattcgatctctcttctgtcagcaacccgttgcccaacaatttcacccacatattctacaacctgaaacatttttatgcaaaacctgagaatggttttatttgctagaaaatgttgaaattattcccttgaattttggccaaagtccggataacttcctaaactaacatttggtctgatttactacctcaaccatttcaattggccaatttgccccttaacaagatttgtctttttgtttctccaaggaaaagttgagtttaaa

SEQ ID NO: 2252 - DNA, 1462 bp, Zea mays
gggataaccagataaaccgttgaagagagtctgagcgggtctcgccaaactgcgccccctctttcaattccttatccgcacagtcacacggtttaatcgaatggcttcgccgtcgtgtttcctcttccgcccccgtccgccgctgtgcagccgccgccgccgcagcagcagcaggtccctctacctcctctccaagcagagcctgcaccgacttccctcaccaagaacatgccgccgtccagtggcagagcagctcgtcctgcggtcgctgccgcccggtaacggcaggcggatgggggcgacgggcttcgcctgctactgttcctacgacaccgagaacggactgcccacgccttcaccggacaagggaaaaagctcggatgagtggccaatccttcgccggtgggatgttccatgggagtggccaacgatttctctcaccatggtggcatgtgcagtaagctttcttttgacagggatagctgagcaatctattttggagcaactaggttttcgagctggggagacaactctagatgagaaagcagagatactcttcttgggacaacttagcacgacggtagttgtacttggagttatatttggcatgaccaatacctttcgaccattctcagatgatatatttcgctatgaattcaatgaaccacttaagctgcaaaacggatggcttctgtggtctgcaatcggcctgtttgttgcaatagttgctattgctttagcaggtgctgcaatgacatttctgaatggtgaaacaccacagagagagacagactcgctggtccttttgttgccgctgattggctcgtcaaacatcagcactgcctgtttgctgggcatcactgggattttggcacccattctggaggaaactgtgtttcgaggatttcttatggtatccctgactatgtggtttcctactccatatgctgtgcttatgactgctgcagtgtttgcctttgctcactttacaccaggagaatttcctcagcttttcgtgcttggtgtggtcttaggattttcatatgctcaaactcgcaaccttctaactcctattgcaatacacgctgtctggaactctggagtaatattgttgctaacttttcttcagatgcaagggtatgatatcagggagattttgcaggcatcttgaagatttaacgcagttagattaatttcatcctgtgttttcttgtgtcagagtatgttattatcaaacacagtaaatacgcaatgatagaaatacattctttagaaaaccctttgccaaggtgtatttagaattgatgcataacatctaagtaaaaaacttagattttccttgaagtgctttaatatattactgtgctgtgtgaagttgaaatttagagctttagaagaaatcgtgctatgtataatcatttacttcaagacaatcaaataacagaagccagttctgtgataa

SEQ ID NO: 2253 - DNA, 2146 bp, Zea mays
tcgggcacgcagtcgcacaagtagtgaactcaaacgggatctcctgctctgcctccctcgtcttcctctgcccgtgcgcgtttcagagcacgtacggagagggcgagcagcagcttgcggccgggcaccatcatggaggacgtcgcgccgggtgcggagccgtgggaggggtacgtggactggaggaaccggccggcgaccaggtcccggcacggcggcatggccgccgcctccttcgtcctcgtggtggaggtgctggagaacctggcgttcctggcgaacgccagcaacctggtgacctacctgatggggttcatgcactactcgccgtcgcagtcggccacggcggtcaccaacttcatgggcacggccttcctgctcgcgctcctcggcggcttcctctccgacgccttcttcaccacctacaccatctacatcgccagcgccttcatcgagctcatggggctggtgatcctgacggtccaggcgcggacgcagtcgctgatgccgccgcagtgcgccaagccgggggctccgtgcgagcccgtgtcgggcgccaagaaggcgatgctgttcgcggggctgtacctcacggcgctgggcgtgggcgggatcaagggctccctcccctcccacggcgcggagcagttcgacgagcatgcggcgcgggggcgcaagggccgctccaccttcttcaactacttcgtcttctgcctctcctgcggcgccctcgtcgccgtcaccttcgccgtatgggtcgaggacaacaagggctggcagtgggggttcggcatctccaccatcgccatcctgctctccatcccgctcttcgtcgccggctccagccgctaccggaacaaggtgcccacggggagcccgctcaccaccatcgccaaggtcctcatcgccgccgcgctcgcgcgccgcggctgcgcgccgagctccagcaacggcgccgtcatcgaccgcgcgcccagccccacggggagcaccgacatgaaagagtactgcaagcccggggacatggaggagatcacggtctccggcgccgcgatcgtggcgtcgtcgcccgccgagccgtcccgcgaactcgcgttcctcaaccgcgcggtgcagtgccagccgccgcggcacggccgcctggcgtgcacggtccaggaggtggaggacgtcaagatcgtgctcatggtgctgcccatcttcttgtccaccatcatgctcaactgctgcctggcgcagctgtccaccttctcggtcgagcaagcggccaccatggacacgcgcgtgggcagcctcaccgtgccgccggcgtcgctccccgtcttccctgtcacgttcatcatcatcctcgcgcccgtctacgatcacgtcatcgtcccgttcgcgcgccgcgtcacggggaccgagatgggcatcacacacctccagcgtatcggcaccgggctggtgctgtccatcgtcgcgatggccgtggccgccgtcgtcgaggtcaagcgcaagaacgtggcgtcccacaacgggatgctggactccaccaagccgctgcccatcaccttcttctggatcgcgttccagtacctgttcctgggttccgcggacctgttcacgctggcggggctgctcgagttcttcttcagcgaggcgccgccgcggatgagatccctggcgacgtcgctgtcgtgggcgtcgctggcgctgggatattacctcagctcggtgctggtgtccatcgtcaacagcgcgacagggcgcggcgaccaccggccgtggctgcagggtgccagcctgaaccactaccacctcgagaggttctactgggtcatgtgcgtgctcagcaccatcaactacctcttcttcctgttcttggccgtcaggtacaagtacagaaacgcgggggtcatcaaaggctaatgccatcttcatatggccagtcggcgttgccattaatccccgtggtcttgagcaatgctgggtgtaactaactgtttatataggtggaaagcagagggttgaagaaaatgtaggttaattttctgcaggatgtgaggaatgatggtggtttatgaagctgtaatggatttggttgattggttcaacaagtaaatcaacaagagaatcggatgtccaaaccaaaaaaaaaaaaaaa

SEQ ID NO: 2254 - DNA, 3547 bp, Zea mays
gcctctttttcagctgcacgcacgcttctcttcttggccctgttttacctgcagtcaccaccaccactccacgaccaaactagcccacgacaccagctgctgagctgaccagcacgtacacctcccgcctccaacctataacaccaccgctgccgcgacgtggcatcagccgcccgtcgataactaaccgcgcagcggcggacgacgagagcacaggcatgagagcctacgcggcgaccccggccgccgtggccacgctgccgtcggccgcgccgccgctcacacccgacgccgctgccgtgctgtcccgcgccgcggccgacgcgtccaggcgccgccacgcgcacaccacgccgctccacgcggcggccgcgctgctgtccggccccgcgccgctgctccgtgacgcctgcgtcgcgggcctcgcgtccccgcacccgctccgctgccgcgctctcgacctctgcttctccgtcgccctcgaccgcctccccacgtccacggagctccagcaccacgaaggcggcgccttccaccacgcatccgccgcgcctccgctctccaacgcgctcgccgcggcgctcaagcgcgcctacgcgcaccaccgccgcatcgggagcggcggcgtcgagaccgacgaccaccgcgtcggggtgccgcacctcgtgctcgccatcctcgacgacccgtccgtggcgcgcgtcatgcgcgaggcgtccttctcaagcacggccgtcaaggccgccatgctcaggtccctctccgacccggcggcacccgacgccgccgcgtacgtcagcgccagggtcatgcaccggcaggcctcccaccgggaggaggaggtggccaaggtggtggaagtgctgaagagggccaagaagcgcaacccggtgctggtcggcgacacggtggacgtggacgccgtggtgcaagaggtggtcacgctgatacagaggcagcggctcggcaacgcgcgcgtcatctccttccccaaggagttcggcgacctggtcgacatggacagggcgcggctcaccgccaaggtcaaggagctcggcgaagcggtgagatccgcatcggccagcgccggcgtcgtggtcaacctcggcaacctgcagtggctcgtcgaggaaagatgcgcggctcctcggggcgagcaacaacaagagaagaggagggacgtggtgctcgacacggcgcgagccgccgtggccgagatggcgcgcgttctgaacctgtccggcgaaggggagcaccgcgtgtgggtgatcggcacggctacgtgtgcaacgtacctgaaatgccaggtgtatcacccggcgctggagagcgagtgggacctccaggccgtgcccatcacgcccaggcctccaccgccgccgccgccgccgcttgggctctcgccgagtgctggagttaacaggggcatcctgagtagctctgtggaggtgctgtcaacggcgatgacgtccccaatgcaacgggcaccgagcctttgcagcgcttgcgcagagggctacgagcgcgagcgcgccgagatggcttcatccgagcgtgctccctgtccggccgagcagccgatgtcgcagtggctgcagatcggcacgccgagcagcggacgcccggccgaccgcgcgcaggagaaggcgcgggaggctgacgagctgcgacgccggtggcgcgaccggtgcgcgcagctgcactcgcatggccggccgccgctggtcacttgctcagagtggaacggggccagcattcttgccagcatgcaggcggcgccgccggtggtaccggtacggccattggtgcagcgtagggttgccgtggacacggatctcgcgcttgggctggcggcggccaggccggcgtgtgaaacggacgacaagctgctcgtgagacggctcacggaagcggtgagatggcagcccgaggctgctgccgctgtggccagtacgatcgcgaaggccaggtccagcgaatccaggcggcgccgcactacggccggtgtcgacgcgtggatcgtctttgctgggcctgacgtggccgggaagaggagcatggccgaggcgctgtccaagtccgtgttcggcacgggggccgtcaccctgcgcctcggctggccccaagccggcgatgacggcggcgagtccgtcgtgtcgtgccgcggccagacggcgctggaccgcatggcggaggcgatacgggcgaacccgttccgcgtcgtcgtgctggacggcgtcgaccacgcggacagcgtcgtccacgcctccatcctacgcgcggtcgagtcgggccggctctcggactcgcacggccgcgacgtcgccctcggcaacaacatattcgtcgtgatttcgcaatggtcgccgccgttgccagagccggagcacctgaggaagtcgcaagaagccgaaccctttcttcctgactcgcaatggaacctggagcacgggatgaccgccggcgggaagaagcgcaggccggagcagcagctcgaaggagaccggcgcacaaaggcgcgcaaacactcggcacgggagccgcttcccctggacttgaacctgtccatgtccgatgaccataccgacgccgtagacgacagcggcggcgagggatcacggaactcgtccagtgacctgaccgtggagcacgagcaggagtacgtgcagcccgctcactccggcagatgctcggcggcgccactgaccgtgtccgaactcatcaaagctgtggacggagtggtcgtgttcaagccaccggtgagcttggagccactgaagcggagcgtctccgacttggtggtgccggcggcgaagttgggggaaatcacggtcggcgggtggcctgttcacgtcgacgacggcttgctgggcaggctagccgcccgggcagctggagcggcggcggcgggcacgcccatggaggcgtggacgaccggcgaggtgctgtgccctagcagcatgcggcagttcaaacgtagcttgagcagcaacgacgttgacggggcgacggtggaaggcagccgccggagaaaggacggcgagatgttcccgatgccggtgacggtcgacggcaactgattatgaagctgcgcacactccgacgacggcttccatctttattcgctggtcatcaagatatgatcaagcacggtgtacattagtacattcatgtaaattttccagcaatcggtttttttgttttcggtcggagaggagtaacgatcataaaactaaactagctagagacaggacaagggactaggcaggcactagtagtagctagctcctttcccccattttgcctttattacgtgctatttcacggagacgggagatcatgacgaattcttcggttgcttggcggcaatctaccatgattcacttgtgccgcctgcatgcacgcagctcaacatggaattaagcaggtgatcctaccaaggatcgaacattactacatttccaagaatgatgctggccatgcgtactaccgtgttacacacacagcatggccagtaattgacactaatcattatttaatcataaag

SEQ ID NO: 2255 - DNA, 1543 bp, Zea mays
ccaaaaaaaaagaaaaatgtactcggagtcaatagttgcccaaattgtttcgatcgcccatttcgacatcgtatcggattttttcaaaataatggggaaaatagcgaagggaaaaaaaaaccctccgtgtggccgtcccaaactcccaatgagatgaagagaacgcaccacacgaccgcgtgacagaggcacagagcaaaagccaaactggcagccagcacagcagagcgccactcgactcgactcatcctttcggttcccctcccccctccgcgttccacaaccctcgagaagcttccaccctcccctcctgcgacgccgccagagccgcggaaaccctacccaccccggccgctcacgcaccgggcgcccgccgccgccggtcgcgtacctgccgccgacaccgcccaaagcgattggatctagagatcgtcagtagccacgatggaggactgggattctgaagaattccagccagttgtgcctgttgtgaaagccgagccacttaaaaatcagtgggctgatgaagatgttgaagaagatgatgtaaaagaatcatgggaagaagaggaggaggaggagaaacctaagccagcgccagtggaaaaggtcgctgcaaaacctagcactaaggctcctgctaaaaagggaaaacagcaagcattgacaagtgctgaagaaccagatgagcctcctcttagtcccacttcacagaaaattcgccaacaaagacttgtggaagaagctgacttcaagtctaccaccgagctttttgcaaagaagggcagtgagcaaaagtcactagatacttttattccaaagtccgagagtgactttgcggaatacgcggagcttattgcaaacaaactacgcccctatgagaaaagctttcactacatggctctgcttaagaatgtcatgagactttccatgacatcgttgaaaggtgcggacgccaaagatatatcttcttccgtgacggcaattgctaacgagaagatcaaggctgagaaggaggctgcagcaggcaaaaagaaacaaggagcgaaaaagaagcaactccacatcgagaaaggagacgacgacttcatccccggccggggtggtggctacgatgaccccgatgagtacgacttcatgtgatctggctgggagggatagtaggtttctgttatgtatacctttggcgggcagagaatatatcactagagtttgcggcatactattgcatggaacatgcgttatctattcgagaatgatttttgactctgcaggataagaagagcacttgtgatctggatgcatgggtgttttcttatttatccttgaatctttgtgttatttttttttcaacattgcattttttgccaaatgtactatagtaccttgtactatctggttactccgtgagtcatgaaagcaattaaatccctggagggtgtctcgcttgtgtttgcagctgtatgaccgtgtgcattgtttttggagatcttgtgtgatccactgactactccgactggcatggttgtcttcctttttctga

SEQ ID NO: 2256 - DNA, 3711 bp, Zea mays
atcgagagagatcaaatctctttctattcaattttgactaacaagacatttaatccctttcaattcacttctaaccgaacaagccactaaggatgtgtatatatagctggagtgggggcacataagaatttcggtgctgcaagaacgaagaatataatagctggggcttcttatcttggccctatccttttcttggcactacataggagcatcttgggagcctttatcacatatgaactccattggcctaaatgacatggatttgtttggcatgcccacagggaggggtccaccatgacagtaaaacaaatgacaggggagaatcttaaatcccctcctccaccccctcctgcctcaccagatttgatacacatgcaaatcctgctggctgttgcttctcagcagggccaaaatccgttcctttggcctagcagtagctaccactaccaggagatcttcttcttccccccccccccccccccccccctcccctcctgtgagaggtgcccaacagcttcgtcagaggaatcagcacttcagcggagacacacagtccaggccatcgaactgatacttgtgtggtggcgcgggcagagatcaagatggagaaggaacacatcaagatggccatgctgaggcaagaacagacattcagacagcaggttcacgagctgcaccgcgtgtaccaggttcagaagcagctgatgatgcagatgcagattgccaagacaaacagctacggaaacgaagctgctgaaaggcaaaccaaaccgacagaaaaactcgagcaccgacagtggtgtggtagctcaggcaagacggaggccaagctggccgaagacttcagcctggagctgacactggcaactggggctggaaggaggggggaggaggagaagccatccaactcagactccgaagcaacaatgtcgtcatcgacatctgcagagtcagagccagggcaggggttcgcgcccaagtccgatgtaacaaacctaaggttccagaatgagagcagtaggcatgatgctcaggtcttgcagtctccttggcgataccaatgtttaagtctcaagatggcgtgaaggggttaggttgggttggcatggcatgggtgtaccccaaggctcaaacaaaagcaagtgcattgctgcatgcatgtatgtatgtatattacgatttcactgcaactgtaggagcgagctcaaaagaagcaaatggagcatttatggggaaacaaaaaatgaaccaaatgagaagaaaaggatgagatagattgtgtctgttattgtttgtggcaaagaacaggttcacttgcatctccataactagatacagaaaatttagttgaagtaaatgtacttcttagccataggatcaaaagaccgtaagaaagacgtcgtagaagacccacccaatgaacctagtataattcgatcatccaaacaaaatggtcttcagccaaaaacataagcaagtagaatccctgtggacactatgccctaaccaaaagtgaaggatgcatcgtaagcaatccatctctctaaagcctaaaatcgccggtcgataacatccgcgatccaggaggcatacatgaagtctgccttgtacgaagaatcgacagataacagccatgttgagtcactcgacaacacctaggtactcggggccacctccacatctgctttctttaagctggccatatatgttatgtagatggtccacagaaatgagaatgaattgctcactagcggctgaggaaaaaaaaacaaatttcaggtcacaaatgctgccaaacaagctcagttaagcaggtactccaggatgcattaggtttagttacctgtaaatgaactggaacaaacttgaaagtaatgaaatcacaagttggccagtataaaagcccgcttttgatggtgggaactagatccctcttcaatcttgcaataatctcagcaacagtctcgcctgcgtttcagatcagaaaagaccattaaatagtctgctatctgcataccaaaatagtttgcaacaaaaagtttcagatccctcttcaatcttgcagtaatctcacgaagtcttcaagaaattgaggactcgacaactagtgacaagtgaactccatattattagcttgtttacgataataaaatataagtcctacacaaataaaactttaagagaaaatgcaaatcaagcaagctgtataatcatttctattaatacatcaccaaaacagagtaattgtcagcataggaaacaacaatacagcataggtggagttaatagggcaatcaaaatagggaaacagaagcatgcccaataaataatactcacacaattcatttttgtaaggcatggttagactattcaaattcatgctttgaccaaaatctaataatatataagttatgtgcaacaaaattaataacattggattaataacattggattactattcaaattcatgcttcaatggggagaacccttcgctgagctctatcagatgcgtctttcttgatgagatggggtgttggattaaagctggagctacacatcttcagagtttaggcattgagatcacgcttaatatacacagggcctaatctgttgggagaggatgtagtgtgtgagtgggtgttttttgttgggcctgttcagggctatgtaccttggtccattttggtccatttcttctgtaattaaatgatgtgcagctctcttgcactttcgaaaaaaaaaattatgatttttaactactaataaactattgtagaagtatcatgcagtcaaataatgattttgcagagtcaagctacactataaaaatgaacagagtactgaaattcaacaaatgatttctgtgcaactcaaccagaactagaaaaaaaaagtgcagccctagtgccggaggctcccacatgagggtctagaaaagggataaatggaggtaagccttccccccacaaatgcggagatgctgctcgaaaccgcaaccggatgactcagtgaggtagctcttaccactgcaccatgcctaccagtgttcttaaggcgcctaggcgagcaagcaaacactccgagcacctaggcagcgcctaggcgggcaaggcggcaaggcgacaccgccgacacctaggcaacgccttaaaaaccctgatgcctacccttctagaactagaaggcaaaaaaatatttaaatgtatctaaattctcaaacatgtctatatggaggcatgtaggcaacagtaccttgtaatcctgcattgtatgagaagaaaactgagttaataattggtccatagactgcttgccctataaacatcttcttcaatgtgttcactacatcttttttggggaacaattttgagataaaattgaaccaaagatggaggctaggtcctgagatcagaaacccataactagccatacgcatggtcctaagaaaatcaagtgaatcctcaggaccaagtgtgagcatctgacaacgcaatagcaaaagcaaatgaaattgtgttagaagcaatatctaattgtaacagccagtataatagcagtgaaaactggaaaggcccatccaggggacgccaagaatcaaatggtcaagataaatatgatgggcaaacaaacacaagatccctgactgaaaagtgctaaaatagccgatagctcattcccttaaagagtttggagaaaatgaaaatggttgga

SEQ ID NO: 2257 - DNA, 1979 bp, Zea mays
aagccgtccatatgattccgtttcgtcgaaacccagtagtgtattgttccgtaatgtcaataatctcccccacaccgcgactctgtctaaacgccggatcctgatccgccattaccgccctcagctcgagagctcgactcttatcacagaggcgcgagttccccgctctgttataaacccgcgccgcgccttcccgtcctatcccctctctcaggctccgtcgcgggatccgaggggcgcgcgcttgcgtcaggtccaggtccgccagaggcgatgctcacgtgcatcgcgtgctccaagcagctcccgggcgacgcgccgccgctgcgcgagccgtcggacgacgatgaccgcgccaacgccggaggcgggggcgaatcggcggcaacgcccggcacgaggcaggccatcagggtgctcaccgcccagatcaaggacatggcgctgaaggcatcgggcgcgtaccggcactgcaagccctgcgccggttcgtcctccccggcggcgtcgcggcggcagcaaccgtactaccacggcgcgtacgcggagtccgggtccgaccgcttccactgcgcgtaccagcgcgccggcagctccgcagcatccacgccggggctgcgcacggggggcgcgatgtccagcggtgacatcacgccatcggtcagcgcgcgcaccgacttcctcgccgacgacgaggaaggggacgatgaagagggaacggcgactggcagcagcgaggaggatgaggagaaggagtgggtcgcccaggtggagcccggggtgctcatcaccttcctctcgctgccgcggggcggcaatggtctgaagcgcatccgattcagccgtgaaatgttcaacaaatggcaagcacaaagatggtggactgaaaattacgagaaggtcatggagctttacaacgttcagaagtctaacagtcaagttgatcctctgccaagcattccaaggtctgacagtgagatctccaaagacgataccccagctacagcaccgcttaacaaggggcaattgctacgtacttcacccagaccactaaaaggcagtgaagccataggctattcatcttcggattgtcctcagcaccaatccagtcattttcgcaacgtttaccgcaaagaccgctaccttgggcaccagttctgtgatccagttgaactggcatcgacgcctgagttatcaagcatcagtggtgcgaagacagagacgtctattggtgcatcagtgaggacaagctcatctcctgaagaggtcgatggatcgggcgaactttcagcctctgtcagcaacgcaagtgacgaagagagggaatgggtagaagaggacgagcctggcgtgtatattactattcgagctttgcctggtagcatcagagaactacgccgcgtcagattcagccgggagagattcagtgagatgcatgccaggttatggtgggaagaaaaccaagcgagaatatatgagcagtatctctgagagaagacgtgttagctacattttaccatttgatgcttctacaattatagaaacatctctacatcaggcactaacatcgtgtcatcaggtttgctccttgcaggcgcaacaatgaccctgggcagttaggctgttcgcattgcatgtgtgattgcttcgaggcttttcctttccttttctttttgtgtttaacatttgctctgtttgtgtgatattcacattttttccctttttttgctgcgttgtcgttagtcagtctggatagacggtttatttcagaaaaaaaatgagaaactgtacattttatcaaccataagttgttgtttcggaaaacaaagctggactaatgtcttcatgatacgcatgaaatttttaaagttctccgcacggaaagtgattttcgtgcatcaggaacagaagctttgagagcggctgcatacttgtattagtctcaatttgtattagaaattacatggtactctctttgt

SEQ ID NO: 2258 - DNA, 913 bp, Zea mays
acgacgaacgccatggcgggttgaagaacggatttaataacggtgttgtaccatggcgaatagaaaatcgacgaccgacccagatgcgattgatgagttgagcgacttcaacgatttaacggcggccgcgacagcgagcagggtcccaaactcaacgccgacgtcgaggagtgctaacactacggtcgggcgagctgggaacactggcaagcagaggagcgcgcgcatcaaggctaaacacaggagaacacacgaaagggagctcgacatgggcagtggctcacgtccacgacgagcaggctgggcgcgccgatggcgtagctgcagggagaaacacccggcgagccaacaggaaactcaggcaaaatcgcggccggcgaacgccgtgaagatggctaggccgagcgcagtgtcgggggcgagcaggacgccgagcagagggtcacggcgaacagagaagcctgcacgcagccatggaggacggaacttggcgggacgcggccatgaacggagcttggtgtggagccgagaccaggggcacacgatggcaaactggaacaggcgagcagaggggcgctggcaaatgacagggctgcgacagcagagaaacaggcgaccaaggacgcggcccgagctccatgtcgacacaccatggaggcacggtccgagcaggaagctccgcggcgagcagaggacaccggcgtccatggcattgacagggcgagctgaagggagggagacggccgtgggagagacgcaaaggaaactcggcaccaggaaaatgggcgtcgcgagctcacggctggggagggacggtgtgctcaactgctggaaggggaagggctgggtgggcgcgcgtgccatgcgcaggagactgagcgctgttgtgggctcgagcgtggggaggagataa

SEQ ID NO: 2259 - DNA, 861 bp, Zea mays
atggcgaatagaaaatcgacgaccgacccagatgcgattgatgagttgagcgacttcaacgatttaacggcggccgcgacagcgagcagggtcccaaactcaacgccgacgtcgaggagtgctaacactacggtcgggcgagctgggaacactggcaagcagaggagcgcgcgcatcaaggctaaacacaggagaacacacgaaagggagctcgacatgggcagtggctcacgtccacgacgagcaggctgggcgcgccgatggcgtagctgcagggagaaacacccggcgagccaacaggaaactcaggcaaaatcgcggccggcgaacgccgtgaagatggctaggccgagcgcagtgtcgggggcgagcaggacgccgagcagagggtcacggcgaacagagaagcctgcacgcagccatggaggacggaacttggcgggacgcggccatgaacggagcttggtgtggagccgagaccaggggcacacgatggcaaactggaacaggcgagcagaggggcgctggcaaatgacagggctgcgacagcagagaaacaggcgaccaaggacgcggcccgagcaccatgtcgacacaccatggaggcacggtccgagcaggaagctccgcggcgagcagaggacaccggcgtccatggcagggacagggcgagctgaagggagggagacggccgtgggagagacgcagaggaaactcggcaccaggaaaatgggcttcgcgagctcacggctggggagggacggtgtgctcaactgctggaaggggaagggctgggtgggcgcgcgtgccatgcgcaggagactgagcgctgttgtgggctcgagcgtggggaggagataa

SEQ ID NO: 2260 - DNA, 405 bp, Zea mays
atggggcccagggagcgccatgcgcactggggagaagggcacctgctcttgctgctgggttccgaggggaggagggaaccggccatgaaggtgctcggtcagggagggagcatggagagggagccggcttccagggcgcaacttgcacagaggtggccgagcgccaaggatgagctcggtgctcaacctgctacccccgacaaggtccaaaaagacagggcgttggaggtggagaacgcgatgagggagatcacgagccccttggggcctggaggggaggtgctgggaggggttgagcccatgaaggagcaggacgccatgggagtggctactggggagatggcaccctgcctattgctgtgtgggagacagaggatggcgtggggagaagagtggctggcgaat

SEQ ID NO: 2261 - DNA, 1833 bp, Zea mays
atgcctccgtgtagtgatctttcgatttttcagacaaacggcaaagccgttggtccacccaaggcatatcacctcagtatggaagaacggaagtctgctttactgtacatgttcacgaatatgcctgaggtggagaaatactttgtgttgccgccaaaatcaaagaagtcagtgaaggggttgttcaagggcctgggcctttttcagggcagttcttcgagcagcagcagacgtcgagagctgttgagcgcggtacatggagatgagaatgagcagcacactgaggagcagcacattgaggaggagcagcacaatgaggctgagcagcacaatgaggaggtggagcacaatgaggaggtggagcacgtgacatgggaccaggccgcacagcatcaccagccatgggaccagtgggaccaccagagagagcagcaacaggcgtgggaccagtggggccaacagggtgaaccagctgacaacccgatggatgatggctcgggaggctcttcagcgacacgcacacgtcgctcaagaaaaagccactcagtaaagcctcgtcacgcgatagagcgagaggctgataggactttaatcatgccacatggagatcggaattgggaggacctgtcctttgacggcaagggacaccacactcaggttaaccttacgttgggttctctttgccgccttcactaccctggtatagtgaaggtgtcaaacggtgataccgaggatgaggtgctcgtcagtacctgggatgagtacaagtttaaaaaggaacgaaaccacaccgacagacagggacttgtgcgtaatgacttttggcttcgatatcggttgcctgacggagaggattacatggggcacgctgaacgtgtcttgcaaaacaatgcaaagaagctggtgaaggatgtcatatactatgcgagaattcaggctacaaacctgtattttcaaaagcatccggaagaagcaggccccttgaataaaaaggaagggtcctcaaagatatatttgactgaggatcaatatcgtgaggtgatggttccatggatggcgcccgtgcctgatgcgtactatgcttggtgtcgatattgggcttccgaaggcttccagaaagcgtcagcgcatcacagacaatgtcgaggaaccaatcttaaccacaagtttggcggtgatgacatgatacgaaaagctaaaagaatggaagctacgagtggccaaaagcctagtgacattgaggtctaccaggagggccacaaaggaccagacccgaacaaccctgaccagctctgtagccagacagccatggatcgcttggtgagttttggctcaaaagttcaaacattcaaagtatataaattcctgcatttatacgcactcttcgacggattcattgactcgtcgtcggtgagatctcagaggacgagttcatcttcccgtagctcatgctctcgtcgaccgaacgagcaggagttggagattatgaggatgcgtgaagagatgagacaacaacgcgaatttatggaggcttgcaatgcacataaccaagcgatgtatcaattaatgcagcaacagggcatggcaacaaattttccaccgccaccacaatggagccaatttgcaaacacaccagttccaccaccacagttcaccacccctccgacacatatacctgcacctggagatagggttacgcctgaagcgggtggtagtgggtctgatccagcagtagggactggatttgttgactcgctcttcgcgttccctcctcctggtggtggtggcggcagcggtcaaagctctaaccacccaagtggtggttatctctaa

SEQ ID NO: 2262 - DNA, 2882 bp, Zea mays
cttttttggcgtccgatggtccaagacatgcgggattgcaggagcttcaccggcccgcgagacgcgagtctatatatactgctggtacgcaacccgatcgaacaacctgtctacttgtatcgagaacaacgagcacccgcttctcatctctcaccactcaccagcaacagcaagcagcaagaacaagtaacgtttcaaccagccgatcgaccatgagcacttgtgttgagcagccaacgcactcggccagcctcgatccgaccgctgcccagcgtttgccgtacccagatctgccggtcgacatcctgcgccgctcatccgtgcgcggcagtggcttcgtcgcggcggcccttgtctcgtcggcccggaaggctgacgacgacgctcgacacgacgacgacgacccatcaggtgatcgacacgagacgtatgggtcgcactaccttgccaatctcggcgtggagcagtcggtgagagacgagggcaccgtggacgcgtgggtcgagagcagccagtcgctcatccgtctgacgggaaagcacagcttgaacggcgagctgccgcggctcatgcggcacggcttcatcacgccggtcccccgccactacgtgcgcaaccacgggcccgtcccgcgcggcgactgggcgacgtggaccgtcgaggtgactggcctggtccggcgaccgcgcgccctcaccatggacgagctcgcccgcgacttcccggccctggagctccccgtgacgctggtctgcgccggcaaccggcgcaaggagcagaacatggtgcgccagacgctgggcttcaactggggccccggcgctgtgtccacgtccgtgtggcgcggcgcccgcctcagcgacgtgctgcgtcggtgcggcagcatgtcgcgcaagggcggcgcgctcttcgtgtgcttcgagggcgccgaggacctccccggcggcggcggcaccaagtacggcaccagcatcacgcgcgaggtggccttggaccccaccatggacgtcatgctcgcgtaccagcagaacggcgggccgctgctgcccgaccatggcttccccgtgcgcctcatcgtccccggatgcacggccggccgcatggtcaaatggctcaagcgcatcgtcgtcgccccggctgagtccgacaactactaccattaccgggacaaccgcttcctgccgtcccacgtcgacgccaagctcgccgacgccgaaggctggtggtacaagccggagtatgtcatcaacgagatgaacacgaactcggtgatcacaacgccggcgcacaatgagttcctgcccatcaacgccatcacgacacagcgcatctacaccatgaagggattcgcatactcgggtggtggcaagaaagtgacgcgagttgaggtgactctggacggcggcgagaactggctcctctgcgagcttgaccacccggagaagcccaccaagtacggcaggtactggtgctggtgcttctggtccatcgacgtcgagctcatcgacctcctcgcctgcaaggagatcgccgtccgcgcatgggaccaatcgctcaacacgcagccggagttcctcacctggaacctcatgggaatgatgaccaactgctggttcagggtgaaggtcaacgtgtgccggccgcggcatggggagaaagcagggcttgcgttcgagcacccggtgcggacgaaccagccgggcggatggatggcgcagcagaagcacctcgagaccgcagagcgcacgtccgcggcgacctccaccaccaatcagcagttcaccatgtccgaggtgcgcaagcacgcgtcccaggactcggcgtggatcgtcgtccacggccacgtctacgactgcacggcgtttctcaaggaccacccgggcggcgccgacagcatcctcatcaacgccggcaccgactgcaccgaggagttcgacgccatccactccgacaaggccaaggagctcctcgacacctaccgcatcggcgatctcgtcaccaccggtggcgccgagcagcgctcccccctcgagctcgctcccagtcctcccatccgccacgaggggccagcggcgcccgtcatcgcgctctccaacccgcgcgagaaggtcccgtgccagctcgtcgccaggacggtgctgtctcgcgacgtccgcctgttccgcttcgcgctgccgtcgtccggccaggtgctcggcctccccgtcggcaagcacatcttcgtgtgcgccagcatcgacggcaagctgtgcatgcgcgcgtacacgccgacgagctcggtggacgaggtcggccacttcgacctcctggtgaaggtgtacttcaggaacgagaacaccaagttccccgacggcgggcggatgacccagtacctcgactcgctcccggtcggcgcccacgtcgacgtgaaggggccgctcggccacgtcgagtacgtcggccgcggaggcttcgtgatcgacggcaagccgcgcaaggcgggccgcctcgccatggtcgccggcgggagcgggatcacgccgatataccaggtgatccaggcggtgctgcgcgaccagccggaggacaagacggagatgcacctcgtgtacgccaaccggacggaggacgacatcctcctccgcgccgagctggaccgctgggcagccgagtatcctgagaggctcaaggtttggtacgtcgtgagccaggtgaaacgccttgacgagtggaagtacagcgtcgggatcgtaacggaggccgttctgcgggacgacgtgccggaggcgcgcgacggcacgctggctctgctctgcgggccaccgtcaatgatccagtcgcccatcttgccgaacctagagaagatgaaacaccagctcgacgattctgtcgtctccttctaa

SEQ ID NO: 2263 - DNA, 1350 bp, Zea mays
attgcctatcaaccgctactcacgccgtactgtctgatcggcaacacctcgtgtacacgtaggcccggagatatggcggcatcgccggtggccatcggcacggcggtgttccagcgggggccactccgcgtggaggcgaggcacgtcgactacagccaggtccccagcgtgcccaagccgctcatggtggtcgcccccaccgacgccggcgtctaccccgtggccgtcttcctgcacggctgcaacacggtcaacagctggtatgagagcctcctgtcgcacgtcgcgtcccacgggttcatcgccgtggcgccccagctctactgcgtgacgctcaacatgaacgacttgaaggacatcgacgccaccaggcaggtcaccgcctggctcgccgacaagcagcaaggcctggcgcacgtgctcgccaacatcctccagctccacggcgtgaggccggacctctccaggctggcgctggccggccacagccgcggcggcgacacggccttcgccgtggcactcgggctcggacccgccgcctcggacgacgacgacaacaacgcagacgcaggcacatcgccggcggcgttgccactcaagttctccgcgctgatcggcgtggaccccgtggcggggctatccaagcaggcgcaggtggagccgaaggtgctgaccttccggccccggtccctcgacccggggatgccggcgctggtcgtcggcacggggctcggccccaagcacgtgggcgggccgccgtgcgcccccgcgggcgtcaaccacgccgagttctacgacgagtgcgcgccgccgcggtaccacgtcgtgctgagggactacgggcacatggacatgctggacgacgacggcgtgccctacgtcatcaacaactgcatgtgcatgaggaacaccaaggacaccaaggacctcgccaggagggccatcgggggagccgtggtggcgttcctcagggccacgctggaggacgacgacgaggatctcaaggtcgtgctcgagaaccgccctggcctctcgccggcggtgctggacccagttgggcatgacttggcttgaatagcaaggctggcggagtgtgctacattgtcgctccttatttacacacacataccacatgtttcttttccattttgtcctcgatcgtgtcatgtcccacttgccacaactgtccagtccgctggtgtccaatgaatagcaaggatgtgacactattcgcgcgcttccaaaatcaaatccgtacaggtcgacgtagattgctctggtacatacatagttgttagaaaactactaaattaattaatagctggtttagttggattgaggtagctaaca

SEQ ID NO: 2264 - DNA, 3668 bp, Zea mays
cctatatacaaaaagatcaccactactgtactacggcaccccttcctcccccgctcccccacctccgctcccgaaaccctcgccgccgccgccgccgccgccgacgccgaaatcctcgtcgcggcggcgatcactgctcccctctatgatagcggcgcgtgagggcggcggagcgcggcctgtcgctccccggtccgcgtgcccggggcggctctgagagcccagagctcgtctcggttccctgccaagcgcagccgagcaccgcgccggcgccgcgtggcagttcaggccgtagtctgggcgctgttctgctctgggtctactggagtgcgtttgggattttttcggttcctactacattcgggggcgctgaacgacattgcttcacacaataaggcttctgactgggtgcagtttggtttccatgtgaacccccacatgtcccacgccagaaaataaggcgtctctctttcatggggcagccagggatggattctgttccagggaaggagaacaacggcattgcccctaacctcaatggggtcgtgtctccagcgaagcagcagctggaggggaaggaagcgatgcggtatgcaaacatcctccggtcgcgcaataagtttgctgacgcgatcaacctgtacaccattgttctcgagaaggatggcaccaatgtggaggcccttatcgggaaagggatttgcctccaggcgcagaacctaccaagacaggccattgagtgctttacagaagctgtcaaaatcgagccaggaaatgcgtctgctcttacacattgtgggatgatttacaaagatgagggtcacttggttgaagcagctgaggcatatcaaaaagctaggatggctgatccttcctacaaacctgcttcggaatttcttgctattgtgttgactgatcttggaactagcttgaagcttgcgggtaatacagaggaggggattcaaaaatattgtgaagctctggaagtagacaaccactatgcgccggcttactacaaccttggagttgtttattcggagatgatgcaatttgatatggctcttagttgttacgagaaagctgcactggagagaccattgtatgctgaggcctattgcaacatgggagttatctataagaatcggggagatctagatgcagcaattatctgctacgagaggtgcttgaccatttctcccaactttgagattgctaagaataatatggcaatagcactaactgacttgggaacaaaggtaaaaattgaaggtgacatcaatagaggtgtagcatattacaagaaagctctatactacaattggcactatgctgatgccatgtataatcttggcgttgcatatggtgaaatgttgaattttgagatggcaattgtcttttacgagcttgcgctgcacttcaatcctcgctgtgcggaagcatgcaacaatttaggagtcatatacaaagacagggataaccttgacaaagctgttgaatgttatcaaatggcactgtcaattaagccacttttcgctcagtcgctaaataaccttggagttgtctatactgttcaaggtaagatggattctgctgctagcatgattgagaaggctatacatgcaaatcccacatatgctgaagcatataataatctaggtgttctttacagagacgctggtagtattactttagcaattcatgcttacgagagatgccttcagatcgatcctgattcacgaaatgctggccagaaccgtttgcttgcaatgaactatattgacgagggctcagatgacaagctttatgaagctcacagggagtggggaaaacgctttatgaaattgtatccacaatatacaagttgggataactcaaaagttgctgaccgcccattgatcatcggttatttgtctcctgattactttactcattccgtgtcctacttcattgaagctccccttacacaccatgattccacagtttgcaaggtggttgtctactccggtgttgtgaaggcagatgccaagacacttagattcaaggataaggtgttgaaaaagggtgggttgtggagagatatatatggtattgatgaaaagagggttgctagcttggtaagggaggataaagtggacatacttgtggaacttactggtcacacagcaaataataagttagggacaatggcatgccgacctgctcctattcaggttacctggattggctaccccaacacaacaggtttgccaacaatagactaccgaatctcagactcattgactgatccacctatgacaaagcaaaagcatgttgaggagttggtgcgccttcctgaaagctttctttgttatactccttccccagaagctggtcctgtttgtccaacaccagcaatttcaaatggtttcgtcacttttgggagctttaacaatctagcaaagattacaccgaaagtgttgcaagtttgggccagaatattatgttcagtccctaactccaggcttgtggttaagtgcaagccattctgctgtgagaacataaggcagaaatttttggccacactggaggagttgggtttggagtcattacgggttgatctgttgccactcatccatctgaatcatgatcacatgcaggcgtattctttgatggacatcagcctggatacatttccctatgctggtactacgactacatgtgaatctttatacatgggggttccatgtgttacaatggctggtgctgttcatgctcataacgttggtgtcagcttgctcagcaaagtcgggttggggaggctggttgccaaaactgaggatgagtatggagcaattagcagcgagatcatatcgaatgcgatgatgcgagataagtctgaaacccaagggaccctcaagcgcttcctaaggagagctaaaaatgagtttgagctcaaggtgaagaagataaggagcgacaacgggtccgagttcaagaaccttcaagtggaggagttccttgaggaggaagggatcaagcacgagttctccgctccctacacaccacaacaaaatggtgtggtagagaggaagaacaggacgctcatcgatatggcgaggacgatgcttggagagttcaagacccccgagtgcttttggtcgaaagccgtgaacacggcttgccacgccatcaacacggtctaccttcatcgtctcgtcaagaagacgtcatatgagctactaaccgatccggactgggtgttggccatgcaagaggagctcaacaacttcaagaggaatgaagtttggacgctggtgcctcgttctaagcaaaatgttgtgggaaccaagttgttccaaatggatgtgaagagcgctttcctcaacgggccaatcaaggaggaggtgtacgtggagcaaccccctggcttcgaggatgaacggtaccccgaccacgtgtgttttagcagggtgatgacgcagaaattcgagatgtcgatgatgggcgagttgaactacttccttgggttccaagtgaagcaactcaaggacggcaccttcatctcccaaacgaagtacacgcaaagactccgatggggaccgacggacacaccgacctcaacaaagaaggaagagtacatcggggacgtgccaattcttaggaaggtccctggtgtcatggaattctaa

SEQ ID NO: 2265 - DNA, 1724 bp, Zea mays
cccaaactttcaggactactggcaccaaccactcgcattcgtcactcgtccctctcccctctctcccccaaggccccaacccacttgagcgagccctagagaaggcaaaagccatggcgtccttggttgttcgtgccgccggcgccgccgccgccgccgcccgtcttccctccctccgtcctcgccgcaacggcagcggggtgctctccggcttgagggtcggaacagggcactacggcgcgcggctcgcgcttgcttcgtccacagcttctcacaaagagttcaagatcgcctgccttactgtcgatgacagcagtttgggcccgggggatgaatatgagtctgacccccgcatgccaggcgaggatgagttcgaccatttctaccgtgttctcgccaagaagactgacaacctgctcagctgctacattccaatgccgcttgcactttctgaagaggagaaggccgtgcagaaggagttcaagctgatcgcgagcggatgcatcgacctcctggttggtgcgatgcgccgcacccccgcagagaaaaggcgcccactgttcttggtgtttggtgagctgtacccggtatttgagtttgtgaggtggactgccgaggcggggtgtgccaagtggtggatggcgctgcagatcatcgagaagctggagatcgtgcgcaagatggtgtcgagcgctttcggcggcgcccctgttgacagaagcatggtgttcgccaggaaggtggacctcaccggtgtcgacggcgaggcgctcgccggccacggcctcgggagcaacttatcagtggtgatcttcgtgctgatggacagcgtcttcagcaacgtcaagtcggacatcgatgccatggtgtctgacccttgccgcatggcagacgaggatgtgcaggagttcgaccattactaccgtcatctggccaagagggctgccaagctgcatgccatctacccgcctgaactaccaaagccgctttcagaatctgaagatgagaaggccgtgcaggagaggttcaaggagatggcgaacgagagcatcgacctcgcggctggtgcgatgcgccgcatccccgcggagaaatggcgcccactgatctcggtgtttgcttatgtgttccttgtatttgtgcgggtgaggtggtatgccgagagagggtgtgccaagtggtggatggcgccgcagatcatcgaggggctccaaaccgtgcgcaggatggtgtcgagcgcatgcggcggcacccctcttgacattgacaaggtgttcgacaggatggtggccctctccggtgtcagcgttcaggcggcgcccggcggccacggcgtcgtcgggagcaacgacttatcagaggtgatcttcgccctgatcgacaacgtcttcggcaacgtcaagtcggacatctatgacatggtctctgcttccactccttgttagccatcgtcaccaagctacgtacgtgtctacatacaggatcgagatttgcagtcactagcctcaagtgattggatcatgcatgtgattagctctagtcttgatgtgatcatgcatgtgatacctggtgcccaaagtactacgtttctgttctacacttctacccagtagcaacttcactgtgttggatcagtcacattatatgatttctgaaattagccagcagtatactccattgtgttggatcagtcatatcataagatttctgatattagcctttca

SEQ ID NO: 2266 - DNA, 2457 bp, Zea mays
atgaagaacgtagaccgacctccttccaatccaaaacggatcataatccagtctactcaggagtgcttcagcgttgacataccccgtgctccggcggggactgttagacccgaaacaaggcatgctgctaatgaggatgatgactttatgccattatccaagaagcgtaacttggacgacaaccctgggaaagttttgaagaagaggcttaacgtcagatgcaacccccaagatgtgttagtaagcatacagatattaaatgacagacagcaacaagcaattgcacgtaggggattttctagtattcttgatatgagactggacgcacttggcagcagatcacacttagcttggctgatggaaaagctcgaccacaatgacatgacaattcgagctggccctggaaaggagctgaaaattacaaaggatacggtgcacctaattttggggttaccgaatgctgggggaggaactgcattgggcatcgatgaagctgttgctgccaacaatttaagagctgaacttgatctatcgaaagaagaatttggggttacagctcttcaagatcgtcgtttgaggaaaggttctgacgatgatttaagcatcagatgctttttcttgatattgttcaatagattgttgttccctactgtcagctggggaataacaaaccatgaggttcttttaaccgaggagatggatcgtttccaccagatggactggtgccagcttattttcaatgatttatgccaagctgccaagaagtggcataataggagcgttacgaacgtttctacaaccacctatggatgttccatcgttattcttctgtattatttggatcatttgcatgactcagcggcaccccagaacaaacgtggaacaccacgaatcaaatactttgataggaatattattcaagccctgacaagagctgacaagggcaagatacgcaaaggagaagaagcatttggacattgctcgcataagaccaggaccaacacttttgatgttcctcgtcctgacccatctggacaacactcaattcacatcgaactcccgctcatcagggatttgatatcaagcaagctgaatcagcttccatcccgccaccgcctgggtttcatagagaagttgtcacattttgatgcggaggttggtaaggcgtgttcagttattaaacagactcttcagcagattgttgagaaacaatacaatctatctgatgtttttggcgagttaattgatgaggtcctccgtgccgaggcgggtgacaacgaagatgcttatgatgtgcagaaaaccacatcaaaatcagatgatattcgtccccagacagctgaaggatgtacgtgtccggccaccctaactgtacccgatatgtctactccagtttctcagcaggatactcagtttacagacacacagggtaaacatggtgacggtggcaagaacatgccgaccaatacaaacgtcactcctaaagcaacaccacacatggatcctgacgcgccgatatttgatgcgactccgcaaatcaaggtttatgttgaaaccgatcaagctacaaacactccacaggttggccaggcttctcttgattcggagatgcaaactgtgttagctctacgcgaatatttgtgtggtctgcaatctgacaccggcaggaccataatagattatggtgaatattcagcgacatgttctgacatatataaatcttttgccgatgggaagtgtctcgacaatgtattcatgcagtgtttcacccaatgtgtaattgatgatgcaaaaaatcagcagacttccatgagttcgaacagtttgattcttgatgttaatattgggtcactactcaactttgaggaacacgaacgacacagtcgcaaccctcaaccttttgatgaatctgtactccacacacttctagacaattcattgcctgagatagatgaattggaccaatgcaaagcgatcatggtccccatggtaagcagggggcattggacattatatgttgtcaacaaggtcaagaagtgcattcatattttagattccaacccatatggaccaacacttggtggaactacatggaaggactatcattttgcacatttgggctcaggtggtagaaagttaccatgggctaaggttattatgagcagattaaacaaagcaatacaacatgtacgacccagtacatgctttcccaagtttggtaacttcacaattgacttgtgcccaaattgtcctaacatggcagctggatccaatgactgtgggttttatgtcatgggttacattctattttatcaatgcgacgaaggatttttgcggtcagacatagaagcaggcaacaccagtgagatacggtctcttgcgctgcattatatcacattccacccgaagaacaaagcattatcgctgctccaagacatccaaagattcaaggtctaa

SEQ ID NO: 2267 - DNA, 1667 bp, Zea mays
caacattccgccccgaattcggcatcccgtttccagcaacctaaaagaaaaggaaacagaaaaaaaaaatcacaggagaaaccgatttcccccttttttctttattttcttcgtcctcttcgtctcgactcgccgcccagtcacctcaaatcccttcgatccaatctccaaaccctaggcaatccaacatcaaagtattagctgcccccttcgtcaaaccgcggcggcgcggccatggcccacggcggcggcgccgggaaggcgaaggtgacgccgaacctggcggtggacggcgagggcacgcgcacgctcaaccgcactgtgctgcagcgcctcgacccggccgttgaggatattctcatcaccgcggctcacgtcacgctgtacgactttgacaccgatgtcaaccagtggagacggaaggacgtggaggggtcgctcttcgtcgtcaagaggaatgctcaacctagattccagttcattgtcatgaaccgcaggaatacagataatctagttgaagatctcttgggagattttgaataccaactccaagctccttatattatgtaccgaaatgctgctcaagaagttataggaatttggttttacaactctcaggagtgtcaagaagttgcaaatctttttagcaggattctgaatgctttctcgaaggtgccaccaaagccgaagattccccctgttcaaagtgaatttgaagaggtggaagcagcacctgtgttggttgatggccctctagaaccgcaaacgtcaaatatcatgtcaactactactcacattcaagaggatcctttatctgcatttttcagtgcagctgcaaatgctggtggcaactctgctgtagctgttgcaaggcaaccaattcaactttttggtgctactccggtggctacacatgcagctactagtatcactacaatacaatcgccaggcttgcattatttgcttccttcacaagcctcatcggtttctgggatgcctgctgatgctcatggttctataggaaggtccacaaaccttgtaaatccatcacttttctcaccattgacgtcttcacagacaacaatggtgtgcactaattctgtagtagcaattgctccacctcaacatcctcagactgctcagcagccgcaaagtgctcccttgcttcagccttttctattacctacggcttcaccatctccaccatatgggactccattacttcaaccatttccgccacctaatccatcgccatctcttgcgtctgcaccagtcttgagcccagcactgtctagagacaaagtccgagatgcattactgagacttgtggagaacgatgaattcatagatttagtctacggcgagatcatgaacagacagtaatggattttcaaggtacagtcctctccatcaggctagcttgtgcttggactctgtcattatctgttgtctaggctatttcaagttatcctgtaaattcattgatgaaatccttcggtttgtggagcttgtgctattaatgtacttttgacatttacaaaatctgtgctgtgttcgtggtgcagaaaagttttgttctgagtattatcttgaaacttttgttcaaccaaccttttgagaagattccctattcagcttcggaatatcatatgcttttttgtttagca

SEQ ID NO: 2268 - DNA, 3587 bp, Zea mays
ctgcatcgtacggcccgggccgtctgcggcctgccgtttacagcttacaccatgcgcccgcttccggcgtccgtggcgtcccgactggcggccgtgcttgcggatccggtcggcgtcccgctgcccgtcttcaactccctcctctctgcgcttgccgcctccgtggacccttcccacgggcacctcccgctctacctcttccgccgccgcctactcccgttccgccgccccgatgccttcactctctccgtcctcacctcggccctcccctccgctgccgtcaccctccacgccctcgcgctccgcctgggcctcctccacgcggaccccgtcctcgccaactctctgctccgtctgtacatatgcccaccggtcccctgtcagggcctcgcgcgccgcctgttcgaggaaatgcccgcgcgcaccgcgtcctcctacaacacccttatctcgcactcgcacgacgacgtgtggggccttgtgcggcggatggtcgccgacgggtgcgcgccagaccggttcactatgtcagccgtgctgccggtgtgcacgtctgcgcgctggggcagggagcttcattgctatgccgtcagagattggatgtgtggggacgatgatttccatgtgagcagcggcctggtgtccatgtactgcagggttggccacccggactctgcaagaactgttttcaataggatggcacgaaggaacgttgtttgctggacagccatggtgggagggtacatagagaatggcatgtttgatgatgccgtggattgtttccgggcaatgtggcttattgatgccattccaccgaacaggattacgttgatcactgtgctctcggccattgaggccctctcgagcttagcagaggggaaacaggtgcatggttttgcagtaagaatgatgatgcacgcagagatgtcgctgaacaatgctttgattgatacatacgcaaagtgtggggccttgcattatgcaaggcggatctttgatgataccagttggtgcaaagatgtgatctcatggggtgcaatgattttgggttatggcattcatggtatgggtgtggaagcagttgctttgttcgatcagatgctttcatctggggttaaacctgacagcattattggacttggtgttctttcagcttgttgccatgcaggtttggtgttgaagggccttaatacatacagctccatggtaaatgatcacggggttcatccaactgaggagatgtgtgcctgtatggttgatttactgggccgatctgggaatgtttaccatgccttggattttgtgaagtcaatgagtgtggagccaggctctagtgtctggggagcacttctggatgcctctgttaagtacgacaacaaagaaatccaagatctggcttccaggtctcttcttagattggaacaagggaaaccatctaatcttgttgcagtatcaaacctaaatgcctcttcagaaaggtggaatattgttaaacaagtaagggatacaatcaaccagggatcattgaagaaaaaaactggttgtagttgggtaaatccaatataggttaacaatgcttcttcgagtgacttacagataggcttttgatgcttctgatctcaagtgtaccattcaatgcctatgcctgggagcaatcacattagatcgcacaaattcctggaaggtgtactgaagctacaacaacaaatctgcatgtacttgtatgttgttagatgagaagattatgacacatctactgttggagtctttaagcaacaaaagtgccttatacgatgatgtcaaggttttctgcaatctcctcttttccagggagattcaatgggcagacagatgacggaagtggaaacaacaagtcagatcaccatgttagtggaaacaacaagtcagatcaccatgttatgtttggagggaatttattccagtcggtatcttgctctggttctggccatgaacagcctcgccacgccatctggttccatcagccctttccttattggatgagcaggctcgttcgctttcagaggtgacagcaggtttgctcctgtgaccctttccagaatatcatgactcgcggattgagatctcgtgatggttcatggttgcgagtactgcgcgcccggccggctcccatgttgttggttcggtcctcgcgatcacaggcgtgcagaagagtgtcatctcagatttaagcaagctcctgactggaacggcttgaggcgatctgctagcctttcgtcggggatcattgtttggtggtatgtcataattgctccccggacttagcatgctttgtgtagtgtagggtctgctagatctcctttgtaggctgttccctcgatttaaaaggtggcggcaggcatgttaatggcaggatgattagccattcaatatatgattggaaaggcccaaccgcaccgcgcataactgtacatccaggacgcacagtgtcattcgctgctgcgttgtgcattccggcttcagttctggcaaagatcgcgcttaacgtcgactgctgcggaatctgctcgtcttgaacaggtaactcttgagcagcgggcaagatgggtctcctgtgttacatgcgcatcactgcatcatcagctacaggtagtacagtacatctgctgctggtgcttacattacagttcggtccatcctgccatgtggtggtctcgcccccccccccccgttgctctcggcgaagtaatggtgatgtgggacttgacagggcactgataaccagccaatcatggagacttgttgtacctcgcgccattaagcggctcccccttcgcgcccatgaagatctcacgtggatgggatccactgtcactgttggatgcgaaggtacgctccctcacagccaatcaagcatccggacgtccggatggacgcacggcccgtgcccgtgcctgtggcgctgtgctgccggcctcgtcgtccggacgaccgacgaccaccggtggagcgcacatatgcatgttttctcttctcttgcgagcgctggctggtcctgggttggctggctggcggcgcgcgcttgtccttcctccggcgctctctcgtcagaaggggtgaagaggggaaggctgatgtggcacgcgcagtgtgagctggcgcgggcgggcgtcggcgccgtcgctctcccgacctggtgctgagcgcgacgcggggcgccggggccaggacgattcgtatttgtgattcccccgccgtgacccgcgcgactggacggatcgggttttctggcggtcgctgtcgccgccagcaagatgggtcgctgggctctcgggggtgggacggatggcagcgagggagctccgttcttccgcccctcatcattgcccgtcctgccagctgctgtccgtacgcgtgtggcagcacgcacacgcccgtatgggttcttgttatatgtttgtactgtactaggcgcgccaagacgatgaggctggatctggtgcctgttaccgtaggacagatccattatcgattactcatcgtaattcttatgtaccgtactattacattcacagtcactttaacgttatatcaaccttttcttttgc

SEQ ID NO: 2269 - DNA, 710 bp, Zea mays
atttgaccgagctacgcgtagcagcgccgagcaccaatgcccagccacgcgcgtgcccaagccatgccactgccacgccagaatgcagtagcccgaaaccaccgccactcagtcattcgtccatcgtaatgtctaccattaatggagctccatggcatgcgtttctctggatttatggtgcagctatggccacgggaccgcgtgaagtctgcagccccgactcctctgcttcccctctcctctcctataaaaggcagcatccccttctgcactccctcacagcgttcctccaaccttcttgttaatctctattcatccccaccgttgcgttgcagtcgacgccgtcatataacaccgatcggagctgccgacgcggtttgccgccgacgaggacgccccgaagccgacacagtgcttccgtcaaccttcctccgtgccgtcctctgttcatcgccgtcgttcgagagctccgaagctaattgtgtggtagaggattcgaatttgattgaggacaacccacaggacatgcttgagcaagagggtgatgctggagactttgatggagatttcgacgatgagttctaagtctaatgatgtgccggtcatcttcctgtgggagattgcccatgttatttaattccgccttactttgatgtgatacttgttaaagatacaatgattcagatgatgtaataaagtattctactctc

SEQ ID NO: 2270 - DNA, 2312 bp, Zea mays
ttaactgcttttcagtccgaaaactaaacgtatgtactgcagaaataccctcagcgcgagggcgcgcgcatacgtagcatcgtacaaatagttttctcgtcgttcacccaaaaaaaaacaatcgcgcgacaccgtcctctgcatccaactcctgtataggctctgcctgtgttactgacaagtcgggacccatggggtttcagttaaccaaccaatgggaagctccccaactacctcgcctagctcgctcgtcgctagtcgcttttgcctgcttgcccaacttgccagcgtacctgactccatcactgacataacatcccacatgtaagatggcccacgtgtcatatgctacacggctatactcgaaccaaagacgagcggtaaatataaaaattctcccgaggagagaagacccagatcgcccgccggtggcttggctacttgcttgcttgctgagttgctgactaatggcggccattccgagcggagcgatagcccaagccggagctgagcgtccggcggcctgaacaggagaggcgagagagagagggtgcaggtaccagaagaatgggtccgccgccggagaagcggcggacgctggtgctggtgaacctggcgtccatcatggagcgcgccgacgaggcgctgctgccggcggtgtaccgggaggtgggcgccgcgctgcacgccacgcccacggggctcggcgccctcacgctgtaccgctccatcgtgcaggccgcctgctacccggtggcggcctacgccgcgtcgcgccacaaccgcgcccacgtcatcgcgctgggggccttcctctgggccgccgccaccttcctcgtcgccgtctccgacaccttcctccaggttgcaatttcaaggggcttgaacggcattggtctagctctcgtcataccagcagtccagtcgctggtagccgactccactgacgacgacaaccgcggcacagcattcggatggctgcaactgaccagcagcatcggctccgtattcgggggattctttgccttactgctggcccagactacagtcttggggatcgaaggatggcgtattgccttccacctcgtcgcgatcgtcagcgtcatcgtcggcaccctcgtgtggttcttcgccgtggatccccatttccccacaaacgatgccgcaccaccatccagcaaaaagtccgcgcttgatgaagcaagggaactgatcatggaggccaggtccatagtccagatcccgacgttccaggtcttcgttgcccagggcgtcagcggctcgttcccgtggtcagcgctgtcgttcttgtccatgtggctggagctcgtcgggttcagccacgaggacaccgccgtcctcacgaccaccttcgctgtcgccacctccgtcggcggccttcttggcgggaagatgggggattcgctcgctcggcggtatccgaacgctgggaggatcgtgctgtctcagataagcgccggctctgctgttcctttggccgctgttcttctgctgggcttgcctgataatccgtccacgtccagtggtgttgcccatggacttgttctgttcgtcatgggactcatcatctcttggaacggagctgctacaaactgcccgatttttgcggagatcgtgcccgagaagcaaaggacgagcatctacgctctggacagaaccttcgagtccattctggcgtcgtttgcgcctccggtcgttggcctgttgtcgcagcaagtctacggcttcaaacaggacgacggcagagggagcagccctgggcaagaccgggagaacgcggcgtcgctggccaaggcgctgtacacggccatctccataccgatggtcatctgcacctccatatacacgttcatgtaccgcacctaccctcgagacagggagcgtgcgcgcatgcagtcggtgattcagtcagagttggaccagattgagctgctgggcggtccgagtttaggaggcggcggcgacggcgacggtgataaacctgacgaggttgatggcagttatggttctgaaagatctgctgaggccgatgccggcactgaaaaactactaggaaggaaaccatgagttgtgacgaacagaagaacctactaggaggaccattcatgttgaagaggatgatagatgttcctgccgattttaggaacttgtaattgtaacacgacgatcaatatgattcactaaagtgaccgttcttttttcttccatgtctatgttatgctgctactgcaactgctagtatacaacatatcccgctggtggcttcgtgacgtacatgacggcacttcaac

SEQ ID NO: 2271 - DNA, 1178 bp, Zea mays
ctctgacctgcgggtccgcactccgcttgctcagccagctatgggccgctattgctgaaaagagtaaaaaaaccgacagccacagggcagggagccagggccgctccgctcctgctcctgctcctgctcctgctctctctctctctctctctctctcggcgtcgattgggcgaccgccgccgccgcccccaggtcttcgctgggcccgtcgccggcgacgagcacccaccagttcagtcgagtagctgtcggactcggaacacacatgccggcgatggcaactgctcctgtgaaattctctgtggctacgaactccccatgtgtccagcctagcttgcccctgaggcgtacacctgccgccatctccttcccttgtcgtccatggtcagccgcaatgaactcatgtactggattgttgaggcgctctgacgtggttgcagccgcggggcaccagaagttgatgggatctttgaccactaacgagggactcaggtttggggtggttgtggcacggttcaacgaggtcgtgacaaatttgttactacagggtgccctggaaactttcgagcgatactctgttaaagaagaaaatataacagttgttagtgttcccggaagctttgaggttcctataacagcacaaaagcttgggaaatctgggaaatttgatgcaattctgtgcattggagctgtgattagaggtgacacaacccactatgatgctgttgcaaactcagctgcatcaggtgtactcaatgctggattatctgctggtgttccttgtgtatttggtgttctaacctgtgaagacatggatcaggcgctaaaccgcgctggtggcaaggctggaaacaagggtgctgaagctgctcttactgccattgagatggcctctctgttccggcatcacttaggctgacgcttttgcgtattctggtttctatacacgaggcaagacatcatttcttcctatcaagagttttggctaatagagcttttccgccgcggctagtataattattttcaattctgttagtccggtgctgattggttgctttctttctatgagatttgaaaagctaacgagacatgtttgtaaacctggcacaatgaataattgtcaccatgaacaaaatatggtcatgaataaggttgcacacttcatgaattgtgagatc

SEQ ID NO: 2272 - DNA, 998 bp, Zea mays
actggagccgaaccaaacaaaaccccacctgcaagtctcgctgcagccccacacgcactgacccacaccccccgcaccgctctctccccacccaggcacccagcctccacgccacagatctctctccctttcccccctctctctctctccgaactctaccccgcagtctcggccgcggccatggcggaggacgcccccaacgccgtcgccgagggcagccagcccgcggcctccgagggatccgccgacgccgccctgccggctgccgcgggcgccaaggccgcggaggcgctgctcccgtcgctcagtatctggccgccgtcgcagcgcacgcgcgacgccgtggtgcgccgcctcgtgcagacgctcgcggcgcccagcgtcctctcccagcgctacggtgccgtcccggagcccgaggccgagcgcgccgccgtggccgtcgaggccgaggccttcgccgccgcctccaagtccgccgccgccgccgccgagtgcccggcctccgtcgaggaggggatagaggtgctccaggcctactccaaggaggtcagccgccgcctcctcgagctcgccaagacccggtccgccgctgctgcggcggcgcccgcgcccgccgaggggagcgcgcaggcgcaggagtccgcggaggcctcgtcggcgactgctccacctaccgaggaggctgccgtaaacgaggagtaaggcgtcggaccgcgctttgatccaccgacaattgctgttattttggcatttcgtcggaatgttatttatcgtcccccctgcctatgtttactagtacatcattatctatctatctattagagatgagatgcttgtgacaagagggactgatgtttgtttcatggatatgatattctcgaatatttatcgctagtttatttttaactaaaccgtgacaataaaaaaacggagggagtaatattgaattattatatatcaaccgtgcatcctttcgacgagctaattgttcttgt

SEQ ID NO: 2273 - DNA, 5207 bp, Zea mays
cggcacactccgagattcccctcaaggcaccccaaaccgatgctttctggccactgaaaagcgcacgggagaagaagcgccaaggcaaagcaaaaatttcgcgatgagtccaccacgactccaagcagctgcggccgcgccgctctaaccggagctccgttaagactccgccgccccaaatctcagcgcctgagtccgccgctctcctcccgtgctcgccgccactggtttccgcgccgggacttgggttcggtggggcgacgtggagcttagggtttcggcaggatgagctaccggaaggggttgaaggtttgggtggaggagaagggggaagggtgggtggaggcggaggtggtggaagcgaaggagcgcgccgtcgtcgtgttctcgagccagcggaaaaagattacagtttcaccagaaaaattgttgcccagggatacagatgaagatctgggtgggggtcatgtggatgacatgaccaaattgacatatctaaatgaaccaggtgttctttacaatctgaagaaaagatatgcattgaatgagatatatacgtacaccggaagcatcttgattgccgttaatccttttacaaggctgcctcacctgtacaatgaatacatgatggaacaatacaagggcatccgattaggggagctgagtccgcatgtttttgcggtggcggatgcatcatacagggctatggtgaatgattctcgaagccaatccatcctggttagtggtgaaagtggtgctggcaaaaccgaaacaacgaagcttattatgcagtatctcacctttgttggcggtagagccgctcttgatgaccggacggttgaacaacaggttctagaatctaaccctcttttggaggcatttggcaatgcaaaaacagtacgcaatgacaattcaagtcgatttggaaaattcgtagagatacagtttgattcaagtggtagaatatctggagctgctattaggacctatcttttggaaaggtcccgtgttgtgcaaattactgatcctgaaaggaattttcattgcttctaccaattgtgtgcctctggaaaggacgcagagctgtacaaacttgggcatataagcagttttcattacttgaatcaaagcaatacacatgatttggaagggacaaacaatgaagatgagtactggaagacaaaaagggcaatggatattgttgggattagcagagaagatcaggacgctatatttcggacattggcagccattcttcatcttggcaatattgagtttgtcccaggaaaagatgctgattcttcaaaaattaaggattcaacctcaaattttcatctccaaacagcagctaaattatttatgtgtgattcagatctattggtctcaacgctatgtagccgatctatacatactcgtgaaggaataattgttaaagcattggattgtgctgctgccgcagctaatcgtgatgctttagcgaagactgtatatgcaagattatttgactggcttgttgagaatattaataagtctattggtcaagatgtggattccaagctacaaattggtgtgctggatatctacggctttgaaagcttcaaaaacaacagctttgagcagttctgcattaactttgcaaatgaaaaacttcagcaacactttaatgagcatgtattcaagatggaacaggaggagtacaaaagtgaggaaattaattggagctacattgagttcattgacaatcaggatgtgctggatttgattgaaaagaaaccaattggaattattgcactgctggatgaagcctgtatgtttcccaaatctacgcatgagacctttgcgacaaagatgttcagaaacttctcttcccatcttaggctcgagaggacaaaattctcagaaacagattttaccatctcacactatgctgggaaggtcacgtatcaaacagattcttttctggaaaagaatcgagattatattgttgcagaacactgcaatcttctatcatcttcaaggtgcccatttgtttctggacttttcacttcattgcctgaagaatctataagatcttcatacaagttctcatcagttgcttccagattcaagctacaattgcaagccctgatggaaaccctaaactcgactgaacctcactatgtacgctgtgtgaagcccaactctgctaatcgacctcagctttttgaaaatcaaagtgtattgcatcaacttcgttgtgggggtgtcttagaggctgtccgtattagtcttgctggctatcctaccagaaggacttatgctgaatttgttgaccggtttgctgttcttgtgccagaattgatgattggaagttacgatgaaaaaatgatgacaaagggtattctcgaaaagatgaagcttgaaaattttcaacttggtaaaacaaaggtgttccttagggctggtcaaattgcgattttagatatgcgccgtgctgagattttggacaacgctgcacggcacattcaaggccgtttcagaacatttatcacacgcaaagaatttgtgaaaacaagggaggcttcaatttctatacaagcatactgcagaggctgtttggcaaggaagatgttcgcaaacagacgagaaacagcagcagctgtaattgttcagaagtatgtccgaagatggctgctacgtagagctcacctgcaagcatgtttggcagctctccttattcagtcttacattcgagggttcatcgctcgccgctatttctctgtcattagggaacataaagctgctacagtgatacagtccacatggagaagacggaagtttgtcatacttttccagaattaccggcaagccactgtggcaattcagtgttcttggagacagaagcttgcaagaaaggagctaaggaaactcaaaatggctgcaaatgaagctggtgcactgcgtgaggcaaagaataagcttgagaaaaagatggatgatcttgctttaagacttacccttgaaaggagactgcgggcttccagtgaagagtcaaaatcagtagaaatattgaagcgtgacaaaataattgaatcattaagtgcagaatgtgctgccgctaagtcagctgctcaaaatgaacatgccaaaaaattgctgctccaaaagcagttggatgattctttgagagagattactatgttgcagagtaaaaagattatgtcagcagaagcagcagaagaaaactccaacctaaagaacttagttgaatcattatctacgaagaactcaatactggagaatgaacttattgtgactcgcaaaagtagtgatgatacaatggaaaaattgaaggaagtcgaggggaaatgcaaccatctacagcaaaacttggacaaattgcaggagaaacttacaaacttggaaaatgaaaatcatgtcttaagacagaaggcatttaatatgccgacaatgaacaatctgtctgtagctccaaagacattatctgagaaattttctgcatcaattgggcttcccaacagtgagccaaagcatatatatgaaagcccaacacctacaaaatatctggcttctcttccacagactttgagtacatcaaggagatcgaggttgcctgttgaaaggcatgagcaaaatcatgaaattttattgagatgcatcaaagaaaatttaggatataaggatggcaaaccagttgcagcatgtatcatttacaaatgtcttttgcactggcgtgcttttgaatcagagcgaactgctatttttgatcacgtgattgaggccataaatgatgtcctaaaggggaacgaagctgatggtagattaccttattggttgtccaatacctctgcattgctatgccttctccaaagaaatctgcggtcaaatggattattcactaccccgtctcgtcgttctggtggagctctagggaagatagcacaaacattgaggtctccttcaaagtttataggccgcagtgatactctaccacatgttgatgcacggtatccagccatactattcaaacagcagcttactgcatgtgtcgaaaagatatttgggcagctcagagataatctaaaaaaggaaatatcacctcttcttaatgtttgcattcaggctccaaagtcaacacgtgggcaatctggaaaagcatccaagtcatctggagttggtgcccacccagcatcgaactccaactgggacaatatcgtcaatttccttgacttacttatggatacattgcgcgaaaattatgtgccatccttctttatacgtaaacttatcacacaattattctccttcatcaatatacagttgtttaacagtcttcttctccgacgtgaatgttgtacattctccaatggggaatacgtgaaagctgggctatcgttgttggagaaatggattactgatgtcacagatgagtttgcgggtacatcttggcacgagctcaattatatcagacaagctgttggatttttggttatacaccaaaaaagaaaaaagacgcttgaggagatcaagcaagatctttgcccgtccttgagtgttcgccaaatctatagaatatgctcgatgtattgggatgacaaatacggtacccaaggcatttcaaccgaggtggttgctgcaatgcgggagatggtcaacaaagatacccagaatcttgtgtcaaattccttcttgttggatgatgacttaagtataccattctctaccgaggatctatcaatggcaatcccgtcaatagattatgctgacgtcgatcttccagaatctcttcagcactatacatcagtacagtttctactaaggcagcaggatccacagcctgcccaatagaatgaatgtggtcagcctgccctgaagatctgtctgtcccctggttgtttctaccaaggcagcaggatccacagcctgcggcctgcccaatagaatggatgtggtcagcctgccctgaagatctgtctgtcccctggttttattggggtaacatccatctgcgatgttgtattgatgtttagagagtacctagtttggtggagtggacacaatttaaaagcaaccattgttgctagatgccaattcattggtgttcactccccaagtatttttcattgtacaggaaatgttgtaagtctgttgactagcgcaaaattagttatatcagtggtaaattgggcaatgcgcatcagtgcatc

SEQ ID NO: 2274 - DNA, 1069 bp, Zea mays
ctgccatcgcgcgattcctccgcccgcgattccccaccccgcgcccgcagcccccccccccgtcctcccggccgcagccgagcacagccgccgcgcccacaaatcacgcgactcccgcttccatgtcctcgcgtcctccattgcagccgcatacatagcgtcgccccttccatcgatggcagccagccgcgcccgcaaatcacgcgactcccccttccatggcgtcgcccccttccatccatggcaggtccgcgcccctacgccccaaatcacgcggatggaaggccgaagagaaggcggtgagctgcggcggaggaggggcatctgaaatccctgagctcgctgtcatcagggagctacatcttaggacaattgatgagctcggtttagataagtcgattgtttcaggtacccaatcaaccagtcagtcaggcagagtggcaaaagctggggagcgatgcaggcgtcagagcagcaacaacggaggaatgagaaggaaacacgcaaagagcatcaaaagcaagttcaacgatcttatgtcaacccatccacctctgaatgaggcatattcagatgtgtgtgtattcaggatgtcaagtgccaacgatgcttcagcatgtccaattcgcttgtggcataggaatctcatcctagattcaatagaggggctgcaatgccggcatcgccatagctggaaatcgagcactgacggacaccgggcgccgagatgggccgtcttgtccaccgccgcaagaaccgcatgcgttggagccatccttacacctgctcctacttccgcgccagcaacccaacacgccgacgacacgagctcctccttataaaagtgacatctttattgtatagataacgaatggttatagttatttattcttgtgtccaagtggtattggatttttttagcttggggttaaagaaaagacagtcatgtactttgcatcttttttgtatttatgttttatgctaaattgtggaataacactatattagttgttagcaaagaatttctgagatattaaggttgatgataatatatgttgttatttcattt

SEQ ID NO: 2275 - DNA, 1664 bp, Zea mays
caaagagaagacgcaagagcaccacgcacacgaggagaagcagccgcgccgcacgcccgcaccaagaatctaccaccagcagccaccaaggtaccattacgctacctcctgtgctatagagcggcgccgcagatcgatcgaccgatccatccaccgatcgggatgtgggaaggcggcggcagccacgcccacgaggcgctcctgctgcaggccgccggatcaggagcggccgactacgggcacgccggcccgtcgctcctgcggccgtggctcggcccggccgccgcgtcggggttctcctacatggccccaaaccacgcgcagccagggcccttgggcgccgaggcggcggtcgcgagccgtttcggcttcggcggcggcgggtacagcgatggcggggtggagcaagagcaattcgtggtgatcggctcagccgagactgtgcctccgcggcacagtctgcaggctgctggagttggtgggaggacgacggcgctgctgccgcacgggccgaggatggtgtcgggacttctcgggaccctgcaggcggagctggggcggatgacggccaaggagatcatggacgccaaggcgctggcggcctctcgcagccacagcgaggccgagcgcagccgccgccagcgcatcaacggccacctcgccaagctccgcagcctgctccccaacaccaccaagacggacaaggcgtcactgctggccgaggtaatcgagcacgtcaaggagctgaagcggcagacgtcggcggcggctcggcagcggcacctgctgctgccgacggaggcggacgacctgttcggtggacgccgcggaggacggcgacgacggcaggctcgtcgcgcgggcgtcgctgtgctgcgaggaccgcgtgggcctcatccccgacatcgcccgcgcgctcgccgcgctcagcctgcgggcccgccgcgccgagatcgccacgctcggcggccgcgtccgcaacgtgctcctcatcaccactgccgacgacgacgacgaggaaggagagggccacgtcgaaggcgggtgcgccggcgcctcgtccaaccggaggcacgagctcgtcgcgtccatccaggaagcgctgcgcggcgtcatggaccgcaagacggcgagcagcgacacgttctcatctagcggcggcggcggcggcgggagcatcaagaggcagcgcgtgagcggtctgcatgagcaaggttcgctttaattagcgtgctcaaagtagctagctatgttgtcgtggtccttcctcgatcctagcatgaaatatcgaagcatgcttgcatggctagcttgcttctgcagaaactcaagttgattagtacagttataaagctataatcacttcaaagtttaaccttggaacgagctggctcttctttttttgtcgctatatatggcatggcactatggcagtggtgtgtgagatagacgtggagggggataagggtgtacacatgtataatctcgggggttattataatgtaagatggaattggtggggttggtcatttatttcttcagtgtgccatgcatggagccatggaggttcactcttttttcacttttcatcacattgtcgttggcatcccattgccaatacatttgtggattttaatatggtatacatttttttgatgtttttc

SEQ ID NO: 2276 - DNA, 1377 bp, Zea mays
atgaggagctcgaggaggtgcgccgcatgcagaggattcctgcaaggaggagaacatggaggtggtgcccgtagtagtaggggaaccgatcaagagcactggcgaggggaagaaatagaagaagcactatgcttccttggagtaccacgtcaacagcttggagctggtgagcccatggcttgttcctcctgcccttccctcccctcccctccctgctcccccgactctgcgcggatctggtactatctagcccatagagccgtgttggacaacacaaccacgaccacaaggcatcgctgtggagcagtcggagccatttgtgatgcccccctcccgcttgcattgaccacagaggcacaccggagcatccggcgaggacctgcacgcttgaaaccgacgacgaggccatgctggggaattgcatattgtgtcaagggtggtccagaaaaagagctaaaagcaatgcagtacttggagagaagagagtgtgagtatgaccagaagatatccattgatttctacaaggaaggagatcccttgaaaccagctgtgatgggcgtcttagtgttcgtttccactccagatccaattggcaacaagtactatcttggccctgctcctttgcagaatatggcaagggcgcgtgaactcttctactacctcaagggtaagcaggtggactatggcgaggagcacagcaaggcttgcggccacaacaggtttgggagaatatatcacacaggtcactatcctgtttgttatgagcacaacccagtgcattttgtggggcactctgctggcgcgcaggttgtgagggtgctgcatcagatgcttgccgacaagatgaggggggcagttgtccttgctgctaagcatgcaaaaacaatggtcgggaagccattgttgtatggaataggtaccctgttggtcatgtcgctgaggacactgtatggagtgggttgtgtttttggcgcacggtggttcctctacatgacaagcgtatctccatcgctgcaaattgagtttgtatatcgcaagttcttcggcgggtactgcaactgctcataccatgtggcacagaacacttctttgcatgaattccttgatagttatctacaattcaggcacaggtgtctggtaacggtgcaaaggcaaatggggcatcatcacatatctaggtcgtattttcgacagacagatataaaacggagtgggaatgcctcgattgatatcatgtccaagttcttcaagctgatggtggtaggtgttttgctttgctactttctcattgttgaagttgtctccatgttgtattcactaaagaacccctatattatttattttggaacaaacctttttaatggtggattagactga

SEQ ID NO: 2277 - DNA, 1085 bp, Zea mays
ctactgcagagcgctagctaagcgaaacaaactcagcgatcgacaagctaagctagcagactacacatccaggatcggagccgctgctcaccgaccaattaatatggcgacggagtacttgtccgggtggccgctgtcgtcctggatcagccccggcgcggcgttcttcctcttcgtcaacgtgctcatcggcgccatcgtggtcacgtcccgcgggcaccaagctggccgtggccgcgcggcggcgtccacgcggaggctctgccgcagcgcgtcgtccatggtcctcgaccggctccgctccttctccatgttctccgtccatcccgaccccacggaaatggaagagcgctatagcacgtcgtcccccctcgagctggaagcagaggaggagcagcagccccaaccccaaccagccgtcgtggagcccgcaaggtcacctgttgcggcagtagcagctgctgcagacggtgcatcgtccgagatcgccaaggaagaggcggcggaagcgggaaaagacctgcccaccagctcgaacgaggcccacggtctgctgttgcagttgcagcagggtcacggcggccggcagcagccaccgtcgtcagtacatgtcgtcgtcacagccgccgatgcaactgcggcggtggagataaaggaggaggaagagaagaaggcagagcaggaagcaaccatgcagcgcgcacctgcgagtaggcggggaacgacggaggaagcagcggaggggaaggcggcgctgaacgcgcgggcagagtccttcatccggaagttccgggaggatctcaagctggagcgtctcaactccattatcaactacacccgcacgctccgccgcggcgttggcgcgccacagcccactgcgcagtagctctccgctcatcggtggtccatcgttttttattgtttgcttaatgtatagagtacttgaatttgtttgctcatcacaatggtgccaaaaccagatagtttagtttaaatgtgattgtgtaccactgtggcttccttatatatggacactagtccaaatgattaatatatatccataattatcaaaaacattcataaaa

SEQ ID NO: 2278 - DNA, 4125 bp, Zea mays
atgctgaagcacgttcccgactgtggttattgcactgcgaagaagtttgagtatgagccgcctgggttttgctgtcgaggtgggaaggttgagctagccccactagagacccctccccagctcatgaggttgtgggatagtgcagactctgatgctaggcactttcgtgataacatcaggttttttaatggccatttttctttcacttccctgtactgttgcctcgacagtatgacaactaatatgagagattctggtatatacacattccgtgcacaaggcatgatgtaccataatatcaagtcattcggtagtgaatgtggggcagagcacaaacacctggagctttacttttacgatgatgatcccagtctcgagcatcgataccgtaagtgtcgtgaagatcagattcagaaagaccaagaggttattaaacagatagttggcatacttcgtggaaatccgtactctgagcaccttaggagcatgggtcatgttgagaaccttgctgactatcacatcgcattgaaccttgaccagacgttgaaccagaagacatataacacacctctcacttcggaggtggccgctgtctggatcgaggggagcgaacggcgaggccagttcagcaagagtgttatgctacatgggaaggataggtcaagccacggcatccgctcataccatggatgctacgatgcgctatcatatccactgttcttccctagaggtgagcttggatggcatgcaaatatcccaaaggttggtgtatccatgggcgaagtggatgcataccgggcgacgcatagggcaagtaatggaaatgatgaagatgcggaacctcctacccatctatgtgtgtccgtgcgtgattactactgctacaaatttcagatacgtccaggggtattcaatccgatacttcatggtaaacgacttttccagcagttcgcggtcgacacatacattaagattgagagctcccgtttagatttcatacgtaagaaccaggatcggttaagggcagacctatatcagggcttggtggatagcatgttagatggagatgttagaggagagaaggttggaaagcgaactgtgttgtcaccgtcgtttattggcggtcctcgtgacatgagacgtcgatatatggatgctatggctctggtgcggaagtttggtaaaccagacatctttcttaccatgacatgtaaccctaattgggatgagataaagagcgagcttttacctggacagacaccgcaagatcgtcctgatcttgtagtgcgtgtctttcatgcgaaactacaggagctaaagcataggttgactaaacaggatatactcggtaaagtccgagcctacgtctatgtcgtggaatttcagaaacgaggtttgccacatgcccattttctactcatcatgcaaaggaagtacaagctcacgtgccctgaacagtatgaccttttgatctcagctgagatcccgtccaacaagtaccctgaactgcgaaagatggttatcaagcatatgatgcatggcccgtgcgggtcgctaaaccctaactgcccatgcactaagggtcgtgcatcgtgtaagcatcaatacccccggcatttccatgaggcaaccatgcaagggaaggattcatatcctaattacagacgtcgtgatgatgggcgtaaggaaaaggttcgaggatgtgaattggacaatagatgggttgtcccttacaacccttacctgcttcggctcttcaactgtcacatcaatgttcaggcgtgtgggagcatcaaggctgttaagtacctgttcaagtacatatacaaaggccatgatcgtgcgtctgttgttatgagagatgcgagtaaggaaaatggtgatgtagatgagatccagcagtatagagatgcaaggtgggtgactcctccggaagccttatggaggatatatggatttgagcttagtcagaactctccatctgtgatgcagctgcaactccatcttccaaacatgcacatggtgacgtttcacgagcgacaaatggtcgagcgagtcgtcaatcgtccaggtgctgataggtcaatgattacagcatattttgaggcgaataagctgtacgaggaggctcggggcatcctgtatcgtgacttccctgagtggtacacttggcagcagggcaaagtgtggcaaaggaggaaacggaatacgggtggacaagtcggtagaatcgtctttgctctaccatctgagggggagcgcttctatcttcggctcctcctaaatcatgttactggtgctacctcctatgtggatctaaggacagtagacggtgacacactaccatcgtttcgtgaggcagcacaaagaaggggattacttgaagcagacaacacaatagatgagtgtctcaatgaagctgctctttaccaaatgccatcagcgctacggaggttgtttgcaacgatactggttttctgcgagccgaatgatgtggccgaattgtggcagagacaccttgacacaatgtccgaggattatcatcgtattactcagagtaaacgccatttgcagcagatggtcttgattgacattagaaacatgttgcagtcaatgggtaaagacataaagacattccctctacctgctatcatcgatagatatgacgattcacaaggtattgatagagagatttacgaggaggaaattatcgaggcaacggcagaagatgttgctttgcaagaaaccctaaatgaggagcagaagtctgcctatgaaaagatcttatctgttgttgacaccagtaatggcggtgtgttctttgtggatgggcctggtggtactggaaagacttatctgtataaggcattgcttgcggtgctacgtagtcaggacaagattgcagttgcaacagctacatctggggttgcggcttccataatgcctggtgggagaactgcccattcacgcttcaagataccacttactattgatgatggtgctatatgtaccttcacgaaacaaagtgggacatcaaagttgctacagaaagcgtcgctcattatttgggacgaggcatcaatggctaagagacaatcaattgaagcgttggacaacagcatgcgtgatatcatgggacgccctgatctgccctttggtgggaagactattgtgtttggtggagatttcagacaagtactccctgttgtacgtaaagggtcaagggctcagatagttgctgcctctctacggagttcttacctatgggaatcaatgtgccacctaaagcttgttcgcaacatgagagcaaagagcgacccatggtttgcagaatatttgttgcgtgtcggtggtggaactgaggaagtgaacaacgatggtgatgttcgtcttctagatgaggtatgtgtgccatataccggtgatgaccgcgaccttgacagattgatagatgacacttaccccagtctaaacgaaaacatgtctaatacaagctacatcacttcaagagcaatattgactactcggaacgactgggttgatatgataaatatgaggatgatcgatcgtttccaacgggagcagatgatgtaccatagctttgacaccgcggtggacgatcctaataactattatccatcggaattcctaaacacgctgactcctaatggactacccccgcacgttctgaagctcaaaattgggtgcccagtcatgttgcttaggaatatagaccctgctaacggactttgcaacggtacacggctggtgcatgctggaatgcgggttttcttgcctcgtatacccctgtgcccttctgatgacgagatgttccctttccattttaaaaggaagcagtttccggtaagactaagtttcgccatgactgttaacaagtcccagggacagacgattcctaatgttgctgtgtacttgcccgaaccagtattctctcatggccagctatatgttgctctctcaagggccacaactcgattgaatgtgaaggtacttgtaattccagtcactgatgataaaatgaataagggggtggaaaagaagtcaacaataaatggcgtaacatacacaaagaatattgtctataaggaggtccttacgccgtag

SEQ ID NO: 2279 - DNA, 2185 bp, Zea mays
ccaatatggaagtccaggtcctcacctactcctccggctatatatgaaccgtgcactcctccctttcttttcagctctactcgaagagcgttctaccaccacaccacaatctaactaaaacccaaacgaaataaaaggaagaggtcaaaaaataaaaggtgttgtgcaatcgatcatggtgaccgtggccaagatcgccatggagtggctccaagaccctctgagctgggtgttcctgggcacgctggccttggtggtcctgcagctgcgacgacggggcaaagcgccgctgccgcccgggccgaagccgctgccgatcgtgggcaacatggcgatgatggaccagctgacccaccgcgggctggcggcgctggccgagaggtacggcgggctgctgcacctccgcctgggccggctgcacgcgttcgcggtgtcgacgcccgagtacgcgcgcgaggtgctgcaggcgcaggacggcgcgttctcgaaccggccggccactatcgccatcgcgtacctgacgtacgaccgcgccgacatggcgttcgcgcactacgggcccttctggcgccagatgcgcaagctgtgcgtgatgaagctgttcagccggcgccgcgccgagacgtgggtggccgtgcgcgacgagtgcgcggcgctggtccgcgccgtggcgtccggcggcggcggcggcggcgaggccgtgaacctgggcgagctcatcttcaacctgaccaagaacgtgacgttccgcgccgccttcggcacccgcgacggcgaggaccaggaggagttcatcgccatcctgcaggagttctcgaagctgttcggcgccttcaacgtcgtcgacttcctgccgtggctgagctggatggacctgcagggcatcaaccgccgcctccgcgccgcacgatccgcgctggaccggttcatcgacaagatcatcgacgagcacgtgaggcgggggaagaaccccgacgacgccgacgccgacatggtcgacgacatgctcgccttcttcgccgaggccaagccgcccaagaaggggcccgccgccgccgcggacggtgacgacctgcacaacaccctccggctcacgcgcgacaatatcaaggctatcatcatggacgtgatgtttggcgggacggagacggtggcgtcggcgatcgagtgggcgatggcggagatgatgcacagccccgacgacctgcgccggctgcagcaggagctcgccgacgtcgtgggcctggaccggaacgtgaacgagtcggacctggacaagctccccttcctcaagtgcgtcatcaaggagacgctccggctgcacccgccgatcccgctgctcctgcacgagaccgccggcgactgcgtcgtgggcggctactccgtgcccaggggctcccgcgtcatggtcaacgtgtgggccatcggccgccaccgcgcctcgtggaaggacgccgacgcgttccggccgtcgcgcttcacgcccgagggcgaggccgcggggctcgacttcaagggcggctgcttcgagttcctgcccttcggctccggccgccgctcgtgccccggcacggcgctgggcctgtacgcgctggagctcgccgtcgcccagctcgcgcacggcttcaactggtcgctgcccgacggcatgaagccctcggagctggacatgggcgacgtcttcggcctcaccgcgccgcgcgccacgaggctctacgccgtgcctacgccccggctcaactgccccttgtactgacgccatgcgcgggcgactgccattaccatcgtcccctcgggtgggtgtggggtacgggggtaggagtttggtgcctttctctgtcgtcttttttccctttaaaaaacatgcctggtcgatgttgtagggtgtgttgtagacagccattatcaattttttttattctcaattctcatgttgcgtgtgcctagctaggaagtaaaaggatcaagctgtggctgtacgggctcatcaaactatatgaaaaaaacatgtcagccacagattcctggaactttcatgcacggcaaatttcatagatatttctttggcacctcttatctatcgtgtatcccatatatattaatctctgtattaacaaaattggagcttcctcacgtacgcacccaggcactgctcaccaccgtttaagatacagctcaataatgt

SEQ ID NO: 2280 - DNA, 3389 bp, Zea mays
ccgcgaccccaggtcagtcgggactacccgctgagtttaagcatataaataagcggaggagaagaaacttacgaggattcccctagtaacggcgagcgaaccgggagcagcccagcttgagaatcgggcggcctcgccgcccgaattgtagtctggagaggcgtcctcagcgacggaccgggcccaagttctctggaaagggacgcctgggagggtgagagccccgtccggcccggaccctgtcgcaccacgaggcgccgtcaacgagtcgggttgtttgggaatgcagcccaaatcgggcggtaaactccgtccaaggctaaatacaggcgagagaccgatagcgaacaagtaccgcgagggaaagatgaaaaggactttgaaaagagagtcaaagagtgcttgaaattgccgggagggaagcggatgggggctggcgacgcgcaccggccgtatgcggaacggctcctgctggtccgccgatcggctcggggcgtggaccgttgtcgcccgcgccggcggccaaagcccgggggccctaggcgcccccggcagccgtcgtcggcgcggacggtatccgcgcgcctctggcgcgcccctcggggcgctgcgccgcaacggcctgcgagctccccatccgacccgtcttgaaacacggaccaaggagtctgacatgcgtgcgagtcgacgggttcagaaacctgagatgcgcaaggaagctgacgagcgggaggccctcacgggccgcaccgctggccgaccctgatcttctgtgaagggttcgagttggagcacgcctgtcgggacccgaaagatggtgaactatgcctgagcggggcgaagccagaggaaactctggtggaggctcgaagcgatactgacgtgcaaatcgttcgtctgacttgggtataggggcgaaagactaatcgaaccatctagtagctggttccctccgaagtttccctcaggatagctggagcccacacgagttctatcgggtaaagccaatgattagaggcatcgggggcgcaacgccctcgacctattctcaaactttaaataggtaggacggcgcggctgcttcggtgagccgtgccacggaatcgggagctccaagtgggccatttttggtaagcagaactggcgatgcgggatgaaccggaagccgggttacggtgccaaactgcgcgctaacctagaacccacaaagggtgttggtcgattaagacagcaggacggtggtcatggaagtcgaaatccgctaaggagtgtgtaacaactcacctgccgaatcaactagccccgaaaatggatggcgctgaagcgcgcgacccacacccggccatctgggcgagcgacatgccccgatgagtaggagggcgcggcggccgccgcaaaacccggggcgcgagcccgggcggagcggccgtcggtgcagatcttggtggtagtagcaaatattcaaatgagaactttgaaggccgaagaggagaaaggttccatgtgaacggcacttgcacatgggtaagccgatcctaagggacgggggaaacccggcagatagcgcgatcacgcgcgtcacccgaaagggaatcgggttaagatttcccgagccgggacgtggcggcagacggcgacgttaggaagtccggagacgccggcgggggcctcgggaagagttatcttttctgcttaacggcccgccaaccctggaatcggttcagccggaggtagggtccagcggccggaagagcaccgcacatcgcgcggtgtccggtgcgcccccggcggcccttgaaaatccggaggaccgaattccgtccacgcccggtcgtactcataaccgcatcaggtctccaaggtgaacagcctctggccaatggaacaatgtaggcaagggaagtcggcaaaacggatccgtaacttcgggaaaaggattggctctgagggttgggctcggggggtccccggcccccgaacccgtcggctgctggcggaatgctcgagctgctcgcgcggcgagagcgggccgccgcgtgccggccgggggacggaccgggaacggccccctcgggggccttccccgggcgtcgaacaaccgactcagaactggtacggacaaggggaatccgactgtttaattaaaacaaagcattgcgacggtcctcgaggatgctgacgcaatgtgatttctgcccagtgctctgaatgtcaaagtgaagaaattcaaccaagcgcgggtaaacggcgggagtaactatgactctcttaaggtagccaaatgcctcgtcatctaattagtgacgcgcatgaatggattaacgagattcccactgtccctgtctactatccagcgaaaccacagccaagggaacgggcttggcggaatcagcggggaaagaagaccctgttgagcttgactctagtccgactttgtgaaatgacttgagaggtgtaggataagtgggagcctccgggcgcaagtgaaataccactacttttaacgttattttacttattccgtgggtcggaagcggggcaccgcccctccttttggctccaaggcccggcctcgccgggccgatccgggcggaagacattgtcaggtggggagtttggctggggcggcacatctgttaaaagataacgcaggtgtcctaagatgagctcaacgagaacagaaatctcgtgtggaacaaaagggtaaaagctcgtttgattctgatttccagtacgaatacgaaccgtgaaagcgtggcctatcgatcctttagaccttcggagtttgaagctagaggtgtcagaaaagttaccacagggataactggcttgtggcagccaagcgttcatagcgacgttgctttttgatccttcgatgtcggctcttcctatcattgtgaagcagaattcaccaagtgttggattgttcacccaccaatagggaacgtgagctgggtttagaccgtcgtgagacaggttagttttaccctactgatgaccgcgccgcgatagtaattcaacctagtacgagaggaaccgttgattcacacaattggtcatcgcgcttggttgaaaagccagtggcgcgaagctaccgtgtgccggattatgactgaacgcctctaagtcagaatccaagctagcaaccggcgcctctgctcgccgcccgccccgacccacgttagggcgttcgcgccccaagggcccgtgccattggctcagcccgcccggccgacgcgccgcggcgggccgcctcgaagctcccttcccaacgggcggcgtgctgaatcctttgcagacgacttaaaacgcgacggggcattgtaagtggcagagtggccttgctgccacgatccactgagatccagccccgcgtcgcacggattcgt

SEQ ID NO: 2281 - DNA, 303 bp, Zea mays
atgacgcgtagactctgcgcagatcgacgacgtgaggcccgttctgacgagcgcgacacagcgaagggcgtcgctgctgctgctgctcgagcgaggacgcagaccagcgaaggagcacgtgaggaggagctcggcgtgtgccccagcccgatgccgagggatggcagcggccagacttgccggagaagaaggtcggcgtggggagaacttggactgcaggaacagcagggggaggaggtcgactgctactggctgagggagatggtgggaaaaaaggagcctgagctagtgcccacaggttag

SEQ ID NO: 2282 - DNA, 2542 bp, Zea mays
atggttctcgctactgccgagagaggtggagaggagaaggtcgaccaccgcccggcggccgcggcggtcgtcgacgtcgagagcggcagcctgtactcgtcgtcgtcgtccgtggtggatcggcaggactcgctgttccgggaggcggtgacgggcggtcaccaccgtggcgcaggaggacactctcacgatcatgatagctggggcacgacgctgcggctggcgttccagtgcgtgggcatcatgtacggcgacctcggcacctcgccgctctatgtctactccaccaccttcgcccacggcggtgttggccaccccgacgacatcctgggggtgctctccctcatcatctacagcttcctgctcttcaccgtcgtcaagatcgtcttggtcgcgctccacgccaacgacgacggggatggaggaacgttcgcgctctactctttgatttcgaggtacgccgaggtgagtctgctcccgaaccaccaggccgaagacgagctggtctccggctacacttgcaccagccatggaaagccgccgtcagccgcactgcggagggctcactggctcaagcatttgctcgagacaagcaagtcggccaagatctctctcttcctgcttacaatcctggcaattgcgatggtcatcagcgatgctgttctaactcctccgatttcggtgctctcggctgtcagtggcttgaaggaaaaggtgccagatttgaccacagaccagaccgtgtggatcaccgtggcgattctggtactcctgttcgcgatccagcgctttggaaccgacaaagtcggctactcgttcgcgccgatcatcctgctgtggctgcttctgatcggaggagttgggctctacaacctagtcaaatacgatgctggtgtgctcagatcgttcaaccccaagtacatcgtcgactacttcaggaggaacaagaaggacggatgggtctcgcttggtgacatcctccttgtttttacaggaacagaagctctctttgcgaatctgggatacttcagcattaaatccattcagttcagctttagccttggattactgccatctgtattgcttacttacatcgggcaagcggcatacctaaggaagcaccccgaacattttgctgacacctttttcagatcaactccgagcgctctgttctggccgacgtttatcttggcaatcgcggcgtccatcataggaagccaggcaatgatctcgtgcgcgttcgcaactgtttcgcacttgcaaacgctcagctgcttcccgagggttcggatactgcacacgtccaagcggtaccacggacagctctacgttccccaggtcaacctgctgctttgcgtcgctgcttgcctggtgaccgtcagtttcaagacaaccaccatcatcggaaaggcccatgtgaatgtatatgcagagatctgtgtgatcctcgtgatgctcatcacgacgctactgatgacaatcgtgatgctcctggtgtggagagtcaacgtctggtggatcgcgctcttcttcgtcgtcttcgttcccaccgagtccatctacctatcctccgtgctgtacaagttcacccacggaccctacgtccccgtggccatgtcggcggtcctgatggcggcgatggtcgtctggcactacgtgcacgtcaaacggtacaagtacgagctgaggcacacgctgtcgccggccaaggccgagaagctgctcgccgagaagcgcgaccacctgaagagcgtccccggagtcgggctcttctacaccgagctggtgcagggcgtcccgcccatattcccgcacctcgtcgacaaggtcccggcgatccactcggtgctggtcttcgtctccatcaagcacctgcacgtcccccacgtcgacgcctccgagcgcttcctgttccggcaggtggtggagcccagggagttcagggtgttccgctgcgtggcgcggtacgggtaccgcgactccctcggcgacgaggcgcaggacttcgtcgccgcgctgctcgagagcctccagtgctacgtgcgagacgtcaacctctactcggtgcacgagatgcagaacgtcagctatccggtctctcgtgaccagagcttgtcccgggagaagccttccggaaggcacgccgtctatgctgaggagatgatcacgcccatccagtccttctccgagctgtcccatggtgccagcagcaatcgtctaccgcagtttcagcaggcatcaaagatgaatattgaggagttggccaggatcgaggaggaacagatggtgattcagagagaagcagagaaaggtgtggtgtacatacttggagagaccgaggtggtggccaggcctcagtcctcgctcattaagaagattgcggtcaactacatatactccttcctgaggaagaacttcatgcaaggggagaagatgctgtcgattccgcatggcaagctactgaaagttggaatctcgtatgagatctagagatcacgtaacgacttttcagatggatgtatggcaacaagcacatgcacac

SEQ ID NO: 2283 - DNA, 1807 bp, Zea mays
gccagatggacctgggaggcgccagggcccacctgcagtcacaaaggctctgggcagtgacctctgcggccgcctcctctcctctcccagtccgcccctcccgcctcgttctctccgccatcgtcgccgccgcctccattcctccaccagtccaccatcgccacctacgcccaaccaaacccaactccatctcttccgactataaacgcaacccaccaccgctgccgcgaacctctgcgctccgaataccccagacccccgatcctcccaatggccaccgcattttcgctgcgcgctgcggccccggccaccgctccccgcgccgtctcccgatccacctccgcggcgagggtcgtgcccatggcatcggcactggcgggacgcggaaggctggtggcgcgtgcagcagttacagcaaaggcggatgtgccatcgagcacgtccgacggccatgaggtcttgctgtttgaagctcttcgtgaggccttgatggaagagatggaattagatccaacagtgtgtgtgtttggtgaagatgttggccattacggtggttcttacaaggtgacaaaaggtttggctgatacgtttggtgaccttcgagttctggacacccctattgcggagaactcgtttactggcatgggagttggagcgggaatgaaagggctgaggcccgtcgttgaaggcatgaacatgggattcctgctccttgcttacaaccagatctcaaataactgtggcatgcttcattacacttccggcggccagttcaaaatcccacttgtgatccgtggccccggtggtgtgggtcgtcagcttggagcagagcactcgcagcgcctggaatcgtatttccagtccatcccaggcctgcagatggtcgcctgctcgactccttacaacgctaagggcctgatgaaagctgccatcaggagcgagaaccctgtggtgctgtttgagcacgtccttctgtacaacctgaaggagaaaatcccggacgaggagtacgtgctctgcttggaggaggccgagatggtgcggcctggggagcacgtgactatactcacatactcgcgcatgaggtaccacgtgatgcaggcagcgaagacgctggtgaacaaagggtacgatcccgaggtcatcgacatcaggtcgttgaagccgtttgatctgcacactattggcaactccatcaagaagacccaccgcgtgctgatcgtggaggagtgcatgcgcacgggtgggatcggcgccagccttaggtcggccatcgtcgacaatttctgggactaccttgacgcccccatcatgtgcctgtcatctcaggatgtgcctacgccatatgctgcgactctggaggatgcaaccgttgtgcagcctgcccagatcgtggctgcggtggaacaactatgtgcatagattgtggcctgggacgtttgggagactgttgttgccatgaaaaagccttccgtttgttagttttgtgctgtaacaagcattctttggagacttaaggtgtaggcttatagtcgttttgttcttgttttaagaagtataatccagcttcgtagctgcacggactcgatcttcttgttcctaaatctgcgctatgcaatgccgaatttgatggttcgaacatttcattgttgacagaaataatcattgtactccgatgccatgaacctgtagcctccagctgcactggtcagtgaaacacccatgaacaaagtatttgcactaagtgaatatgggtgtacttcattacaacttagcgtagacatttcattgaaataattagagccca

SEQ ID NO: 2284 - DNA, 1193 bp, Zea mays
ccatcgcctccaccaggcccgacgacggcggcactggtagccggcgtgacagtcggttccgtggcgttcgtcgtctgctccggcgtcattgctttcttcctgctgcgtcggcgccagaggcgaaaggcaggagagcgccgcgaactagacgtgttcgacgacgagcctctggatgacgagtcgtttgagaaaggaacggggccgaggcgtttccggtacggcgagttggccatggcaaccagcttcttctccgagaaggagaagctcggcgaagggggcttcgggtcagtgtacagggggtacttaaaagacctggacctccacgtcgccataaaaagggtgtccaagagctccaaacaggggaggaaggagtacgtctccgaggtgaagatcacaagccggctgaggcaccgcaacctcgtgcagctgatcggctggtgccatgtcggcgacgagctcttgcttgtctacgagctcatgcccaatggaagcctcgactctcatgtccacagcaccggcaatgtgctgtcgtggcagcgcagacatgagatcgtgcttggaatcgggtctgcactcctgtacctgcatcaggagtgggagcagtgcgtcctgcaccgcgacatcaagccgagcaacgtcatgctcgacgcctccttcaacgccaagctgggcgacttcgggctcgcgaggctggtcgaccacgagcgccagtcccacacgaccgcgctcgccggcacgatgggctacatggacccagagtgcatgttcagtggcagcgccagcaccagctccgacgtctacagcttcggcgtcgtcgtcctcgaggtcgccaccggccggcggccgatcgtggacacggaggaggagcacgtcaccatgcacctggtgcagtggatctgggaacgctacggccaaggaaggatcctcgactgtaaacacacgcgatcacccacaatagtttctcccacgacgaggcaattcgctcgttatctcgcaccgacgaccagggatcgtggctgccgccagtttgccgtattcgtacagcctgctgttcaccgtcgaacaagggtttatatacgaatctattacaaatgggttcaattatcttattgtaggccgtagtatttggtgttgggctttgagaaacttttgctgcgtctgggccgcctttccgctatggcgccagaccgggc

SEQ ID NO: 2285 - DNA, 1527 bp, Zea mays
gcggccaacattagaggcctcgattgctcggctccaaagacatagcccaagcccaccctcggtgtctccgttcttccacgagtgttggtggtcaccaaagcttcatcttggcatcaggaagctgcagctccctttgttctgttctggcacgtcctcggcattgctccagtgtggtgaagatgatgaaacctggtgagagaagcagggagagggatgctgatttccactattcgggtcacgacgatgagaaggacaggtacttcttcaaggttctggttggcgatttccgtgaacgactggccgtccctgacaaattcatgcagcacttcaccagagggctagtcacaagcagtgttacgctagaatcacgctgcggacgcagtttccatgtccaagtggctgagaatctgggcaaggtggtccttcaagcggggtggaaggagttcgtcgctgcgcatggcttgagcatgggggacgtcctggttttcaagcacgacgggactcctcggctgaaggttttcatgttcgaccatagctgctgcgagaaagtgccgccgccatgccctgtcaagatcaagcgagagcatcatgtctgtggcggagagagaagggagacgcaccctgaagttccaagcagcagctgtggagatgcttccatgacttttgtcaccgctagctcgtcgtcagcctccccctccgacgacgcgtcaggagagtggatattatctccagaagaccagaaaccacgttacgttccaggttacatcctcccaaatggaacctacctcacctgtgtgcagatgcagaaactgaaagaaagagtccgagctaggacttctactatccccatctacggatgcaccgtgaggaagagcaacattcgtaggggatctcagaatatggccataccaagagcatatgctgatgtatacctaccattcgaggaccgaacgctgacgctccaacgctgcggcgagagctgggaggtgcagtgtcggattcagaagggcagacgcggatgcaaaaggctcgcgcaagggtggaggcagtttgctcacgacaacaagctgcagctgggagacctctgcctcttcgagctacttgagaacaccagcaagtacacgatggatgtgcatgtcgttcgcgcggaatgaaaattgcatgcacaggcagctgacgctcttggcgccagcatagcttttgcagcaacatgtggatggtggtagcagatgcatgcttgcccatcctctctggttgggcaattggttaactcgtgtgtgccgccgcctaagttcaggcttcagagtgtttaacttgtgacccatattatgctccagcaatcgtttgaggacagaggtcatcacgatttgatttgtctcaatgattcgggtccaacaagcgaaataaaaaagggcaggaaaacaacgatgactcgggcaaatctaagcatgtggatcatgtaaaataggagacatgatattgtagatgacacagtaaatgacactgtttatagagcgaatacttata

SEQ ID NO: 2286 - DNA, 2620 bp, Zea mays
cttctatagcgcaacaccgcctcctctctcagccagtcagccttatccccaaatcgcttcttctctgctgattccataccgcctcctctccctggccgatccatggtgctcgtctctagctcatgtcttgccgccggccgagcccctccccagcgcccttggagccggcgtcctctgccctcatctcattccccgacgccgccctctccccctcagtgctctgctggtcggcgtcttctccctgcccgacgtttctagcgccatggccgccgcgccttgggtcgcctgctccactgcgccgatccgcccatctccctgctgccgctctcccatggcgcgtccctgcatcttgcttcagctcgctctgccatctcccttggcgccctagccccaacgctgagctccctacccggccgcgcccctggtggttgagctcgccgagcttccttttctatcgctcgtcctcgcccattcggcgccctcatctcaagccagtccagcctctctaatcgccactctcccctatccccttgctgttagcacatggcgagctaaccccatgtgccagtagagttcgtcattccctaagcagcacctccctccatggatgcctcgttgtcgacttgtgcagttcatatttatcggtgaggtcccttttgtcttgtgttacttatctctttaaattgatacatgtgtgcttatgtgtgagatgtgaaggggaaaatcccaggattttggtggagaagaaagcacagttcaaatttgacgcccgccaggtgttcgacgaaaatgttcgaattgggtttcgtcgttgattttgacgcctgccaggtgttcatctcaaactacaatcaccgttgaaaatccgaggcgacgggaaagttaggtggcatcaccagtgatggcgttcgatccttgaaatgtacattatgtgataagagtaagcgtcactagagaatgggaattccaaggcgcaacaaatgatggtcctctccatcatgtcaacatgatcatatccgatgaaccggtgatctatatccactcaaatacatttatggtagcaacatgttgtacctaatatgtttttttatcacctgttaatattgatgccagctgtacaaacggttctgattacttatatcctctgatgtacttctacttagcaccatgttctaacttacacattgcttagtcacctctccagattgtacctttactcttttaaactaatatgtttattactaattttttacgaagtacaatcatgcaacatggactgtcaatgaatctaaataccatatcatttttctacaatgtcttctatttctactcatatgattctgttgtaccaatagggtacacctatccatgctaagattcaagtagataaagaatatgaactcatcttaagtctgtactatgttgtatactataatgttttatctggttgacaaccagcatcgtcactttaaatacaatcatactacagttctactaatacactgatttattgttctccacgcgcgcatgggcgcgcataatacactagtgtatacaagacagcctcaattcatctcctaacaaaaaagggggttaatattaggtgcatcttagcagatatgaaatatagtactatataagagagccacatgttacaagacaattgggttatagctacaagcttcgttatatgttctgccagcttcgttatatgttctgacatgagttacttttgtgttatgcagaaaaacaagaatcgtgagtgcaatggcaaatggaaggtgaaggcccttttgattgacaacttaggtatatttactgtttcattacacaccttgcgcaggtaactataagcctgcttccttcctatgacgcttagccatttttagtctgaatagctgccttcctagcaatacctatttattgaaaatttatagcaccctttcatattcacatgataataacaaaatagtatcaaggaactgaataatataatgtgtccacctgtaagcaaaatatgcctggtcgctggagcacttgtctcgggacatagtgaggcaaagtttggatcatgatattggtctagctattgctcatttcttgagctgtttcattggtaacatttcttggaaagtttggatcatggtattggtccaactattgcttgatgagatagcaaatgttcgagaacagttgctcgacttcttcatgaatgaggtgatagacattgctggattatgcagggttgaggatgcttcacataactaaatctagcattcatatgacctttttgatatgccataatataaggtgttcatctgtgtctaactactcactattgtcttctcttatttgtcgtataggaaaagatggaatggaactcaaattttggtggtcggtcaagtgtgtagagttgaaatcatatatacttagttaggctcaaatttagcgcaattcagttagtattttagtttggatttagagtacacttatgtatgagttatttagcaatgcttatttgtgagatattgaatgatacttatctacattatattaactatagtgttgttaaatatatgtgtgtatgtatattataatgtggtatctcaaaaatgattat

SEQ ID NO: 2287 - DNA, 1036 bp, Zea mays
gccatacgcaactcgcactcgcagcggccgtccgctcccctccgcctttcgtttgccccgccattctatcctttcatcgcctctccagcgcccaccagctagctagctgttcgacccaacaccggactcctcccaccccgatcctctacccgccgcacaccccaatggcgaccgccaccgcgtccgtggcgccgccctccacctccacctcctcggtcctcctgcaccgccgtctcccttccccggcgcccgcgcccgcgtccgccgccttcccccggctctccggcccggccccgccgccgcgccgcgcgcgcctgctcctccgggtcgcgctcaccaacgaggtggcctcggacgacgtggcggccgaggaggccgcggccgcgcccaagatcggcaggcgggtgcgcgtcacagcgccgctccgcgtctaccacgtcctcaaggcgcccgacctggacatccagggcatggagggcgtcgtcaagcagtacgtctgcgtgtggaagggcaagcgcgtcacggccaacttccccttcaaggtcgagttcgagctcgccgtcgagggccagcccaagcccgtccggttcttcgcccacctccgtgaggacgagttcgagttcgtcgacggagagtgacagcgtcgagtgcgttcgggtaagcggcgacggcgagcgccgttcttatagaataatcaaggccgcggcggtcgctggtttatactgttccggtgcaggagctcgcgaggcaaggcatgtcaagtgtttgcttactcactgtctgtgctgctcaggcttcttcctcgttcggttcagcatcggtttttcagctgtggggaattaattgttcggatgctgtgcaccatcgatagtttataatagtggtaatttggccgctgttcgttggctatgctctgcgcttagttattttgctggctcttccaagagattcgtttgtctgattggtacacattgcattgaaacccgggattgtttccttggattataaaatctggctattgtatatttagaggcgc

SEQ ID NO: 2288 - DNA, 3109 bp, Zea mays
cataaatcgtgtgagagagatgtactcacaattaatcctatagcactagtatttatctagtggagtttacacatgtagcataccccatccccagcctacccgtttgtagaggctcttcgctttctctgtctggcctcagcgctccacactcttttgcccctttccagttgtgcatgaccccatcccatccctttcaccaccgcccctcttcctcctcccctagctgcacagcccctcgcagccagtttccctcataacccgtcgtccagagggggccgtaagtatctaatctttctttttcctagagagagacgggagggagtcggggactgagagagatgggtgtagaagcaagaattctccccaattctgtgcctgaattgctttcttagacaaatgacagctgctagtactagtagtacgtatctgtagaccggagacaggagagggactgtgcgctagtcgcggtactggttaagtgatgctgcgattttctattccctcggtcctgtgatgtggtagatcaacggaatttcgtgtttttttgggcagggaattaagcaaaggtggtggggtggtggccatgctgcaccaccacggtggcgccgggtccccttacatggccccgacgacggctgacacgggcatggacccgttctcgccgacgccggcgacgcggcccgctgtgtctgtcaccgccataccacccccaccgacgatgcagttgcggccggcgggagcgggaccgagtgctgatttcgaggaattgccagcgggcggcgccggcgccggtgccgcggccagcctccaggacgacgacatgcagatgcaggccgactacggcgccagcgccgcgggagcgtccggctcgggcggcaaccggtggccgcgcgaggagacgctggcgctcatcaggatccggacggagatggacgccgacttccggaacgcccccctcaaagcgccgctctgggaggacgtcgccaggaagcttgccgggctgggctaccaccggagcgccaagaagtgcaaggagaagttcgagaacgtgcacaagtactacaagcgcaccaaggacgcccacgccgggcgccaggacggcaagagctaccgcttcttctcgcagctggaggccctgcacgccgcggcgccgcagccgcagcccccctcgggcatgaccacggtgcaagctggccctcatcatccgatggcattggcatggacggcgggccctacggcgctgggccctgccgctggcgccggcctgccggacctcagcttctcgtcgatgtcagggtcggagtccgagtacgactcggacgacgacgacgacgatgatgccggggaggagggcctcggcaggggcgagtaccacagggagatgatggcgatcttcgaggggatgatgaagcaggtcacggataagcaggacgccatgcagcgcgtgttcctggagacgctcgagcggtgggaggcggaacgcacagcgcgcgaggaagcgtggcggcgccaggaggtcgcccgcatgaaccgcgagcgcgagcggctcgccagggagcgcgccgccgcggcctcccgcgacgccgcgctgatcgcgttcctccagtgcgtcggcggtggtcaggggcagcccgtgcggctccctccacacagcgccggcgccagtgtcgtgcccgcgccgccaaagccggactgcgcccctccgtcgccccggctcgacgcggctgccacctcgcttcagcagctggtgcccgcgcagctcaaggcggtggaggccttggcgtgggcgggaggcgagggcggcgggtccacgtcgtcgcggtggcccaaggaggaagtggaggcgctgatccaggtgcggaacgagaaggacgagcagtaccatgatgcggggggcaaggggccgctttgggaggacatcgccgccgggatgcgcaggatcgggtacaaccgcagcgccaagcggtgcaaggagaagtgggagaacatcaacaagtactacaagaaggtgaaggagagcaacaagaggcgccccgaggactccaagacctgcccttacttccaccagctcgacgccatgtaccgcaagaaacaccgtggcgacagaggcagaataaccgcagctggaccgaacatgcaggacagcccgagccagcgcgagctcgagggaaagagcagcaacgatgttgacattgacaaccggaagagtgatgaacagggaaacgtgcatacttctcccgtcagcggcaaccgtgatacagcaccaacgaccacccggccgccaggtgacggcgccaaaaacaagacggcggaggacaacttgaaacgaacgaatgtgcagctcaagcaacaacagcatgagtttggaacggacgagacggacagcgacgacgacatggcaagaaaccacacagcctacactgaagaagacgacgacgaagccaaaataaaatacaagatggatttccagaatcctaatatgatagggagcagcagcaatatgtctgcaccaccaccacccgcagcagcagcagcgacgacggctgcggcaccgacgacttcagctgccccaacgagcaacaccttccttgccgttcagtagagggcaatgctgcaggaccggtgccagctgatcagcagttcagcaccacctttttccggcccataatcaccaagtatacctgccctgcctttgaaccatccgaataccatttattgatttgttctgtgataagtaccagatcatgaaaggttaaaaaaaaactagtagtagtaagactgaagaacagaagaggtaccagaggcgcccaaacagaaagttcttttcttttttcttaccataggtcatgttatactgtagcccattgctcacaattgtacattcttgtgtcagtctgaacttccagtaatcttatccgatagaaatcgatcgtgggatttggagcggtgaatcgaccgtttgtttcaggcataaatgacctttcatttcaatcgctcagataacatattgctgattcatggtgtccaggctagaacttgtttgtataggctctatcagcacctctgagtaggacatattcccggatactgctaaatatcctgatcaaaa

SEQ ID NO: 2289 - DNA, 1158 bp, Zea mays
acacaccagtaccactgcacaaaagcacactctgttcggcttgccttgtcctttttccttgccatatggctaccaagatggtcctgtgtcgctttgtagccctcgcggctgtcgcctgcctcctccgccctggcgcgcccgtcgagctccaccgcaagctctccgggtggtccgacgacgcgggcgcgacgtggtacggcgcagccaccggcgctgggagcgacggtggtgcatgcgggtaccagaacgccgtcgaccagccgccgttctcgtccatgatcgccgccggcagtccatccatcttccagaacggcaagggctgcggcgcctgctatcaggtgaaatgcaccgggcacgcgtcgtgctccggcagcccggtgaccgtggtcctcaccgacgagtgccccggcggcgcgtgcctggacgagcccgtgcacttcgacctgagcggcacggcgttcggagccatggcgaaggacggccaggcggaccagctccgcggcgccggacacctcaagatccagtacactcgggtgccgtgcaactggcgagggctggacatcgcgttcaaggtggacgccggctcgaacccgaactacttcgcggtgctcatcgagtacgagtccggggacggcgagctggagtccgtggagctcatgcagcgcggcggcggcggcgggggggcgtgggcgccgatgcagcagtcgtggggcgcggtgtggcggtacaactccggcgacaccctgcaggcgcccttctccgtccgcctcacctccggctccggcaggacggtcgtcgccagcaacgtcatccccgcggggtggacgcccggcgccacgtaccgctcggtcgtcaacttcgacaactaacgaggacggacggacggaccgaaataacggcacgcccgcccgcccgcccgccggccggccgccgggatggccgtgaaaggcgtggcgctatagcttttagtttatgattcgagctgtgcgcgggtgcctactatgccgacgacgctactgtactgttgcgtgcgtgacatgtgcaaatccgcgcagtcaccgtgtaccgccggaatggcgtgtgtttctttgaataaaataaaggctggaccggaagcgaacaatggcttgatttttcgctaccagaccaggcgtgcgc

SEQ ID NO: 2290 - DNA, 1640 bp, Zea mays
atggcattctccaattgtacttcatgcatgttgcaacttaattgcattattgtatctcccggcatattatttggcaggtactgaagtatgcagagatcaataattattagttatttagttcagtctctcgtctatttctcatcgaccagcaactggtcacgttctccccaacccaaataattcgtccggtaggattcttttttttcccgtcttcctcccacgtacgttctcgcgctcccaagtcccaaccgagtcactataaataccccactcgtggcaacacctggaactcaccaaacaacccctcggtctaagctcgcctctgcctcacagccgccttccgatcgagctaccagtgcgtagctcaaaactcaaaacgagaagcaagaactcagtagcaatatatggcgaagtcttgcaccttactgttcggcacagtactggtcgtgctcttgcttctagtgagccccattgcttgctcccgcaagctcgccaagccaacaaacaagcacaggccgagacacaagccggcggcagtcagagcccgcagcaaccacactgccaccccctcggtgtccgacgcctacggctccggcggctggttgtccgccggcgcgacgtactacggcgcacccgatggagacggcagtgacggcggcgcgtgcggctaccagaccgccgtcggacagcgtcccttctcgtcgatgatcgccgccggtagcccgtcgctgttcaaggagggcaagggatgcggcgcttgctacgaggttaaatgcgacagcaacgctgcatgctccggcaagccggcgaccgtggtcatcaccgacgagtgccccggtggcgtctgcctcgccgaggcggcccacttcgacatgagcggcacctccatgggcgccatggcgaagcccggcatggccgacaggcttcgcgcctctggtatcctaaaggttcagtacaagagggtcccgtgcaagtacagcggcgtgaacatcgccttccgggtggaccagggctccaacccgttctacttcgaggtgctggtcgagttcgaggacggcgacggcgacctcagcgccgtcgacctcatggaggccgggtgcggcacatggaccccgatggtgcagaactggggcgcgctgtggcgctacaactccaactccggcaaggcgctgagcgcgcccttctcgctccggctcacctccgactccggcaaggtcctcgtcgccagcaatgtcatcccggccagctggaaggccggagggacgtaccgctccttggtgaattattacccttaaattacagctagctgggagcgtgatcgagggtgtgcttcggccttcgggaggcggcgttgcatgcatcctggcttttgcgagaggcggtgccagaagatgaggaggaggttgaggaatggaattcttccctctccctccacggtctctgcagtccctagtgatgtctgaacgtgctgttgatttctctgtaattttgtttttttctctttttttttctttgtcgtcccgtagttgcgagaggcgcgacgagactgatgtcgcatgccaatttatcaagctgtgtgtgtttgtaccacgcaatcttttcatataaatgaattgcggctgtgtgctatctccattgtc

SEQ ID NO: 2291 - DNA, 2671 bp, Zea mays
cgcactgcagcctgcagtactgcagatgatctggttccgtttgcttagcccccccccccccccccccccccagatttcgccgcgagattatatgggattcggtagatgagggcggcgctattcggtgcccagcggaacggggctgcggaccccatcggaggcggaaagacgctgttctggccggaggggaaggcgaagacgctgttggagccgtggtccgtgctggactgcacgcggagccccagcaactcaacgtcgacgctgtcgtcgtccctgggcagcggcgctgaggactcgaccggcgtggcggtggtttcggacagaagcgccgccgccgaagccaccaaatggggagcccccggcgagcacggcggcggcggcgggaaggaggactgggccggcggctgtgagctgccgccgattcccaccggcctcgacatgggggtcgtggtcgccgacagctgggacgccatgctcggcaacgccgctgcggcggcgcaggaccagacgttcttgaactggttcattggggccgccggcgacttggatcagtcaggaccgccgcttcccgtgcaccaccagccgctcctcgacaatgtgggcttcgggttcccggcagcggaccctctgggtttcacgctcgatccccacctcggcggcgttgcctctgacatgtcgtcccctggtgcggtgtcgcaaactaccaacagtggcggcggtggcaacaaggcgtcctcggccttcggcctcttatccccggagtctgcttccttccagccgccgccgcttccggtgctgttccatgaaggcatcgacacaaagccccctcttgatacgcagtcgcccggcctcctccaccagtaccagcaccagccgacccccgccacaaccttcctcatgtccatcccctccttccccagctacaatcagcagtcgccactcgtccatccaccggccaaacgtcatcaatccataggaggcgacctctatctcgcccgaactcggcttctgccgccgccgccgacggggcaaggtcatgcctttccaccactaaatggtcctgctccattccagctccagccttcgccgccactgccccacggggcaatgaagaggacggctgcggaggcggcgcagcagcagttgctggacgagctggcggcggcggcaaaggccgctgaagctggcaattccattggcgcgcgagcgatattggcgcggctcaatcaccagcttcccccgctcgggaagccgttcctccgctccgcctcctacctcaaggaggccctcctcgcgctcgccgaaggccatcacggcggctgccacctcaaatcaccgctcgacgttgccctcaagctcgcggcgtacaagactttctctgatcactcgcccgtgctccagttcaccaacttcaccgcaacgcaggcacttcttgacgaaattggtggcagcacgtcgtcctgtatccatgtcatcgattttgatcttggcgttggaggccagtgggcttctttcttgcaggaacttgcacactgccgtggcgcaggtggcgcagctctgccgttcgttaagctcactgcctttgtatcagctgcttcccaccatccactggagctgtgtcttgcgcgtgacaacattgcacagtttgctgttgaccttggaattccctttgagttcagtgctatcagtgctgatatgatcaaccctgcagaattcatttctgccactgatgatgaagatgtagttgttgtcctcccgactggttgctctgctcgtgcaccaccactgccagcgatccttgggttggtgaaacagctagctcctaagattgtgatagccatagaccatggcgctgatcgcgctgatcttcccttctcacagtacttcttaaactgctttcagtcttgcatgttcctccttgattcgcttgatgctgctggcattgatgctgattctgcctgcaagattgagaagttcctgattcagccaagaattgaggattcggtgcttgggcggggcaaggtggacaatccaattgcatggagaagtgcatttgcagctgctaggttcgtgcctgttccacccagcaattgggcagaggcagaggccgattgcctcctgaaacgggtgcaggtccacggtttccatgtggagaaatgtggggtcgggctcacactatactggcagcatggcgagcttgtcactgtatcagcatggcggtgctgatcagcaatctacgcctgtgggcaccaatatttcaccaccatttgctagcagcttcaactccagtaacgtgtatttcgtcttgcaatttagtgttgcaaaggtaacaaatatattggtgttgaacccttcatgttgattatctttgcaacttattagctagaagtagaactagcggatttttagcaatgttggtgtcaatgtctctagtgtaatgatgttgctctaggtttttaccctgcttgctctcgggtcactagacattctaatgtgacttgaaacactgcttgtgaggagagggtataattaacctatcaaatgtctgtggtacagtataatacgtgtttcatgttcttttatatcagttcttcttcttatggtatttcattgtgcagtttcaattgttatggatcaaactttaatatgtcctgttaccttatctgcaatc

SEQ ID NO: 2292 - DNA, 399 bp, Zea mays
atgcgacgcgacgcgatgccgccacccaccgccccctcagcctcctcctcctcgtcatccctcttcagcggcggcgagcagcttttcgagtccgggcccagcacactcgtctttctgcccctactcctgatccagggcggcggcatggacctctcccgcgtcggcgagaaactcctcagctctgtccgctcggtccgctccctcggcctcctcccaccgacccccgtcgcgcccccttcccgtcctgaggttccagaacgagctgcggcggcagcagcagctgcacggggcgatcgctgggttgccacctcacgagaggatcaacctgccatccaattcggaggatttggtctccatctatgggagaaacccccagggctaggccgtggaggagcttga

(The sequence listing continues in the following parts.)

1. A method of improving an agronomic trait of a maize plant, the method comprising providing a transgenic maize plant comprising in its genome a recombinant DNA having at least one DNA element for modulating the expression of at least one target gene, wherein the at least one DNA element is selected from the group consisting of nucleotide sequences that are at least 90% identical to SEQ ID NOS: 1-197.

2. The method of claim 1, wherein the agronomic trait is drought tolerance.

3. The method of claim 1, wherein the agronomic trait is nitrogen use efficiency.

4. The method of claim 1, wherein the agronomic trait is yield increase.

5. The method of claim 1, wherein the DNA element modulates the expression of a target gene sequence selected from the group consisting of SEQ ID NOS: 1128, 1130, 1136, 1138, 1145, 1147, 1157, 1161, 1167, 1173, 1254, 1265, 1308, 1342, 1390, 1471, 1472, 1533, 1537, 1540, 1588, 1592, 1600, 1605, 1621, and 1703.

6. The method of claim 1 wherein the DNA element modulates the expression of a gene sequence encoding a target peptide sequence selected from the group consisting of SEQ ID NOS: 2497, 2499, 2505, 2507, 2514, 2516, 2526, 2530, 2536, 2542, 2623, 2634, 2676, 2753, 2831, 2832, 2888, 2892, 2895, 2943, 2947, 2955, 2975, and 3054.

7. A method of improving an agronomic trait of a maize plant, the method comprising providing a transgenic maize plant comprising in its genome a recombinant DNA for modulating the expression of at least one target gene, wherein the target gene sequence is selected from the group consisting of SEQ ID NOS: 1127-2495.

8. The method of claim 7, wherein the target gene sequence is selected from the group consisting of SEQ ID NOS: 1128, 1130, 1136, 1138, 1145, 1147, 1157, 1161, 1167, 1173, 1254, 1265, 1308, 1342, 1390, 1471, 1472, 1533, 1537, 1540, 1588, 1592, 1600, 1605, 1621, and 1703 and wherein the agronomic trait is one of drought tolerance, nitrogen use efficiency or yield.

9. The method of claim 7, wherein the target gene sequence is selected from the group consisting of SEQ ID NOS: 1168, 1178, 1179, 1185, 1194, 1220, 1710, 1716, 1733, 1738, 1771, 1784, 1795, 1807, 1823, 1872, 1892, 1926, 1936, 1937, 1938, 1942, 1970, 2001, 2003, 2006, 2026, 2074, 2105, 2109, 2110, 2130, 2145, 2152, 2174, 2175, 2189, 2192, 2199, 2200, 2202, 2240, 2245, 2246, 2291, 2299, 2310, 2313, 2340, 2341, 2371, 2412, 2413, 2414, 2417, 2429, 2430, 2431, 2443, 2468 and wherein the agronomic trait is one of nitrogen use efficiency or yield.

10. The method of claim 7, wherein the target gene sequence is selected from the group consisting of SEQ ID NOS: 1135, 1137, 1141, 1142, 1143, 1146, 1153, 1154, 1160, 1164, 1166, 1169, 1183, 1190, 1192, 1195, 1208, 1231, 1255, 1256, 1258, 1267, 1275, 1278, 1279, 1283, 1290, 1299, 1307, 1322, 1336, 1339, 1342, 1347, 1353, 1355, 1361, 1362, 1363, 1373, 1378, 1409, 1415, 1430, 1431, 1432, 1437, 1448, 1449, 1452, 1453, 1468, 1487, 1498, 1505, 1552, 1562, 1575, 1615, 1643, 1655, 1662, 1664, 1680, 1684 and wherein the agronomic trait is one of drought tolerance or yield.

11. (canceled)

12. (canceled)

13. (canceled)

14. (canceled)

15. An isolated polynucleotide comprising a microRNA selected from the group consisting of SEQ ID NOS: 1-197, wherein the microRNA modulates the expression of a target gene in maize involved in an agronomic trait, the target gene selected from the group consisting of SEQ ID NOS: 1128, 1130, 1136, 1138, 1145, 1147, 1157, 1161, 1167, 1173, 1254, 1265, 1308, 1342, 1390, 1471, 1472, 1533, 1537, 1540, 1588, 1592, 1600, 1605, 1621, and 1703.

16. A recombinant DNA construct comprising the polynucleotide of claim 15, wherein the DNA construct comprises a plant expressible regulatory element.

17. (canceled)

18. A transgenic maize plant comprising the DNA construct of claim 16.

19. A transgenic seed comprising the DNA construct of claim 16.

20-28. (canceled)
